United States Patent Application Publication US 2005/0228172 A9 - sequence listing, part 127

SEQ ID NO: 594288 - DNA, 556 bp, Homo sapiens
taatgtgaccattaagtatacagactcttgaggacagattttccacgttcaaatcttggctttgcatttaccagctgtgtggccttggaaaattaattaacctctctgagacccagtttcttcctctttaaaactgggctaataataacatacggcaatttttaagcctagttaataaatgcaaaacattygtaatactatatgacttgtaattacaatataaatattaactattgttatttgtaaggcaacatttttttttcttttttgagatggagtctcacactgtcacccaggctggagtgcagtggcgtaatctcggctcactgcaacctccacttcctgggttcaggcgattctcctgcctcagcctcctgagtagctgggattacaggcaggtgcaccatacccagctaatttttgtatctttaggagagacagggtttcaccatgttggccaggctggtcttgaactcctgacctcaggtgatcccgcccgccttggcctcccaaagtgctgggattacaggcgtgacgaccatgcctggctgacaac

SEQ ID NO: 594289 - DNA, 556 bp, Homo sapiens
taatgtgaccattaagtatacagactcttgaggacagattttccacgttcaaatcttggctttgcatttaccagctgtgtggccttggaaaattaattaacctctctgagacccagtttcttcctctttaaaactgggctaataataacatacggcaatttttaagcctagttaataaatgcaaaacattcgtaatactatatgacttgtaattacaatataaatattaactattgttatttgtaaggcaacatttttttttcttttttgagatggagtctcacactgtcacccaggctggagtgcagtggcgtaatctcggctcactgcaacctccrcttcctgggttcaggcgattctcctgcctcagcctcctgagtagctgggattacaggcaggtgcaccatacccagctaatttttgtatctttaggagagacagggtttcaccatgttggccaggctggtcttgaactcctgacctcaggtgatcccgcccgccttggcctcccaaagtgctgggattacaggcgtgacgaccatgcctggctgacaac

SEQ ID NO: 594290 - DNA, 572 bp, Homo sapiens
tatccatatttcttccatttcttacacagcttgcttttgttagcaatatattatagacatcttcccctrtgcatatctagagataagagataagtggatatcattgtttatataatcagtcttggatagatacacatttgagttattttccatttttttgtgccacaaaaaatgtagtgaatagcatcatattaggttggtgcaaaactaattgcagtttttgctatttaaagtaatggcaaaaactgcaattacatttgcgccaacctacatgtatgtcatccagaatgtgggaagttgatctgtaggataaattcctagaattgagattgcttaggtggagggatcatgtactttgaagtttggtagtgatggccaaatggctttccatagggcactgcacatgccaattagcaaagaagaaggttcttctttctcaactttgccaacaaagtatgttatcaaatgataggcttttgacccccgttgtacatgagaagtggtatattcgtgcaattttggatttagtttgagtgatgttgagtatctttgcacaggtttaagggtgtgag

SEQ ID NO: 594291 - DNA, 572 bp, Homo sapiens
tatccatatttcttccatttcttacacagcttgcttttgttagcaatatattatagacatcttcccctatgcatatctagagataagagataagtggatatcattgtttatataatcagtcttggatagatacacatttgagttattttccatttttttgtgccacaaaaaatgtagtgaatagcatcatattaggttggtgcaaaactaattgcagtttttgctatttaaagtaatggcaaaaactgcaattacatttgcgccaacctacatgtatgtcatccagaatgtgggaagttkatctgtaggataaattcctagaattgagattgcttaggtggagggatcatgtactttgaagtttggtagtgatggccaaatggctttccatagggcactgcacatgccaattagcaaagaagaaggttcttctttctcaactttgccaacaaagtatgttatcaaatgataggcttttgacccccgttgtacatgagaagtggtatattcgtgcaattttggatttagtttgagtgatgttgagtatctttgcacaggtttaagggtgtgag

SEQ ID NO: 594292 - DNA, 544 bp, Homo sapiens
acaagcatatgaaaaaagctcagcatcactaatcattagagaaatgccaatcaaaaccataatgagataccatctcacaccagtcagaatgcctgttattaaaagtcaaaaaaataaggccaggtgcagtggctcacacctgcaatcccagtgctttgagagggcaagagggayggaccacttgaggccaggagtttgagaccagcctggtcaacatggtgaaaccctgtctctactaaaaatataaaaattagcctggcatggtggcacatgcctataatcccagccactcaggaggctcaggcatgagaatcacttgagcctgcagggtggaggtcgcagtgagctgagattgcgccactgcactccagccttggcaacagagaaaggctctgctcaaaaaaaaaaaaaaaagtcaaaaataacatgctggtgaggttgtggagaaaagggaacatttatacaccgttggtgggagtaaaaattggttcatccattgtggaaagcagtgtggccattcctcaaagaggtaaaaactgaatta

SEQ ID NO: 594293 - DNA, 544 bp, Homo sapiens
acaagcatatgaaaaaagctcagcatcactaatcattagagaaatgccaatcaaaaccataatgagataccatctcacaccagtcagaatgcctgttattaaaagtcaaaaaaataaggccaggtgcagtggctcacacctgcaatcccagtgctttgagagggcaagagggacggaccacttgaggccaggagtttgagaccagcctggtcaacatggtgaaaccctgtctctactaaaaatataaaaattagcctggcatggtggcacatgcctrtaatcccagccactcaggaggctcaggcatgagaatcacttgagcctgcagggtggaggtcgcagtgagctgagattgcgccactgcactccagccttggcaacagagaaaggctctgctcaaaaaaaaaaaaaaaagtcaaaaataacatgctggtgaggttgtggagaaaagggaacatttatacaccgttggtgggagtaaaaattggttcatccattgtggaaagcagtgtggccattcctcaaagaggtaaaaactgaatta

SEQ ID NO: 594294 - DNA, 608 bp, Homo sapiens
ttgcatgaaagacgcaacgtatttgctgtaaaattttaggaattactagaaaacagggaagccccaaaaggtaacacaatcaaggcaaggcaaaggttgaagagagtactgaaaaatcttttcaaactgtttagagaggtaagtactcctgttttgtttcaaaaagtaagctcaactgtatttaattactttattatggatttacaatgtattaatttaactttaaatagattacatattatttcctgaactgcatacttatcaagtcataaatattaatccagaaacagaaactactgcaacatagatttaattactaaccaaccaaccaaccagataattagatttattaacattaaaagatttatgttatgtgaacatacacaaaaaaattgacaaaattacacagtaaaatcctttctctagagtatttgaaaaataagttgttcttagtagttgccaatgattcagaagttcctgaagatattggggtggaggagtgctagttatttgggcttctattatctagaaaytcaataagagtttgttgtgctggtctgacaaatatcatctgtatatgtggatgaatagttttctctcattagctt

SEQ ID NO: 594295 - DNA, 567 bp, Homo sapiens
cttgaactcattggattcaccaatgtttaaaatctttattgcaccartttttttaaatctttattggttttcattgatctgatgtggttcatgattttccatgacattcactcttttaaaatgaatcataaaatccagcattttgctctgcttgtcccattacttatccataaaaactagatttaatttctactgtaattatttttttaaaatacacatttagtgctttaagaatggaataattacaggtcgggcacggtggttcacttccgtaatcccagcaatttgggggggtgtggcaggaggatcacttgaacccaagttcaagtggagtttgagaccaggctgggcaacaaagcaagatccagtctctacgtaaatagaaataaaaataaaaaaaataagccaggcatggtggcacatgggaggctgaggtggaaggattggggaggttgaggctgtagtgaaccatgatcatgccactcctgttctgcctgggcaacagagtgagatcctgtcttaaaacaaaacaaaaaagaatggaacaattataaaataatgtatgtt

SEQ ID NO: 594296 - DNA, 641 bp, Homo sapiens
aataattctcttaactggtttctaagttgttgagatatgtgtggatctgaatgatttggaaagtaagtaagtggactagcaaactgtaagcatcatataaatatgctttattaaggaatgtggttacactcaaattactcttttacttaagaaaataagaatttaaaccacttgacataaactgcaggaaattgttgaatgatttatcttaatttaatttctttaaattctttcctgtgatgtgctaatatgtatgtaattaagaaccaaatgagaaatgtactcttgaaaaaaactttaagttttgaaaaccttataaaaatataaaaagtcatttttcccctatgattaaagaaaatcaagttartgcatgacctatatgttgctccttgacagtctttaatagacaaaatactggatttcctataaataagaaaatggaaaggaaaaaatcctctgttcctttcatacttttaccccctaactctttaactatacaatgtagttcggcctctaatgtgcttgtgtaagcaaaactcaatacccttaacctccgagaaccacacttctactgttggagttctattgaactccatttcaatgcaaacaagtaaaggaaatgtttaaaaagttgacgtgtg

SEQ ID NO: 594297 - DNA, 554 bp, Homo sapiens
tgcaatagttaaacatcctttcctagtgccttcaatatatgctagatggcgaataataaattcttattcataattgattttattttaaaatcttcattatgccacaggtaaattatatgacaaaaaatagcttcggcatgtgtttttacaatctatattcattttaatttctcaaaattgcttgggaaaatgaatataattatttgaaatcattttcactctgcagatttcatatataaaayaaataaatctatacttcttcaagtagatctgagtcaaatacaatagaccaagctatcttacatgaatatcttttcagatcagttgtggagataaacatttttaaatttactactgtctctaaagaactatatttggcaaacaacgttgagatttagaatagaatgtacacaaatgctatttatatgtatatctagttaaacatttattatagcagtaaaagcatataagacattaaatatatacatatcagaatgctcagaaaggagatgaagatggaacagcaaatacaatccttagagccacagaactgt

SEQ ID NO: 594298 - DNA, 554 bp, Homo sapiens
tgcaatagttaaacatcctttcctagtgccttcaatatatgctagatggcgaataataaattcttattcataattgattttattttaaaatcttcattatgccacaggtaaattatatgacaaaaaatagcttcggcatgtgtttttacaatctatattcattttaatttctcaaaattgcttgggaaaatgaatataattatttgaaatcattttcactctgcagatttcatatataaaacaaataratctatacttcttcaagtagatctgagtcaaatacaatagaccaagctatcttacatgaatatcttttcagatcagttgtggagataaacatttttaaatttactactgtctctaaagaactatatttggcaaacaacgttgagatttagaatagaatgtacacaaatgctatttatatgtatatctagttaaacatttattatagcagtaaaagcatataagacattaaatatatacatatcagaatgctcagaaaggagatgaagatggaacagcaaatacaatccttagagccacagaactgt

SEQ ID NO: 594299 - DNA, 565 bp, Homo sapiens
ctcagtcttacacttttgaaattttctctgttggtatatgtggattttgctcatcatcttaatagctgtagtcagttgtatgactataacacatattagccattcctctattgatggacatttcagttgttcccaatttttggctatttcaaayagtaatgcactagcatttttgtcctttgtctcattgtgcacacacgtaagagtttctctaggtctacctgtaaaggcaggattgctgaaccataaggcatgcctatctcaacattagaaataataccaaataattttccaaggcagttgtacctttttaaaaaaatggttgccctgggatgtggtctcactagtgggactgcaggttcaaaggtttaagcattttgcaaacgtgtgtgtgtatgtgtgtgtgtgtatatatatgtacgtatgtatatatatgtgtgtgtatatataacttttatataaaaaccctctttagaactaaatttgaccatatatatatatatatgtttgcacacacacatgtttgctatatatatatggtcaaatttacttcccaagagggttg

SEQ ID NO: 594300 - DNA, 565 bp, Homo sapiens
ctcagtcttacacttttgaaattttctctgttggtatatgtggattttgctcatcatcttaatagctgtagtcagttgtatgactataacacatattagccattcctctattgatggacatttcagttgttcccaatttttggctatttcaaatagtaatgcactagcatttttgtcctttgtctcattgtgcacacaygtaagagtttctctaggtctacctgtaaaggcaggattgctgaaccataaggcatgcctatctcaacattagaaataataccaaataattttccaaggcagttgtacctttttaaaaaaatggttgccctgggatgtggtctcactagtgggactgcaggttcaaaggtttaagcattttgcaaacgtgtgtgtgtatgtgtgtgtgtgtatatatatgtacgtatgtatatatatgtgtgtgtatatataacttttatataaaaaccctctttagaactaaatttgaccatatatatatatatatgtttgcacacacacatgtttgctatatatatatggtcaaatttacttcccaagagggttg

SEQ ID NO: 594301 - DNA, 565 bp, Homo sapiens
ctcagtcttacacttttgaaattttctctgttggtatatgtggattttgctcatcatcttaatagctgtagtcagttgtatgactataacacatattagccattcctctattgatggacatttcagttgttcccaatttttggctatttcaaatagtaatgcactagcatttttgtcctttgtctcattgtgcacacacgtaagagtttctctaggtctacctgtaaaggcaggattgctgaaccataaggcatgcctatctcaacattagaaataataccaaataattttccaaggcagttgtacctttttaaaaaaatggttgccctgggatgtggtctcactagtgggactgcaggttcaaaggtttaagcattttgcaaacgtgtgtgtgtatgtgtgtgtgtgtatatatatgtacgtatgtatatatatgtgtgtgtatatataacttttatataaaaaccctctttagaactaaatttgaccatatatatatatatatgtttgcacacacacatgtttgctatayatatatggtcaaatttacttcccaagagggttg

SEQ ID NO: 594302 - DNA, 591 bp, Homo sapiens
ctcatttctggaaaaggtgatatctgagctgaaaaaatgttttcacgtagaagtgaacaaggttactaaaataagtactactcaggagtatgataatgagcacggacgtctgagtagaatagaggtaaaggtcactgggattaataaagcaaggtgtggccaaggcgagcggattacctgaggtcaggagttcgagaccagcctgaccaacatggagaaatcccgtctctactaaaaatacaaaattagcccggtgtggtggygcatgcctgtaatcccagctacttgggaagctgacgcaggagaatcgcttgaacccaggaggtggaggttgcagtgagctgagatcacaccattgcactccagtctgggcaacaggagcagaactccatctcaaaaaaaataaaataaaataaaaaataaagcaaggcacacggcctgatcttgcctagattttttatcttccatgaaatgattaatgctgctcataagacttgagagaaattaaataccaaagagtaaaattttatgcaattggtcaggcacggtgcctcacacctgtaatcacagcactttgggaggctgaggtgg

SEQ ID NO: 594303 - DNA, 592 bp, Homo sapiens
gctcatttctggaaaaggtgatatctgagctgaaaaaatgttttcacgtagaagtgaacaaggttactaaaataagtactactcaggagtatgataatgagcacggacgtctgagtagaatagaggtaaaggtcactgggattaataaagcaaggtgtggccaaggcgagcggattacctgaggtcaggagttcgagaccagcctgaccaacatggagaaatcccgtctctactaaaaatacaaaattagcccggtgtggtggcgcatgcctgtaatcccagctacttgggaagctgacgcaggagaatcgcttgaacccaggaggtggaggttgcagtgagctgagatcacaccattgcactccagtctgggcaacaggagcagaactccrtctcaaaaaaaataaaataaaataaaaaataaagcaaggcacacggcctgatcttgcctagattttttatcttccatgaaatgattaatgctgctcataagacttgagagaaattaaataccaaagagtaaaattttatgcaattggtcaggcacggtgcctcacacctgtaatcacagcactttgggaggctgaggtgg

SEQ ID NO: 594304 - DNA, 592 bp, Homo sapiens
gctcatttctggaaaaggtgatatctgagctgaaaaaatgttttcacgtagaagtgaacaaggttactaaaataagtactactcaggagtatgataatgagcacggacgtctgagtagaatagaggtaaaggtcactgggattaataaagcaaggtgtggccaaggcgagcggattacctgaggtcaggagttcgagaccagcctgaccaacatggagaaatcccgtctctactaaaaatacaaaattagcccggtgtggtggcgcatgcctgtaatcccagctacttgggaagctgacgcaggagaatcgcttgaacccaggaggtggaggttgcagtgagctgagatcacaccattgcactccagtctgggcaacaggagcagaactccatctcaaaaaaaataaaataaaataaawaataaagcaaggcacacggcctgatcttgcctagattttttatcttccatgaaatgattaatgctgctcataagacttgagagaaattaaataccaaagagtaaaattttatgcaattggtcaggcacggtgcctcacacctgtaatcacagcactttgggaggctgaggtgg

SEQ ID NO: 594305 - DNA, 654 bp, Homo sapiens
acctggccaattgtttctttttaatgatggtgggggaaaataaatgttaggggtgggtggtggtccatatggagaaaacatcatcttgatgccttgcagaacttataaggaggagcatttgagactgaattatctagaatttaatttagtaattgaaaagttgggaggaagattttacattaaatgaagctgaatgaacacaggcatttatcttttctctcytccaaagctccattaaaattatagtaaatgggattaaaaggaaataaacttgcaaggataaaaataataggagggtagaaaacagcagactagatagcaataacactttggaagttggaatggaatggaaaatggtctaaaagatggaaaaagcacaaatctaaagagactcgggagagccctggttgcacagagctgagcaatgtctagacaattagctctgaatttccccaggtttctgagggctggttgaaacatgtggatgaaaataagaagtgttggttgggccaggcacgatggctcacgcctgtaatccaaacactttgggaggccaaggagggaggatcacttgagtccaggaatttgagactagcctgggcaacatagcaaaaaccttgactctacaaaaaaaaataaaagaaaaaaaagaag

SEQ ID NO: 594306 - DNA, 654 bp, Homo sapiens
acctggccaattgtttctttttaatgatggtgggggaaaataaatgttaggggtgggtggtggtccatatggagaaaacatcatcttgatgccttgcagaacttataaggaggagcatttgagactgaattatctagaatttaatttagtaattgaaaagttgggaggaagattttacattaaatgaagctgaatgaacacaggcatttatcttttctctcttccaaagctccattaaaattatagtaaatgggattaaaaggaaataaactygcaaggataaaaataataggagggtagaaaacagcagactagatagcaataacactttggaagttggaatggaatggaaaatggtctaaaagatggaaaaagcacaaatctaaagagactcgggagagccctggttgcacagagctgagcaatgtctagacaattagctctgaatttccccaggtttctgagggctggttgaaacatgtggatgaaaataagaagtgttggttgggccaggcacgatggctcacgcctgtaatccaaacactttgggaggccaaggagggaggatcacttgagtccaggaatttgagactagcctgggcaacatagcaaaaaccttgactctacaaaaaaaaataaaagaaaaaaaagaag

SEQ ID NO: 594307 - DNA, 412 bp, Homo sapiens
tttactgcttttatccattgcaccatctttcttcgccaagctctcagacatctgaaacttaccgtgtttcccagcaaaggttattttggtttctccgacctacttctttcactgctccaacacaatacraagagctgtatttttctctctctctctgcagagcctttgtcttaaaaatcctcaaaacagtctttccccagaatctcagactctgactgtgggctttcggcacacgaaagggatggttttattatgacactcaaattttacttcaggttcattgacgaccccggccctcaccactgatttttacagtgaagaaaccagcttgggaaacaccatgaataaaacataatgtgaggaggtctccctgggagctaggccaagacatcaaggatgggaactgtcactg

SEQ ID NO: 594308 - DNA, 541 bp, Homo sapiens
aacaggctctttgggactatggtttctttccattgatttgtagttcaacccattaagcatattmtcagcacctagtatattcccagcatgcagcatggctgttgcctccatgagcccagtccagtagaagaaagaccatcagtcatacagatatgaaccaagtgcccattgaagtataagcttgtgctgtgggagcacagaaaagtaggggaatgaataatcctgaggaggaaagagtggatcagagcagtctcacaaaggcatttgagctgttccttcaaggtttccatggtggaggggggaggatcacattagcttatttattttttactacagagattcaacatttgcccttcataaaaattatacagaaaatatgttaagaaaataagttctaagccatcaagcccatctgatctgaaacagaaaaagactcataatgaatatgtcaacacttccacatttttcatttgttttctaaagcaatttcatctgcaaatgaattatgcactccagggctagacagtacctccattcctac

SEQ ID NO: 594309 - DNA, 590 bp, Homo sapiens
tgttataattgtaattatatttacatataattatatgtaatcctatgacatrtaattcatacacaactatatataattttatattctctccagagcatttcttcttaaagcaagaagaaaattcactgcgtgggaggaaaaacctagtattaaaacatgaaattcattttaatactaagggacctcactatttgaaaaaaattacttgtaaatttcttagctgatcaattaattcttttgaaaagcaaattggaaattatgccatgactccagctttaataagtcaagaatattgtgaaatgagtgtttagtatattcttttttttgagacagggtctcactctgtcaaacaggttagagtgcagtggtgtgatctcagctcactgcaacctccatctcccaggctcaagcaattctcctgcctcagcatccccattagctgggactacaggtgtgtgccacgatgcctgggcaatttttgtgttttttttgtagagatgggtgggttttgtcatgttgcccaggctgatctcaaactccggaactcaggtgatctgcccacctccgcctcccaaattgctgggattacc

SEQ ID NO: 594310 - DNA, 587 bp, Homo sapiens
acttgtttaaaatgtatacacatacatacatataattatagtcaattaaatgaaaaggtaatggatttttaaaagaattaagttttgtaaaatttttaagtgctgggtgtcaggattcattatgtttgcaaaaattgtgatttctcgatccttaactaactttaagaccttagacaaatggtgaagttaattagttaataatctttgaaacctagacaatttcaagagtgaaacagatgcaaaataaatgctggttggtaacacaattttaacttaccctgaattcttagaatggcaatagattaataaaatatgcaaatacttttggatgatataatatatatatgtttatttttgccacctcaagtatgttaaaatggtataaaattagtgttcgtaaggaaaagagattcataaaagttttttgttttttgtcttctagtgttctcttatgtctggacaagagaagttagctrctttaatgaaatacagtaatatacaaagttgatcatactaggtacaataattttagtgatcaatacacaaatagacaagaaagtggactgattttttgattattttaaaag

SEQ ID NO: 594311 - DNA, 546 bp, Homo sapiens
tagatgcttagagagtatattctgaatgaatgaataaaggacaatacaataacatttctgtgacttacagacaatttgatgcctttcttgcagagatgggtgccagcgtgccttctgagaatggagaggttataatataatattggccacagatgagtagcctgttcagggctcgaggcatggcatacacatagaataggaaacaccgcctgctttttccttccatctgtgaaccaaagggtttagattcttttttttttttttttttttttttttttgagatggagcctcgctctgytgcccaggctggaatgcagtggtgcaatgcaatctcggcttattgcagcctctgcctcccgggttcaagcggttctcctgcctcagcctcccgagtagctgcgattatagtaatgcgccaccatgactggctaatttccatatttttagtagaaatgaggtttcaccatgttggctaggcttgtcttgaactcctgacctcaagtgatgtgcctgcctcgacctcccaaagtgctgggattacagatg

SEQ ID NO: 594312 - DNA, 597 bp, Homo sapiens
catccatcttgctagtaacactttgtacttttggatgaatcactatactttaattttgggggattatatcccaaaggttaatacaacatttctgagactggctacagaccaattcctaacccatttccttgtttgtcctcaatttgttgaatagctttgactattgacttaccgtgcccaattctttacatctattaccattaatccgaaaacaagcctgtaaaactgagagacatatccatataccagaagtcatcttactagtgaggcagttgatttgcaagtcaaaccaagtcatatctaactttaatactgcagattttttggttgctatttcatgctaccttcagtgtctcacacacaaaaaataccatgcttgtgtttgtgtgagtgtatgygtgaatgtccaggaatgcatgtattgaggtggtggtgaagagttacaaagaaaaagaaagcattagaacaatttaattcaaattcatttagcagattttggtcatttattttattttattttatttattttttgtcaatcacgatgtctatacaactgcgctgtgctccctcaaaaaatctctactcacaccataattt

SEQ ID NO: 594313 - DNA, 597 bp, Homo sapiens
catccatcttgctagtaacactttgtacttttggatgaatcactatactttaattttgggggattatatcccaaaggttaatacaacatttctgagactggctacagaccaattcctaacccatttccttgtttgtcctcaatttgttgaatagctttgactattgacttaccgtgcccaattctttacatctattaccattaatccgaaaacaagcctgtaaaactgagagacatatccatataccagaagtcatcttactagtgaggcagttgatttgcaagtcaaaccaagtcatatctaactttaatactgcagattttttggttgctatttcatgctaccttcagtgtctcacacacaaaaaataccatgcttgtgtttgtgtgagtgtatgcgtgaatgtccaggaatgcatgtattgaggtggtggtgaagagttacaaagaaaaagaaagcattagaacaatttaattcaaattcatttagcagattttggtcatttwttttattttattttatttattttttgtcaatcacgatgtctatacaactgcgctgtgctccctcaaaaaatctctactcacaccataattt

SEQ ID NO: 594314 - DNA, 597 bp, Homo sapiens
catccatcttgctagtaacactttgtacttttggatgaatcactatactttaattttgggggattatatcccaaaggttaatacaacatttctgagactggctacagaccaattcctaacccatttccttgtttgtcctcaatttgttgaatagctttgactattgacttaccgtgcccaattctttacatctattaccattaatccgaaaacaagcctgtaaaactgagagacatatccatataccagaagtcatcttactagtgaggcagttgatttgcaagtcaaaccaagtcatatctaactttaatactgcagattttttggttgctatttcatgctaccttcagtgtctcacacacaaaaaataccatgcttgtgtttgtgtgagtgtatgcgtgaatgtccaggaatgcatgtattgaggtggtggtgaagagttacaaagaaaaagaaagcattagaacaatttaattcaaattcatttagcagattttggtcatttattttawtttattttatttattttttgtcaatcacgatgtctatacaactgcgctgtgctccctcaaaaaatctctactcacaccataattt

SEQ ID NO: 594315 - DNA, 480 bp, Homo sapiens
ctgataaagacgtacctgagactgggtaatttacagagaaaaagaggtttaatggactcacagttccacatggctggggaggcctcataatcatggcagaaggtgaaaggcacatcttacatggcagcaggcaagagagaatgagagccaactgaaagggaaaccccttataaaaccatcagatctcatgagacttcttcactaccatgagaacagtatgggggaaacccccccatgattcaattatctcccatcgggtccctcccacaacaagtgggaattakgggagctacaattcaagatgagatttgggtggggacacagccaaactgtaacgctccatgaacatcatgtgtgataatagctgtggaagagctgtttaaactgcaaaataatataaaaacataatgtatcatcatattcatgtgatgcaggttaaaaataattcagtcaattgtcactatttgcagtagctatgtt

SEQ ID NO: 594316 - DNA, 560 bp, Homo sapiens
gtccagcacttgagctgaattttgaaatgctaaaataattgtccttggaaatcaacaggcaaaggtacatcatgtcggagctacacttatcacagggtagatggtggcacatagactcaggcgtccaccagggtcagtcccctgcaggccagtctagctgcccacgggccactgcagcagcccctgggagcagtgaggccacccttctctgtgggttcattcttttcagtggtaggtatttcaytccttcgtgtaatctgctaggtggttgggatgcagcaacgtccacaagaaactggatgctgccaggatgagaaagccactgcgagcccgttgcaaacctggctcttccagaggggagcacgtgtatgagcagaaggaagctgccttgtttacctgggtgtgaacaccaaaactgtggcccacatctgccttaaatcaacacagccctacagaggttcttcattccatttgctctattttttttttttttttgagacggggtctcgctctgtcgctcaggctggagagcagtggcacgatctcggctcactgcaagc

SEQ ID NO: 594317 - DNA, 560 bp, Homo sapiens
gtccagcacttgagctgaattttgaaatgctaaaataattgtccttggaaatcaacaggcaaaggtacatcatgtcggagctacacttatcacagggtagatggtggcacatagactcaggcgtccaccagggtcagtcccctgcaggccagtctagctgcccacgggccactgcagcagcccctgggagcagtgaggccacccttctctgtgggttcattcttttcagtggtaggtatttcactccttygtgtaatctgctaggtggttgggatgcagcaacgtccacaagaaactggatgctgccaggatgagaaagccactgcgagcccgttgcaaacctggctcttccagaggggagcacgtgtatgagcagaaggaagctgccttgtttacctgggtgtgaacaccaaaactgtggcccacatctgccttaaatcaacacagccctacagaggttcttcattccatttgctctattttttttttttttttgagacggggtctcgctctgtcgctcaggctggagagcagtggcacgatctcggctcactgcaagc

SEQ ID NO: 594318 - DNA, 512 bp, Homo sapiens
tcaagagttcacatttatatagcagacacagatggtgactattagattttagtaaagtggattgaaaactattcacatacaattgaggaagaagcaagctgtccaacggagttagatgtaatgggatgattcatctatggacaaagaagaggaactcaagaaaagggcccaaatgtcaggaattcaattcaatttytctaacattaaccagacactctatacgggttcagcaaagtgaaaagtaggcatggtgggaaaatgaggcaaacaattaaaaaaaaaaagtgtactacctcttagaatcatgcacaaaatacgtttgttaaaaagtaatgtaagaaatcctaaaactttaagtataaaaaaaaaagaataaacctaaatcacaatctgaaaaaaaaaaaaaaaaaaaaaaaaaaaagaaatccataattgggaagccatatggcacagaagaaggaccatggatttttaagccagtcggttctgggtctgaaccactattatgactg

SEQ ID NO: 594319 - DNA, 512 bp, Homo sapiens
tcaagagttcacatttatatagcagacacagatggtgactattagattttagtaaagtggattgaaaactattcacatacaattgaggaagaagcaagctgtccaacggagttagatgtaatgggatgattcatctatggacaaagaagaggaactcaagaaaagggcccaaatgtcaggaattcaattcaatttctctaacattaaccagacactctatacgggttcagcaaagtgaaaagtaggcatggtgggaaaatgaggcaaacaattaaaaaaaaaaagtgtactacctcttagaatcatgmacaaaatacgtttgttaaaaagtaatgtaagaaatcctaaaactttaagtataaaaaaaaaagaataaacctaaatcacaatctgaaaaaaaaaaaaaaaaaaaaaaaaaaaagaaatccataattgggaagccatatggcacagaagaaggaccatggatttttaagccagtcggttctgggtctgaaccactattatgactg

SEQ ID NO: 594320 - DNA, 584 bp, Homo sapiens
gtactgatcgtaggcaggagatgtagtgctgggagcttttcatctctctgggaagacagggcatatttatcacagagacagataacaatacagtacattaaatgccaaacaaatgacattgaaagtaagtggaataggagtttaaagcaaggagaagtcatcaaaaggaggtgggacttgatctcagcctagaatgaaaggcaggtgtctggctagagaggaagttggggcatttctaggtaagggagtattgcaggcataaagtcaggtgcacatatgaccacagagtgcttgaggggtaatgagtttctcaaaacgaagagtaggggttgctgaatatgygttagaatgtagattgaatccgtggacctgggaaataataactgttgacacatgcatattgtcatttgagtttcacaacactcctgtgagggagacactattttatggatgagcaaacagaggcatggagctgccaactgattgcccaagacaactgacaaaaggcaaagccgacctcaaacccagacggtccagctctacaggccaccatctcacccatgagcttggtgggtctcaaactt

SEQ ID NO: 594321 - DNA, 547 bp, Homo sapiens
ccctgtgacagtcattcatctgtgctctgggtggcccatgggatgagtgtactactgggcaggtgtaacttcaggggcacrcacagcagacatccccagctgacatgacaacctactggcttctcaagatttgactaatcatatatagtcatcccacaatatcctcggggtatcggtttcaggacccccaagtacatcaaacctcatgcatactcaaatcttgtggtcagctctgaggaacctgcatctagcaagggccgactttgcatatacgcaggtcctgcatcccaagaatactgtatttttgatccgcatttggttgaaaaaaaaatccacttgtaagcagtgcagttcaagcccatgttgtttaagggtgaactacatttctgtgaggggatcatcttcaaataaagtccttgtttctgtaccagttacagcaaaggccctgctttgagaatttaacagtcagagtagccacccacttcaaaactgaccagtcccatccgtggcaagcagacgatgtgacatcaacggctcttaccgcacc

SEQ ID NO: 594322 - DNA, 544 bp, Homo sapiens
ctatcatactaccatttttttcatcgtatttaacaatgacttaaattattgatgtatttgtttgttcttgtttgctgttttatttatttatttttttctcaccagcaagtcagctccataaaagcaggggcttcgaatctttcttccctggcctatctatccccagcacccagcacaatgctggatgaattaagattaaaaataatatctatttccaggggctggtgtgaggcttgaatgtaaaaaatgctttgtggaggggtcatacaattgttggattttatcaatcattttatgtgtctgtaattagaaaagattatattgctgtttactaatataggtcagaagaaatgaaaagtctcgcatccgattagktagtgaatctgcccaaaatctgtgtgattgaagctgttcatacatactgagatgaaatcactcgctgtcttgtaagcatctattatctactctgcttcagggggtgtggctggggtatgaaagacagatgcctggtctctttgccttgacggtgcttacaaacaaatga

SEQ ID NO: 594323 - DNA, 586 bp, Homo sapiens
ggtcttgctatattgcccaggcaagtctcgaactcctgggctcaagtgatgctcccacctgggctccaccatcctccaatgccacccctcccctcccccagtagctgggattacaggcatgtgtcaccaaacccagcttgatggtaatttgttattgatattttttcccaggtaagaccatgaactcctcaattgcatggagtatcttaataatctttaattccaagtgcctaaaacagagaggtcctctcactraacaatttttgagcatactgagaagagttaaaaacactaaaacaaaacctttaaaccactgcttcctgtgaattcataaacactaggattaaataattgcttggataagaaaagcattttccaggtctgctcaaaaattgtgttggttatagtccttgctctgactttgtgtcttggaacaaaaagcagattctggaaggctgacgaataacggataacacaaaccttgactgctgttgaaaattccagatgggggaatctgtgttttcaaccacttgggtgtatacaggagatgactcatcggctgttgcaaaggatacacaacaactgg

SEQ ID NO: 594324 - DNA, 575 bp, Homo sapiens
cccttcttaaaataagttattcctttgtaaactgctgatttctatgggcatgtactcgataaactgttgtgagtatcgagtgatatcaccagtttaccacccaagctacaccgtgagtttgatgtttgtctagtttcaatttagcagcaatttatgttgctctgataggtgctcttttcaaattgatgtcttatctttcctagtgcctcaagctaagtcctgttcagacatgttgtaacaatctactttgagtttattttagtaccaaaaatatwtgaaatttatacatagttttttcataatacatatttttcatggactttctgaagaccctcatctaatcaaactttttttgtttattgaatttttatatcctcaaaaggagctggattatgctgaattatccatggtttcttatctgattcatctaggatcaacttcctaggagaaccaggcaatcaagtgttaacctgtggcttctctgcccctcctaccccatcccttgttacaacaatatctactttttgtagaaaaaagtcccaaagattgctcaactcttaaaattatgtgattct

SEQ ID NO: 594325 - DNA, 626 bp, Homo sapiens
gcacaatcatttttttctctttatttttccctktatttccctccgtctataatatataaccagctgtccaccagtaaatatttactgaacatctcctatcgtaagtatagtgttctggtcatgtagtaggctgtctggtctgggagactaatgcaagaaatttgcacatggtccctttcttcaaggagtccttatctcttgttttccatagaaaaatgtcacaggagggcaaatgggactgaatgaatgggggctattgagtcactgagatataaaggacgcttttctaagcacttacgttctctccaccctgcttgctcacccatccttgtgttctccacctgtgtctaggtttgactcgagcattgggcccctactgtttgctgaccagttcttgcagctctccactcgactgcctagcactaacgtgtatggcctgggagagcatgtgcaccagcagtatcggcatgatatgaattggaagacctggcccatatttaacagagacacaactcccaatggagtaagctttcaaatgggcccctttccactgaatatcatagtctcattcttaaaggtcacctctagtattacagtgtagtgtttaagagttagagtctagagtg

SEQ ID NO: 594326 - DNA, 550 bp, Homo sapiens
taaaaaaagatattttcaacatacataagataatgtaaagtaatacctgcaatttctaaagaatatctctatatttttataaaagtagtgaaggcctcaggataagaaaaatgtgaagctccatctcttctcccttattattcttccatttatcctacttagctccagagaaactttacaaaatattcagagttaatagagacccttctgccaaaatatctcctttgttacaatcaattatgtggataaacaagcaaactttccttagcaattagaagcagaatgaagtcttttatttttgagatagtacaacattactatgaagtagaagtgaaagcaatgtacacagctgtaccataaacagttttccttcacagaccattcccataaatgccattcccaaaaacacatccccaaggtaacccatttcctggtttccctctcagatgtttctttatgcaactatatacaagtatcaatataaattaagttgtactttgttcttacaaaaaggaaacaaacattttstcttcttcacttttcttactca

SEQ ID NO: 594327 - DNA, 423 bp, Homo sapiens
ggagtctaggagatttttgcacgtcgtgcagctgcagcaaaatgctaccataggtgcccrttctccaaggctctcatcttcctctgagtacctctaaccccagctggctgctggaccaggagagaacagggcttcctgtgtgcttgtggcatttctgttctgcataacccttatctgctagctccttccaagtcaactgcctggctgctgccacaagggcatgtacacagcacagccttcactgtccagcataagtgctttgctggcagccccacctgaatgctttcccgggggcctggaagcactttggctcccctaacacagccagcagccaaccttgagaggtcagaggacaaagcgatgagccaggtcccaataccccaaaaggaacagcacacaattcaagagtgccaaactgagatc

SEQ ID NO: 594328 - DNA, 505 bp, Homo sapiens
ctctcaaaaaaaaaaaaaagaaaagaaaagaaacaaagaaagaaagaaaatatatcacacttctcttgtttttcccattatcaggaccaagggttcaaaacattgaacatctttcagatgtttacacttctcacatttattttgcaacatgcattataagtacagagggctaataaatgtatacatctatttattttttaaamgatgtattaaaagaatttaatacaaaatgaagccatgtcatagcttaaatatccattgtagatcatgagctgtttgattttgagaatgatcattttgtttcaattagtactatcagattactcaaatccatgatgaggatttgaactgaaaacaggacagacttaatttttaaggagttaaaagcagtgtttcatgccatctccaaaggcctgaatgaatttgtcattcctcagggtaaacataaaagggttcaaaaaaggggtcaccactaaaaccagcagtgacactaccctgttatact

SEQ ID NO: 594329 - DNA, 443 bp, Homo sapiens
gtattctaatacaaccctagtaatctttcacatctggtatgatatgaattttcaagttcatcttgtggattccccatcctagatgaggaatcagtcatttctccaagaagccctgatttctcttaccaggaaattgtattgcaagactacaatatgggcctagraatgttcattgtaatcgaattggccaatgttgctaagttatggcaatgaacagagccaggagtgagagacagagaaagagagagcacacgcactgagtctgcccatatatagagatttacctaagctcctccatattatattaagaaatagaatattccatatttatttgaaataaaggacacatttcctttgtttcacattatactcacaaccatcctggaatactatctccatcaatatgattactgaaaatattttttaaaaacttttgcacatgc

SEQ ID NO: 594330 - DNA, 521 bp, Homo sapiens
ggcatggcatatttaagttgctgaagcaaaaaaccctttaccttagaatagcgtatctgatgaaaatatccttcaaacatgaaggggaaataaagactttcccagacaaataaaagctgagggatttaatcaacagcacatcagtcctataagaaktgctaaaaacagctctttaatctgaaagtaaaggacattaatgagcaataagaaatcatctgaatatacaaaattcactgattatagtaggtacatggaaaaacacaatatcacaacagtgcaactgtggtatgtaaagtactcttatcttaagtagaaagactaaaagatgaaccaataaaaatgataactacaacaacttttcaagacatagacagtaaaaacaaagttataaatagaaacaataaaaagttaaaaagtgggagacaaagttaaaatgtagagtttttattagttttctttttttgcttacttgtttgttaatgcaagcagagttaagttgttatcagcttacaataatgggc

SEQ ID NO: 594331 - DNA, 611 bp, Homo sapiens
tcactgtataatgataaaggggtcaattcagcaagagaatataacaatataaatatatatgcatccaatactggcacacccagatatgtaaggaaaatattattagagctaaagaaatagatagtctccaatataataatagctggagagtttaacactctgctttcagcattggaccgatctttcagttggaaaatcaacaaagtaacattggacttaatctatactatagaccaaatgaacataatagatatttatagaacattctattcatcagctacagaatacacattcttttcttcagcatatggatcattctcaaggatagacyatattttaggtaacaaaacaagccttaaaacattcaaaaaattgaaataatattaaacatcttctctgaccacaatggaattaaatagaagtcagtaacaagaggaagtttggaaactgcacaaatacgtggaaattaaacaatatgctcctggatgaccaatcagtcaataaagaaattaagaaaggaattgaaaaacttcttttaacaaatgataatgaaaacacaacatactgaaacctgtaggatattaagacggaagtttatacctataagtgcc

SEQ ID NO: 594332 - DNA, 611 bp, Homo sapiens
tcactgtataatgataaaggggtcaattcagcaagagaatataacaatataaatatatatgcatccaatactggcacacccagatatgtaaggaaaatattattagagctaaagaaatagatagtctccaatataataatagctggagagtttaacactctgctttcagcattggaccgatctttcagttggaaaatcaacaaagtaacattggacttaatctatactatagaccaaatgaacataatagatatttatagaacattctattcatcagctacagaatacacattcttttcttcagcatatggatcattctcaaggatagaccatattttaggtaacaaaacaagccttaaaacattcaaaaaattgaaataatattaaacatcttctctgaccacaatggaattaaatagaagtcagtaacaagaggaagtttggaaactgcacaaatacrtggaaattaaacaatatgctcctggatgaccaatcagtcaataaagaaattaagaaaggaattgaaaaacttcttttaacaaatgataatgaaaacacaacatactgaaacctgtaggatattaagacggaagtttatacctataagtgcc

SEQ ID NO: 594333 - DNA, 560 bp, Homo sapiens
cccaaattaataaaatcagagatgaaataggagacattacaatggatggcacagaaattcaaagaatcattagtgactgctatgagcaactatatgccaataaattggaaaatctagaagaaatgggcaaattcctagrcacatacaacctaccaagattaaaccacaaagaaatccaaaacctgaacagatcaataacaagtaatgagatgaaaaccatgataaaaactctcccaataaagaaaagcccaggatccaatgatttcactgctgaattctgccaagtatttaaagaagaactaataccaatcctactcaaactgttctgaaaaatagagaaagagggaatacttcgaaatttattctatgaagcctacattaccctgataccaaaaccagactaagacacatcaaaaaatgaaactacacgcaaatataccaatcaatattgatgcaaaacacctcaacaaaatactagcaagctgaattcaacaacatattaaaaagatcattcatcacgaccaagtgagatttatcccaggaatgcaaggatggttcaa

SEQ ID NO: 594334 - DNA, 560 bp, Homo sapiens
cccaaattaataaaatcagagatgaaataggagacattacaatggatggcacagaaattcaaagaatcattagtgactgctatgagcaactatatgccaataaattggaaaatctagaagaaatgggcaaattcctaggcacatacaacctaccaagattaaaccacaaagaaatccaaaacctgaacagatcaataacaagtaatgagatgaaaaccatgataaaaactctcccaataaagaaaagcccaggatccaatgatttcactgctgaattctgccaagtatttaaagaagaactaataccaatcctactcaaactgttctgaaaaatagagaaagagggaatacttcgaaatttattctatgaagcctacattaccctgataccaaaaccagactaagacacatcaaaaaatgaaactacacgcaaatataccaatcaatattgatgcaaaacacctcaacaaaatactagcaagctgaattcaacaacatattaaaaagaycattcatcacgaccaagtgagatttatcccaggaatgcaaggatggttcaa

SEQ ID NO: 594335 - DNA, 340 bp, Homo sapiens
acttcctgccaggagagttctaatgcagaggaacattttaaggacaatttggaaaacaaaatacctcaacacagattcacccttcctctgtgtctaaatctccttgaaatacagtgggaagagaaatgtagtaaaattttaacaaacattgaatctggrtaaaaggtagctggaagttatttgtactttccttacaacatttctgcaagtctgaaattatgtcaagttaaaaatgttaagaaatccagttgaagacactaatatgaatgagcaggttcttgctgttccatttgctccatttgctggagctctgctcattcccctttatcatggactcctc

SEQ ID NO: 594336 - DNA, 484 bp, Homo sapiens
gaaccactctaacgtattcttttctatcttctaaacaattctgaggtgtggcaaactagtacagtcttttgcaaaataatccctgaactgaaattgtgctataaagagttatatgtgtgggctaaaagagaagtcatagaattctaatgattaaagtgtatattatcaccaatataaattcctctaaaatttacayaactggtcacctgactccactcctttctgaagcaaaattggtgtgaaaacagaaactaatttagaagtatagaattaaattgaaaatttaaaaagaaatttattccacagaatttctacagtcacaattagataaaagagcctcaatgccaactgagcagaaaaaccaatgaaggcactgctcttagtgtagccatgtatcaatgatgattttaacatgtgaaaagcagaacttttggtaaaagcatgcctatttatatcaaggaggttcaaaactgactcagaggaa

SEQ ID NO: 594337 - DNA, 601 bp, Homo sapiens
gtctgaacaatgcatttgtaggtcaggagtcacccacatggtgttggcagactttgtacacagtatttagagtgttttgtctctgtgaatctcggttccaagatgtgtctcctcatttcctagttgctgtggttttcctgaatgatgactctgggtctttaagctggtaaaatgtagattttctayctgagtttttgccatgctaccaggcagtgagtgtggtctacctttaggccaggagtcataaaagtgggaaaatcgcccaatgccctttccttcttccagtgtacattctcctctacagttgccctggttttagttgtttgtcagtgcctccaagtactgatttttttattttgtcctgcattatatgtcttgcatatatgcaaaagattggcctgttacataaatacatatacatcaaagatttagatatttaaaaaaacccacaaagttactttaaaaagcatggattaatatttttataatgtaagagtatgaaacacctttctaagcatgacataaaatctggaagccccaaagaaaaatattgacaaattgtaccacaccatatcaagtaaaacatctgtatgattagaaa

SEQ ID NO: 594338 - DNA, 623 bp, Homo sapiens
  misc_feature 579: n = A,T,C or G
cttcttgatgatttgtattgatatccttcttctctctggtatgtgatggatagaatcaaggctaatatctctgagaatgacagaagtggggagaaatgtaacaacaaagctctaacagcttcattttgtatgttacatgttgaaaatatttactcaatgtcaaatgccagcactggaagatccttggatggttcctccctatttcctgttctccctgtgtcccctgtatcatccctcaaccaacacccacacaccaacaaaagaaaaagtgttggaaataaatgacattgtattattctggaaactggtaaccattttttgaactctcaaaatgtcagattcagctaggttcaatatgctcttgatttaatgctgatattacattccttctttttggtacgwgcctagacaatctctgtgaaacacataaaaggaatctgttctcacttttttcttttgcttttaggaaaacaggactgaggcccattatatgattttgaccataacttacacttttacaactccacttgtaccctactctttcacatgaggtacccaggacagcttttattctacggngacaccatctatatacatgcggagatattacaggactcagctga

SEQ ID NO: 594339 - DNA, 581 bp, Homo sapiens
tgcacagcaatatttgagaacccttgccctacagacagtttctgagagcaccccaggaggattaagttttagttactcaccattgtgatgtgttcaatgaagtggcctttagtttctatcttctggtttctgtctccctaactcccttcccagtatttcctggaatcatcagccaaataaattacttgcacttggatcattgttttggggtctgctctcaggaaacctaaactatgacactctatatctacagttctggtattcatatttgtttcagtcagctaatgttggactctgttagcacagctgtttggaatttaaacttttcaagaattctttcatccttattattcattcctgttttattcttggatatcctaagtgcatacccagactaatgataatatcaacacttgttcagtatggttggtcatttttaaaaataaacaggcaatttatgggtgacccacacaaagaacagctgctgccatcactcacgccctctccattgttgatggcctctgcaactgacattgtcccaagcagctgcygacagagctgccagtacctgtttccacgtc

SEQ ID NO: 594340 - DNA, 578 bp, Homo sapiens
tttgtgaactttccccaaatatatttcctacagcactttcttcatttgactaataaagttcatcttagcatgcagcacactgaaaggcacttaaatgtttgttcacactaaaaacagttgtttatgaattatgttcttgacacacttcacttaatcctcacaagtaccaaataaggtagttattattaccctcattttatagatgagaaaattgatgttctgggaggttacaagtcttgcctgaaaccacacaaagtagcagaattatgatttctgatttgtccaactctttctgtcaactmctgctgctaattatttgtatcatagtaagcacttcataaatctgtctttgcaactagattgtaagcttctcaagggcagccactagtctttatcattgtactctcaatgcctgctccagtgcttaataatgtttattgaatgaatgaatgatagcatgatttctgggttccacttaaatttgacaaatgagaaaatctcaataatatctcagtctctaggcatccttcagaatgattcatcaagccattgattcagcctcatgggctgggacatta

SEQ ID NO: 594341 - DNA, 586 bp, Homo sapiens
gaggttgcagtgagctgagatcgccactgcagtccagtctggggacagagcaagactctgtttaaaaaaaaaaaaaaaaaaaaaaaaaaagcgtggctttggcctaagactggaagtacccagattccagacttaagaaatcctcattaaaatgctttcagttgtttttcatgaaagaaatgaccagtgatactttgtaaaccatttatctggccatgagtgatcaggtgagaaaaccgttagcggacaccagaatgatctggagaggattagggacggctcttgtgggcacatttttactctagtttcatgggtggagatggcatctgccgtggtctgcagcatgcaagtaaagacaccaggtggcaccatttattagctttcaatcccatggagaggtcccatcatgtaactaccaagaggttgaaggaaccaactacctcttgcatattgtagctaatggttcttgccttcttcttccagacttgggaaatamatttgaaaatcgtattttctgtttcataatatttgcagtgcatggttgaagggaagaaggccacgtgctattgccagttggtctccagga

SEQ ID NO: 594342 - DNA, 592 bp, Homo sapiens
tacattgcgactcttttaaatagctgatagttggacttgtttctttatccactgttttaacctttggcttttaattggactgttttgttcatttacatttaatgccattacttatgtagctgagttttaaccatgtcatcttgctatttcctgcttctcttatctgyttatctttccctgtttttgtgtggattgagcttttcaaattccatttatataaaaattacctctttgtaatttttttagtggttgcatttgtctactcaggctgccataacaaaatatcgtagattggctggcttaagcaacagaagttttatttttttcacagttctggaggctagaaagtccaagatcaaagttctggcagggtttggtttctcatgtctcatcttggcttgtatacatatatagctgctttcttattatgtccacacatggggggagcgggggatgtctctcttcctcttcttataagcccaccatcctgttggattagagtcctacccttaaaacctcttttaaccctaattttctcctaaagccctgtttgggcttccacatacaaatttggtgggggacacaattcagt

SEQ ID NO: 594343 - DNA, 626 bp, Homo sapiens
acaattgcacttttgaataacctctctctcctgtataaaggcaactgaccattctgaaaatctctgatttcattttccaacatatgggcaagtacrttggctgatcttgttaaaacaactttgaaaattgtgcttttattttttattttttgagatggagtctcgctctgttgcccaggctggagtgcagtggcaggatctcagctcactgcaacctccgcctcctgggttcaagctattctcctgcctcagcctttcgagtagctgggactataggcacataccactgcacctggctaatttttgtatttttagtagagacacgttttcgccatgttagttagactggtctcgagctcctgaccttaggtgatccacctgtctcacctcacaaaatgctgggattacaggcatgagtcaccacgcccggcctgaaaattatgcttttaaaagatactaaatcccaggaaattgaaaattaaaaacctctggagagaaacctttatcttttgtgaaattttgtattaataatttttcacttatttatttttatttttatattttagaagttttatggcaagggttgcaggaaggaatttttgatctattgatgatgtacctatctt

SEQ ID NO: 594344 - DNA, 611 bp, Homo sapiens
ccagtatatgaccataagttggtggtggtgtagggggatggtttagtggaattacaattttctcctttgactttaggcatccctcaaaactaaacctatccacacaatcataaggaaacgagcccctccctgcaacaatgacttctgtcgactgggttgtgtatgttccagtctagctttggagaagcgccaacctgctcactgccgccgaccagactgcatgtttggttgtacttgtttgaaaagaaaagttgtacttgttaaaggaggatccaaaactaagcattttcagaggaaggctgctcatcgagatccagtattttatgatactctgggagaggaggcaagggaggaggaagaaggaatcagggaggaggaggaacattgaaagagaaaaagaagagaaaggagctagaatccagtgagtattaattgagagttaaaactgtgccatatcagtttttgaaaaagtatggttattttagaataatacaacctrccttaatcccgatcaattatccaataagagctttgagacttcttattatccttacatgctctttctgactggctatctgagatgcacacaaacacacaccttttttaagttg

SEQ ID NO: 594345 - DNA, 589 bp, Homo sapiens
aatgatttaaacttctgtgagagatttaatgcttgtgtccaagtttctgtgggtattgaatatatgttaagttaaagtatttctgtgttactgtctccttcaggaacctgattctgaacagcagcccttaaaacaactcacctgtgayttggaggatgattctgataaattacaaggtcagaatgaaaactagatcttaacatttgataaaaattatttaggtctagattatagtaataatgggagaaaacccaaaccatcaattcagaatatgtctgcctaccctgtttcaaacttatgccaaaaacagggacaataagtaaaagttttttttccccattatttggtctgttaacactcctgctctcaaaaataaaagaaaattcattcatgttgataaagcatgttgttgcaagagacatttaggttgaggtcagtgagtttttttttttttaacctctttccaaaccccagtaatattggcatcattagcctttggtcctccatcactgccacctctggggaaatctagaaggagaaaggaaggaatattactgtgatttagctggcagaggctactgtcagaatt

SEQ ID NO: 594346 - DNA, 608 bp, Homo sapiens
tttgaagtaactataatagaccgcattcataagtactttttctttctttatgagaagacagctaaatactcctattatttatagatttatttactggtaacaaagtatgcacaaaataacatatgagtgactcacaaatgaatgaaccaaaaattgcaattaccacataattatatgcttttgttgactggagcattttgatcaataatgtttctgttaaatattatacttagccttcattcatttatttaatctttatttgtcaaaaatgtatatgagacactggggatataaaatatagtatttcccrtctgttttctcattgaatttacgttgtggtaaaatattcaaatattaaacaatttgaaaaatatattttgatatttacaactaatttccctggtgatgtagattcattaagtaaataaaaacccaatgctcatatttagactgaaacataaaataatatctaggatatatttattttttaatctcacattcccattgaaccagtcccttatggagctatctgacaaaatagactactcttctgccttcacagcatttggtttttgttgagtgtccttctcttttcctgcaagatgaat

SEQ ID NO: 594347 - DNA, 569 bp, Homo sapiens
gttactgtaattgtttacctgtctcctttttgctagatcatattttcaataagggcagtggccagtggaattagttttctggaattatcaactgyggtatggactaccagaaagtcaatagctcactaaataaaattatagaagttccatgattcatctatgacttagggctcaaattccacagacagtgtctcctgttgaaagagtaatgtctacatgaaaaataaaacttgaattgtcttcacgaaattaagtcaaattctcttcagctaaaaaaaggtgtcattggttattcaatgaaccaactggcttacaatctgcctgtcatctgattatataaaatacactcttgggacaaatgatagatatgttttaagttctttgaaaagtctccacactgctttccacggtggctgaactaatttacattcccatcagcagcgtataagtgatgtttccttttccctgcaatcttgccagcatctgtcgttttctgactttctaatagtagacattctgaccagtgtgagatggtatctcattgtggttttgatttgcatttctctgat

SEQ ID NO: 594348 - DNA, 508 bp, Homo sapiens
gcccatttttaatggctttatttgttttttctcttgccgatttgtttaagttccttatagatgctgggtgttagacctttgtcaggtgactagctcgtgaatatgttcgcctattcttaaggttgtctgtttactctgtcaatagcttcctttgttgtgcaaaagctctttcccactattgggtatacatccaaaggagaataaattgttctaccaaaaaggcacatgcactcgtatgttcattgcagtgctatttacaagagtaaagccatggaatcaaccaatatgcctattaacrgtggagtggataaagaaaatgtggtacatatggcactgcagaatactaggcagccataaaaatgaatcaaatcatgtcctttgcagcaacatggatgtggctggaggccattagcctgagtgaactaacacaggaagagaaaactaaatatcacatgttctcacttacacatgggagctaatcattaaatatacatggatacaaagatgg

SEQ ID NO: 594349 - DNA, 508 bp, Homo sapiens
gcccatttttaatggctttatttgttttttctcttgccgatttgtttaagttccttatagatgctgggtgttagacctttgtcaggtgactagctcgtgaatatgttcgcctattcttaaggttgtctgtttactctgtcaatagcttcctttgttgtgcaaaagctctttcccactattgggtatacatccaaaggagaataaattgttctaccaaaaaggcacatgcactcgtatgttcattgcagtgctatttacaagagtaaagccatggaatcaaccaatatgcctattaacagtggagtggataaagaaaatgtggtacatatggcactgcrgaatactaggcagccataaaaatgaatcaaatcatgtcctttgcagcaacatggatgtggctggaggccattagcctgagtgaactaacacaggaagagaaaactaaatatcacatgttctcacttacacatgggagctaatcattaaatatacatggatacaaagatgg

SEQ ID NO: 594350 - DNA, 368 bp, Homo sapiens
agttcccatgaaagacacatgatattaaaaatcaatcaatcctcaatcaatgaaaagtgagtgaagtaaaaaaaatccgggaactggaattctaagagtggacatttcagtgtaaatgtaaggaagttctaatgagataytgagggacagatctgtgcctattcaaaaggccagactctgtactggcaaagaaaacttcatttagaaccaccaggtttgttttcagggacttccccctttacatatgcgttgagtgaacttgggcccatgccttgcttctatgatcaatggtgagtaaaacatgcctcatgtagttgttgtgtagagttcaatttaattacaaactactgagctccacagatatgcca

SEQ ID NO: 594351 - DNA, 598 bp, Homo sapiens
agaggcaggtgttttcatccccatgactctcatatagtcttagagactttgtcctcctgtcaatgcctcaagggtttcactactgagtsatcagtacatctatacatttcacataagcagagctgaagtgctacctctaattcagcttcttcaccaaagctcagatcctcagaacaatgaccaactttgcattcctttttcaacttcagctgcctcatttgaatgacaccattttaatgacaataaatgtatgggcaccgtgaagtaagaaatattaccctatattaatacccatctgcctgccatctccctaagatcctgaggcgtgtttcaaagtgagcataggagaattcgcacctaattaaaaccacagggggaatggaatgtcagaggcagaatttagtttatttcttagaatgagagcatttctgggactagcctgtccaccaaacttgcctaaggtcttggggtaaagcgtatgtacgagagaagaagtatcaaggaaagagagataggtttgtttcgttttgtttgtttttaataaaaatgccacttaggtcttaaggaatgaaagtgctagaaaataaacttaattgaa

SEQ ID NO: 594352 - DNA, 656 bp, Homo sapiens
caattactaaactattttacaattcaagtaatatctatttatttgtcaatattttcttgtgacatatatatgtatatgtgtctatataattatctatgtaaatattttaaaatatttaataatgtgtataccctatctggtaaattgcatatttagaaatatgtagtattttgttgcaatattgcattttgctcttgactattatctgatgtaaattatttaaacaactcattaatttagtacttccattttgcaagtattatgataggacttttagtataaggataaaacccatggtttttgtcctctaggagtctaaagtttcataaaaataagcaaaaaaaatatgaactttggactgcatatttacatttgaaagatagaacmaaaaaaagtgaaaccatagatacatgccatttgccacttagcagctttatttaatggagtcaaaaagagtatatatatatatacacacacacacacacacacacacacacacgcatatatatatacacatacacacacatatatacacatacacatacacatatataaccaagatgaaaaaaaaaataagtgaagtcatagatatatgctatttgccacttagcaaatttatttaatagaagtcaaaagagtatatacatatatactta

SEQ ID NO: 594353 - DNA, 656 bp, Homo sapiens
caattactaaactattttacaattcaagtaatatctatttatttgtcaatattttcttgtgacatatatatgtatatgtgtctatataattatctatgtaaatattttaaaatatttaataatgtgtataccctatctggtaaattgcatatttagaaatatgtagtattttgttgcaatattgcattttgctcttgactattatctgatgtaaattatttaaacaactcattaatttagtacttccattttgcaagtattatgataggacttttagtataaggataaaacccatggtttttgtcctctaggagtctaaagtttcataaaaataagcaaaaaaaatatgaactttggactgcatatttacatttgaaagatagaacaaaaaaaagtgaarccatagatacatgccatttgccacttagcagctttatttaatggagtcaaaaagagtatatatatatatacacacacacacacacacacacacacacacgcatatatatatacacatacacacacatatatacacatacacatacacatatataaccaagatgaaaaaaaaaataagtgaagtcatagatatatgctatttgccacttagcaaatttatttaatagaagtcaaaagagtatatacatatatactta

SEQ ID NO: 594354 - DNA, 656 bp, Homo sapiens
caattactaaactattttacaattcaagtaatatctatttatttgtcaatattttcttgtgacatatatatgtatatgtgtctatataattatctatgtaaatattttaaaatatttaataatgtgtataccctatctggtaaattgcatatttagaaatatgtagtattttgttgcaatattgcattttgctcttgactattatctgatgtaaattatttaaacaactcattaatttagtacttccattttgcaagtattatgataggacttttagtataaggataaaacccatggtttttgtcctctaggagtctaaagtttcataaaaataagcaaaaaaaatatgaactttggactgcatatttacatttgaaagatagaacaaaaaaaagtgaaaycatagatacatgccatttgccacttagcagctttatttaatggagtcaaaaagagtatatatatatatacacacacacacacacacacacacacacacgcatatatatatacacatacacacacatatatacacatacacatacacatatataaccaagatgaaaaaaaaaataagtgaagtcatagatatatgctatttgccacttagcaaatttatttaatagaagtcaaaagagtatatacatatatactta

SEQ ID NO: 594355 - DNA, 606 bp, Homo sapiens
ttgtggtgagctgagatcatgccattgcattccagcctgggcaacaagagtaaaactccatctcgaatttaaaaaaaaaagattttgggggactgttgagaaggcatgattgtcttttgcaatgtgagaaggagaggagatttgagaggggccacagggtggaataatagtttggatctgtgtccctgctcaaatctcatgttaaattgtaatccccactgttggagatggggccttgtgtgaggtgattgaatcacaggcatccttcatgagtggtttagcaccgtcccattggttttgttcttgttatagtgactgagtgagttattgtgacatctgtttgtttaaaagtatattrtacctccatcctctctcttcctattgttcaagccatgtgaagtgcctcatttccattttccttccaccatgattgtaatttccctgaggcctccctagaggctgatgctgccttgcttcctgtatagcctactgaaccatgagctaactaaatctcttttctttacaaattactcagtctcggatatttctttatagtagtttgagaatagactaatatagacttccaattctatgttgaataggggt

SEQ ID NO: 594356 - DNA, 569 bp, Homo sapiens
tgaattgtttatttctgtaatttccatttaatatttttaaccacagttgacctcaggcaactgaaaccatggaaagcaaaactgcagattaggggtactattatatgtaagaatttctttaaaaaaaaaaaactaaggataaaaatagctttgtgctcaccaaagacaaacctgttattactcaggtagtgtagttttaagtattcttttgaagtaatattaaaaaattacaacgaacaataatgatgatgaaacaaaatgcatataggcaatgcaackcttgttattatataaggaaagtcatatattaaagttaaaacacaactgacaggtgacactgtcccttctcaggtagtcctaacagaaaaagctgataatataaaaaaattcccttaaaatgatatagtgaaaagagcttgggctttggaatcaaataggcatgactcaaatccctgattattttcttagtaattgtggtttcagacatgttactctgtatgcctccagttcatcacctatcaattgggcatcattgtacccaccttgtagagctgtgtgattattaaatg

SEQ ID NO: 594357 - DNA, 564 bp, Homo sapiens
aattttgaaaattaaacctgtgttctattatgttcaacaaagattcataatagagacaatcataaaataatctaaatggctagttatatttaaatacttaactgctttaaagaacatttatgaagtctaatatgattttaaaatacggtaataaaaaacaacaacaaaagaaagcccaggaccaaatggagtcacagctaagttatatgacccatacaaagaagaactaatgtcaatcctcccaaaagtgcyccagaaaatcaaggaggagagacttctttctaacttcttatataaaaaggccagtatcaccttgataccaaagccagacaaggagacacacacaagataaaactacacatcaaaatacctgataaacagggaaacaaacatcctcagcaaaatactagcaaaccaaatcaaaaagtaaatgaaaaagatactactccatgatcaaatgggttttaccagggatgccaggattgttcaacacatgcaacttaacaaatgctatacaccacataaacggaattaaggacaaaaagtatgattatcacaatagat

SEQ ID NO: 594358 - DNA, 564 bp, Homo sapiens
aattttgaaaattaaacctgtgttctattatgttcaacaaagattcataatagagacaatcataaaataatctaaatggctagttatatttaaatacttaactgctttaaagaacatttatgaagtctaatatgattttaaaatacggtaataaaaaacaacaacaaaagaaagcccaggaccaaatggagtcacagctaagttatatgacccatacaaagaagaactaatgtcaatcctcccaaaagtgctccagaaaatcaaggaggagagacttctttctaacttcttatataaaaaggccagtatcaccttgataccaaagccagacaaggagacacacacaagataaaactacacatcaaaatacctgataaacagggaaacaaacatcctcagcaaaatactagcaaaccaaatcaaaaagtaaatsaaaaagatactactccatgatcaaatgggttttaccagggatgccaggattgttcaacacatgcaacttaacaaatgctatacaccacataaacggaattaaggacaaaaagtatgattatcacaatagat

SEQ ID NO: 594359 - DNA, 583 bp, Homo sapiens
agacaggtaagtcaagggttaggttgaaaactacacgataagtggtaggacttaggtgcaatggaaataattgagaatgttgatggtggcagaaaaggctagattactggtatctcytcctaacctgtccttccctgattcctggcagggtcaccaaattagtttttatatcatcacggcctggcatagtaccttgcagacaatacagactcagtaactgttgaattcagtggaaaccaacctaccccaagtattttcatcaatttgtactccagttaaaaaaagcattcagtgcctccccattaccagctacatcaggacacatcctgctgcctggcttttgaagtcattcaccatctggtcctccctggttatccaatctcattgcctgctgtacttcaacccagtgatttctgcctttatctggagcatctccgcaaaggccaccaacttggcccagtgctcatgccttctcatgatctcccttgctgtcttcaaccaaagggaaggggctcagttaaagttcaacttctaagaagcttttccccactccatcaagcctcaccaactgcctacattagtg

SEQ ID NO: 594360 - DNA, 551 bp, Homo sapiens
aagggttaggttgaaaactacacgataagtggtaggacttaggtgcaatggaaataattgagaatgttgatggtggcagaaaaggctagattactggtatctcttcctaacctgtccttccctgattcctggcagggtcaccaaattagtttttatatcatcacggcctggcatagtaccttgcagmcaatacagactcagtaactgttgaattcagtggaaaccaacctaccccaagtattttcatcaatttgtactccagttaaaaaaagcattcagtgcctccccattaccagctacatcaggacacatcctgctgcctggcttttgaagtcattcaccatctggtcctccctggttatccaatctcattgcctgctgtacttcaacccagtgatttctgcctttatctggagcatctccgcaaaggccaccaacttggcccagtgctcatgccttctcatgatctcccttgctgtcttcaaccaaagggaaggggctcagttaaagttcaacttctaagaagcttttccccactccatcaagcctca

SEQ ID NO: 594361 - DNA, 681 bp, Homo sapiens
gagatgtgatgaaatcacaaaccaaggcaatgtagctgcaagcaattcttttttatctcttttcatttatgtagcctgacattgagtaataataataattaaatgcagtttaagcttttaggcacctataccagaaggcctctagacacctcatcaacagcagcccagactgacaaaaaagagagctaattatattgtggttaacttttttcaaagaagaaataaacccatacaccaactatctttatccctgataaaagcagtacattaaatgtcccatccgacagtccatttgcacaggatcattttaaaacctggtgcccttgtcttaaatgtgccaccctgttacaaagtattgagacgtttgctttagcctctattttcacatccccttggctttctgaaaactgatctctagggacctaatttttccatatatattcatagccccgggaccagttttattgatttatttatgtgcacctatagtgttagaagaaagtacttagttgcttttgagtgatgcttttcacttttaaaagtttgagagggttttagacatggaaactccaaaatagcttaatctaaaaacttgagccagcacagactgatgaaaacaaacaaacaaaaaatctctggagagaytgggaaagaaaggatgatttgaacttattgttagca

SEQ ID NO: 594362 - DNA, 551 bp, Homo sapiens
ccaagcgttgtggctcatgcctgtaatcccagcagtttgggaggccgaggtgggtagatcacctgaggcaggagttcgagactagcctggccagcatggtgaaaccccatctctactaaaaatacaaaaaaatttagccaggcatggtggctgtaatcccagctactggggaggctgaggcaagataattgcttgaactcacgaggcagaggttgcagtgagctgagatcatgccactgcactccagcctgagcaacagagcaggactccatctcaaaataaataaataaataaataaataaataaataaataaatagcatggatattgaggggcatatgtaaactttatgcaaacatgaatgtctgcatagaaaagtctrggccaagtgcaatggtacatgcctgtaatctcaacactttgggaggctgaggtgggcagactgcttgagctcaggagtttgagagcagcctggggaacagtggtgaaacgctgtctctataaaaaataaaaaaattagccgggcatggtgttgtgcacctgtagtcccag

SEQ ID NO: 594363 - DNA, 555 bp, Homo sapiens
ggatggtatccagtaggtttyccttttcacatctctcatctggtttggcttggaagtttgtgttagtttgggagcctaagaaattcctgcgcactggacagagatagcaggaggtaatcaatcacacaggctccccccatcacaggacgcccatgttggcacaagaacgctgccccctgccccatgtgagagctaagctgcttggaagccagggtggcaacaaatctttcaggaggctatttggaaatgctttatggcccatagggttacaaggctctagctgaacaaatggaaaaattagtctaccctaaaatatccaaggcaagtaatttcctatcaccttgtttttcaaacgtacttaacatctagaatctgggcttcccaaaatatagataagggtcatcagttaaaatggcaactcagagataaaaatcttccactttaacagtcactcataaaatgacgccatcagccctgctgtttggcctcagagttaggcgtccaaaaacagcaattattaagtattcttgaatttaacagacttcaaccagtcaa

SEQ ID NO: 594364 - DNA, 447 bp, Homo sapiens
gggcctcaggggaccttgtctggctgttcctgcacatgaggtgatgctggtctcctcagcgttcctctcttacaggtcaacactcttatgtcccctgtccattctttgtatgatttggtttcaaactaaaaaatcagtcttatgactattccttacagtgatccctgtcccacacagaatggcaagaccagtagactttatgggacttcacctcttcccttgactttgtgcacctgacaatgactcctccctccagctactgaagcctttccagaaacaaagaaaatgaaaattgagcagaatgggatggggcggaggcagsgggtgggggaagaatcttgtcctcatctaaaacattggtaaaaagaagttaatgagaaggtgggtgggttctgctcactatggttttttccagaccttagtgattaaagagctcttgtttgtgga

SEQ ID NO: 594365 - DNA, 571 bp, Homo sapiens
tcgccaatatcagttacttttattactttctagtaagagccattctgactgttgtgagatggttttggctttkattggcatgtctctaatcatcagtgatgctgagctttttttcatatgaaagccaaggcgtcctaagcaaaagaacaaagctggaggcatcatgctacccaacttcaaaccatactgcagggctacagtaaccaaaacagcatagtactggtacaaaaacagacacataaatcaatggaacagaacagagaacccagaaataagaccacatagcaacaaacatctgatctttgacaaacctgacaaaaacaagcaatggggaaaggctttactattcaataaatggtgctggaataactggctagccacatgcagaagactgaaactggacctcttccttatcccatatacaaaaattaactcaagatatatacaaaaattaactcaagatatattaaagactaaaatgtaaaacacaaaactataaaaaccacagaagacaacctgggcaataccattcatgacacaggcacagacaaagattacatgatgaagatgc

SEQ ID NO: 594366 - DNA, 571 bp, Homo sapiens
tcgccaatatcagttacttttattactttctagtaagagccattctgactgttgtgagatggttttggctttgattggcatgtctctaatcatcagtgatgctgagctttttttcatatgaaagccaaggcgtcctaagcaaaagaacaaagctggaggcatcatgctacccaacttcaaaccatactgcagggctacagtaaccaaaacagcatartactggtacaaaaacagacacataaatcaatggaacagaacagagaacccagaaataagaccacatagcaacaaacatctgatctttgacaaacctgacaaaaacaagcaatggggaaaggctttactattcaataaatggtgctggaataactggctagccacatgcagaagactgaaactggacctcttccttatcccatatacaaaaattaactcaagatatatacaaaaattaactcaagatatattaaagactaaaatgtaaaacacaaaactataaaaaccacagaagacaacctgggcaataccattcatgacacaggcacagacaaagattacatgatgaagatgc

SEQ ID NO: 594367 - DNA, 571 bp, Homo sapiens
tcgccaatatcagttacttttattactttctagtaagagccattctgactgttgtgagatggttttggctttgattggcatgtctctaatcatcagtgatgctgagctttttttcatatgaaagccaaggcgtcctaagcaaaagaacaaagctggaggcatcatgctacccaacttcaaaccatactgcagggctacagtaaccaaaacagcatagtactggtacaaaaacagacacataaatcaatggaacagaacagagaacccagaaataagaccacatagcaacaaacatctgatctttgacaaacctgacaaaaacaagcaatggggaaaggctttactattcaataaatggtgctggaataactggctagccacatgcagaagactgaaactggacctcttccttaycccatatacaaaaattaactcaagatatatacaaaaattaactcaagatatattaaagactaaaatgtaaaacacaaaactataaaaaccacagaagacaacctgggcaataccattcatgacacaggcacagacaaagattacatgatgaagatgc

SEQ ID NO: 594368 - DNA, 491 bp, Homo sapiens
ctaaccttcttttttcatccattttatttctttcttttcttttcttttttttttttttagatagggtctggctctgttgccsaggcgggagtgtagtggtgtggtcatggctcactgcagcctctgcctcccaggatccagtgatccttccaccttagcctcccgagaaggtgggactacaggcatgggccaccacacctgactaatttttgtattttttggagagatagggtttcaccgtgttgcccagcctggtctcaaactcctgggtgcaagtgatctgcccaccctcctaaagtgctggaattacacgcataagctgcagcacccagccccatttttttttcccaaaggaatgacagtattttcatgatatggctgctatgtgagaatagactgggttaggaatggagaccagaagccagggtaccatttccatcatccagttagagtgctttgaacaagggaagtagctgtagagatggtgagaa

SEQ ID NO: 594369 - DNA, 409 bp, Homo sapiens
cctgggcaacatggcaaaaccttatcgctacaaaaaatagaaaaattagccagatgaggtggtgcacaccctgtaatcmcagctacttgggaggctgagatgggaggatcacctgagcccaggaggtcaaggctgcggtgagctgtgatcacactactgcactccagcctgggtgacagagtgagaccctgtctcaaaaagaaataaataaataaagcttaatttcctcagattatatagtaatgcaagttccttaaaattcaaccaacatagaacagtataaagaataaagtgataatcccttcccaataccactacatacacacacacacacatacacacacacacacacacatataaagggttggagactttatctgaaaatattccatagtaatggaaaatttat

SEQ ID NO: 594370 - DNA, 557 bp, Homo sapiens
tcttagcctcccgagtagctgggattacaggtgcccaccaccatgtctggctaatttttatattattcatagagacagggtttcaccatgttggccaggctagtctcaaactcttgacctcaagtgatcctcctgcctgggctttgcaaagtgctgggattacaggcatgagccacagcaccyggactcttcctggtaatatatatattaaatgtgatattaattacagatggatacttctagacatttactattttgctctttatgatattttatgattctgatgaaaatacattatgcattattatgtacatactgatacatgagatgctatatcactcagtaataaattattatggaagaatgtattcaatatattaaaatatactaatttcatttactgtccaaattttaaacataccatctgttaagtggatattgtcatgtattttaacatttttgtaatttagtaaatctatttaaaaggcagtggtcataggaccctgtgacacagttttacatcacatattagttggtacatttgttatgtaaggtaa

SEQ ID NO: 594371 - DNA, 557 bp, Homo sapiens
tcttagcctcccgagtagctgggattacaggtgcccaccaccatgtctggctaatttttatattattcatagagacagggtttcaccatgttggccaggctagtctcaaactcttgacctcaagtgatcctcctgcctgggctttgcaaagtgctgggattacaggcatgagccacagcacccggactcttcctggtaatatatatattaaatgtgatattaattacagatggatacttctagacatttactattttgctctttatgatattttatgattctgatgaaaatacattatgcattattatgtacmtactgatacatgagatgctatatcactcagtaataaattattatggaagaatgtattcaatatattaaaatatactaatttcatttactgtccaaattttaaacataccatctgttaagtggatattgtcatgtattttaacatttttgtaatttagtaaatctatttaaaaggcagtggtcataggaccctgtgacacagttttacatcacatattagttggtacatttgttatgtaaggtaa

SEQ ID NO: 594372 - DNA, 579 bp, Homo sapiens
agctagagatcattgccaaggctgttattttaaaagcaagcctagtaatcagtactttgtttcctgttcttaagcaatstcagaagacaaaccaagtaggggtcatttctattccattgggttaaaagaaacctcagaatggaacacattgtaaggtaatgtttacaggttaaatttattgaaactaagtaactgagatagaaagttgtcaattgaaaaatatctctgtattactgtgtaggtcaaaaaagaccagagtaaacatcaaattaaataagcagcttgatttctgagcaaagtcccttcccttcttgctttctgagcaatgggatgaatccccctttgtgcatccctttctgagactgggcagggcagtctcgtgaattcctccgcatctggctgcctttaggagagagctcctagatagatgcttaccttacttattgctgtgagtaggagtttttttgtttgcttgtttgtctttctctttagtgaggtacactacaaaagaaagacttcttaccatgatagtaaggactgaaccttcctagatagctccctttattaatttgtagaagg

SEQ ID NO: 594373 - DNA, 499 bp, Homo sapiens
ggtagttgttatagtttattttaattccctaaaccatttggtatttattttggtgtaaagagaggttctcaatgattttttyttctattttcatttgcccgctagttttccctaaactattcatcaaatgatctttctcattttgtctagatagacacaagtctctttctggactgtgtatttcattgcattctatggtgtgttctttctctgttaccacattgctttaattaatgcaccttttacattttatttttaatatttgataggacaagcaatgtgttcccttcccttcttacttttccttttcatatctgagattttctacatgaggaagtcagaccgccctccttttctccagaaagcacccaggaagctattttttgacaataaagattacttttttttcttggattttgcacaaaaatctgtaagtgcaaagttactgctataataactagttagcattggaatagaaggagagtttcaggctggagac

SEQ ID NO: 594374 - DNA, 499 bp, Homo sapiens
ggtagttgttatagtttattttaattccctaaaccatttggtatttattttggtgtaaagagaggttctcaatgattttttcttctattttcatttgccckctagttttccctaaactattcatcaaatgatctttctcattttgtctagatagacacaagtctctttctggactgtgtatttcattgcattctatggtgtgttctttctctgttaccacattgctttaattaatgcaccttttacattttatttttaatatttgataggacaagcaatgtgttcccttcccttcttacttttccttttcatatctgagattttctacatgaggaagtcagaccgccctccttttctccagaaagcacccaggaagctattttttgacaataaagattacttttttttcttggattttgcacaaaaatctgtaagtgcaaagttactgctataataactagttagcattggaatagaaggagagtttcaggctggagac

SEQ ID NO: 594375 - DNA, 610 bp, Homo sapiens
actgaaacaacatatctgttgaacaggaattcccaaccacccatagcaccaatcccctagcaactgccattctactctttgtttctatgagtttgactatttcagatacctcacatcagttaaatcatctgctatttgtctcaagtgaccagattatttcattaggataatgcttaggttcaatcatcttgtcatatatggcagaatttccttcttcctaaagaatgaaaatattttattrtatgtacatacaaaattttctcttaaattcatccatgatggatatttgttttttttccataacttggctattgtgaataatgctgcaatcaacatgtgagtgcaggtatctctttgagattcttatttccattcttttggacatacacccggaaatggcattgctggatcacatagtagttctattttttttcttttgaggaacctcaattctgttttccatggtggctgttgcattttaaatttccaccagcagtgtacaacacctgaaatttcatctcgttcttgacaacactttttttgttttagtttttattatatttactataatgcaatatatccttgtggatttgatttccttttctttcat

SEQ ID NO: 594376 - DNA, 610 bp, Homo sapiens
actgaaacaacatatctgttgaacaggaattcccaaccacccatagcaccaatcccctagcaactgccattctactctttgtttctatgagtttgactatttcagatacctcacatcagttaaatcatctgctatttgtctcaagtgaccagattatttcattaggataatgcttaggttcaatcatcttgtcatatatggcagaatttccttcttcctaaagaatgaaaatattttattgtatgtacatacaaaattttctcttaaattcatccatgatggatatttgttttttttccataacttggctattgtgaataatgctgcaatcaacatgtgagtgcaggtatctctttgagattcttatttccattcttttggacatacacccggaaatggcattgctggatcacatagtasttctattttttttcttttgaggaacctcaattctgttttccatggtggctgttgcattttaaatttccaccagcagtgtacaacacctgaaatttcatctcgttcttgacaacactttttttgttttagtttttattatatttactataatgcaatatatccttgtggatttgatttccttttctttcat

SEQ ID NO: 594377 - DNA, 404 bp, Homo sapiens
ttaggatctcagtgtgaatagggatgactgtagaaaagatgatgttatagctgctgggatggaacacacgagttttggagccgtggagggagagccaaaaccctggtgtcaggcttgtgcaagtacattctgatgtttgcacaacaacaaaattgcctaacaacacatttctcaaaatgtatctctaagggacagatgactgaacttattttattatttttctctttttttctatagttctgcacagagtaggaaacctttgagtttgaactcaatgcctgccactaacttacatttcttcaatattaacttgtattcttactactcttgacccagatttaaatctactattacatttagcttttattaacgtatatartatatctcataggttttgggggatg

SEQ ID NO: 594378 - DNA, 480 bp, Homo sapiens
gaattaaatagaagtaagaagaattaaaaagaatgtaacaaatgaagaatgcctttgatgggttcattagtagactagacactgctaagagwaaaaatataaacttgagcatgtgtcaatggaaacctccaaaacagagaaggaaaaaatactaaaaaaatcagaatggaatagtcaagaattgtgggatgactatgaaaaatgtaacatatatataaaatgggaataaagaaaaacgaagaagaaatatttgaagcaataatgtctgaaaaattccaaaaattaatggcaccaattaaaaaaggttataagagcagctcaaaaagaagatgctacattttctgcaagaaattctcttcaaatataaagacacatgcaaaggtctaatgttcagaatctacaaggaacttaaacaaatttacaagaaaaaaacaaccccatcaaaaagtgggcaaaggacaggaacagacacttctcaaa

SEQ ID NO: 594379 - DNA, 606 bp, Homo sapiens
caaaactataaatcacttctgaagttaacatggtggcagtcttaacttgccattcagtggaatcactgttgtgtcttttggtggaaacactcctccctttggaactaaaacctttggaccctcagaacctaatgtcatgagaggaggaagcaaaagttgtgatagtgggttacttcagataatggyaacatcactctcatttccacgtcttaattccttgactcaggaattctagctattggagaggcagcatcatatattggacactgattcagagcatatgctatcttctaaacaatcttaacccagccctacaagggattgtcacctagctgacactgtaacattgcttagtcaaaccagctgctttaggatggcgggtaatatggtaagaccactgaattccatgagcataggcccattgctgcattttgttagttattcagtgagtttcatgatgaaaaacaattctgaggagaataccatgatggtggataaggcatcctggaggtaaacaaatggtattgttgaaagaactattgcatgtattgagacaaataaatatccaaagtagttgtcagattgctgccccttccatgatgaaag

SEQ ID NO: 594380 - DNA, 639 bp, Homo sapiens
gagggatttctttcattgctcaacaagatcaaatgcccatggacagtagggcatgtgacatgtccaccgaaataccttgattattgttccattgttgagtagacttttgacaaattgtgcaccattttcagatggtttatgatctggaaagcagaaaacatgaaagagtttagttaagggctacagtattgctgcaagagttgaaggataggattagaacagaaaaccattagctggaaagtatggacaatgaccagacccaaaaagctgtcaaagatctgatgtagtcagatctgatgtcctcagcagccatgggtgaaaacaatgcccatgcgatatggcctctcttaccgtaagacaaacaggctaacattttgcaggagccacaagtcggccacacagtggtggcttttgcatcagaaacataaaagacctttcctttgtgcccmgtctgtgagggggagatgctggtgcatccattttgatggtggatgtgggaagcaattatagcaaaatggacagcacaagctcgatcacattggctccagctggtgtcattagagaagagtttcatctgcccccactgtgagcacctgtgtgagagacccaggctgctcagtcctcaccatggcgaactgt

SEQ ID NO: 594381 - DNA, 639 bp, Homo sapiens
gagggatttctttcattgctcaacaagatcaaatgcccatggacagtagggcatgtgacatgtccaccgaaataccttgattattgttccattgttgagtagacttttgacaaattgtgcaccattttcagatggtttatgatctggaaagcagaaaacatgaaagagtttagttaagggctacagtattgctgcaagagttgaaggataggattagaacagaaaaccattagctggaaagtatggacaatgaccagacccaaaaagctgtcaaagatctgatgtagtcagatctgatgtcctcagcagccatgggtgaaaacaatgcccatgcgatatggcctctcttaccgtaagacaaacaggctaacattttgcaggagccacaagtcggccacacagtggtggcttttgcatcagaaacataaaagacctttcctttgtgcccagtctgtgagggggagrtgctggtgcatccattttgatggtggatgtgggaagcaattatagcaaaatggacagcacaagctcgatcacattggctccagctggtgtcattagagaagagtttcatctgcccccactgtgagcacctgtgtgagagacccaggctgctcagtcctcaccatggcgaactgt

SEQ ID NO: 594382 - DNA, 564 bp, Homo sapiens
actctgcagataagcatacttattcctatttaaattgcaccacagataagaatcccagtctataaaaacaatctgcccgtaaatgcttaacacacacggctttagaaaagcttcaaagcattttctcctgctgccagagtcaaccataacttttccaatgtgaccctttccaaatctgatagcattttctgtgttgtgccatgccagcaggcacatggacccaatttgcaatcagtggacactctgtctttgaggtttataagcatcactttagtacaagatcttaccagcaacaatgaatatctcatccttccggcaattcctaagcatctacatagaaacattacatttggaagttaagagatactttcccagttaaacatgagcactttaaatccaagaattcaataaagaggctagamcaggctgggcaagatagcaagaccctgtctcaaaaacaaaaaaattagactggcatggtggtggtacatgactgcagtcccagctattcaggaggctgaggttgaaggattgcttgagcccaggaattcgagactgcaatga

SEQ ID NO: 594383 - DNA, 564 bp, Homo sapiens
actctgcagataagcatacttattcctatttaaattgcaccacagataagaatcccagtctataaaaacaatctgcccgtaaatgcttaacacacacggctttagaaaagcttcaaagcattttctcctgctgccagagtcaaccataacttttccaatgtgaccctttccaaatctgatagcattttctgtgttgtgccatgccagcaggcacatggacccaatttgcaatcagtggacactctgtctttgaggtttataagcatcactttagtacaagatcttaccagcaacaatgaatatctcatccttccggcaattcctaagcatctacatagaaacattacatttggaagttaagagatactttcccagttaaacatgagcactttaaatccaagaattcaataaagaggctagaccaggctgggcaagatagcaagaccctgtctcaaaaacaaaaaaattagactggcatggtggtggtacatgactgcagtcccmgctattcaggaggctgaggttgaaggattgcttgagcccaggaattcgagactgcaatga

SEQ ID NO: 594384 - DNA, 621 bp, Homo sapiens
gtctcatctcccttcctgggggctgaacagtctctgggatgccagatctatgcggtccctgttctcatgattttttctctctcagactcagtgacagaagctgaacacgcagacccccagatctgggaactgggattagttgtggtggcaggaacgatgtggaggcttgagggctgactcagcagccccagtgcagggttggggctgggtccccmatacctgccttgttgccacttctggttttatttgatgctgcaagagaaggaaagtgagaagaaccttgccaagccacccacttcctcctgggctgtgttctgcttcacttcctccttggctttcattctgatttcatgccgggggtatgtagtacacaatgtctctccttaggtttgcacccggagtgcaatgaggatggcctgaattggccatccctttagtttggtttcatgggagcctgggtttgaacagagttctctctgtgtgtgcatgtgtgcatgtgtgagtgtgtgtgtgtgagtgtgtgtgtgtgtgtgtgtgtgtgtgtatatgagtgtcaaatgtgtgtagagacctacattctaaggccaggctggctgatacgatagccacaaggtacacgtg

SEQ ID NO: 594385 - DNA, 500 bp, Homo sapiens
atgtaaaagcaaaacaaagcctgtcttgagcattgtctttgagctgcctctccttcacacatgacagtgtcttgagtcattggaagctgatgcttccacttcctcacctccrtctcaagtcacttcaatttggtttcctttcctcctatccactaggactcaccaaagtcactggtgacttccatcatgccaaattcagcagtcatttctctagtgttattttcatccctcaacagcatttggtacctttggctttctttcttttaaaacttttcttcttttcagcttccctgctatcatactctacttgttttctttttagctctcaagcctctactcctcagtcccctttactaactctggtctgcctgtaaatttggagtctcagagtttgttcctgggcccgctgtcttctgtagcagcagaattttaggacatctcatctggacctgtggttcaattgatatgccaatgactctcaaatcaatacctccagccct

SEQ ID NO: 594386 - DNA, 628 bp, Homo sapiens
tctactgcttcacaacagttcacaagccacaacacttccagcattaattctgtaagcaaatctcaggtctttttcaacattaagtgccatatttattatatttattaaccatttagcatgtgtaaaactgtgctactactttttactgggttcttatattttaaaaaatatgtcgctgactgatgtggtttggctgtgccctcacctaaatctcatcttgaattgtagttcctataatcctcacatgtcatgggagggacgtggtgggaggtaattgaatcatgggggcggttacccccctgctgctgttctcatgatagtgactgagttctcatgagatctgacagttttataagggacttttgccattttgcttggtacttctccttgctgccaccatgtatgtgaagaaggacatatttgctttcccttctgccatgattgtaagtttcctgaggtctccccagccatgcagaactgtgagtcaactgaasctttttcctttataaattacccagtcttgggtatgtctttattagcagcatgagaacggactaataaaccagcaaaattcttgagtgtcatacccataatcccatttcccctacaaaccctatggtttttactg

SEQ ID NO: 594387 - DNA, 628 bp, Homo sapiens
tctactgcttcacaacagttcacaagccacaacacttccagcattaattctgtaagcaaatctcaggtctttttcaacattaagtgccatatttattatatttattaaccatttagcatgtgtaaaactgtgctactactttttactgggttcttatattttaaaaaatatgtcgctgactgatgtggtttggctgtgccctcacctaaatctcatcttgaattgtagttcctataatcctcacatgtcatgggagggacgtggtgggaggtaattgaatcatgggggcggttacccccctgctgctgttctcatgatagtgactgagttctcatgagatctgacagttttataagggacttttgccattttgcttggtacttctccttgctgccaccatgtatgtgaagaaggacatatttgctttcccttctgccatgattgtaagtttcctgaggtctccccagccatgcagaactgtgagtcaactgaacctttttcctttatarattacccagtcttgggtatgtctttattagcagcatgagaacggactaataaaccagcaaaattcttgagtgtcatacccataatcccatttcccctacaaaccctatggtttttactg

SEQ ID NO: 594388 - DNA, 593 bp, Homo sapiens
tttccctgtggtagtaatttgcatttccttatggactaaagatgttgagcatcttttcatgagcctatattctgtaacatctttggtaaagtctctattcaaacaacttgccaattttttaattggattgttggtttggtgtaccagactgtgcatttcttaaaacggaattttttaaatgggcttgattgaatgattgccatggagtacaggaagtccctgtgcaactctcaagcagttcctctcattattaacatctaaygtggctgtgctgtacttgtcaaaactaagaatccgacatcattgacacagcactcctaagtacacttcagacctttggtcagattccaccggctttttatgaactttttttttttttctgtctcaggatcccattgagggatcacactgcacttacttgtcacccctcccccatgtcctgtctgtggccctttctcagacttcccttgctttttcatgacagtcttgagtactgttcaagtagtctgtggaatatttcccatgccacatttgtctcctgtttgtcttatcattagagtggggttagggaatgttgggaacaaataccacag

SEQ ID NO: 594389 - DNA, 171 bp, Homo sapiens
ctggctaagttagatcttcaagttttactacaaagctctagcaggaagaacacagaggagaccatgtaaggatagttcccatcaggaaaagcaaagcaaatggaaatattaggggaagasggggagtggggagaggggcagggagagagaagagaggagaaagagagaggg

SEQ ID NO: 594390 - DNA, 641 bp, Homo sapiens
atcaatgtctaatatcctgtaagctaattatamtattagtaataagttaggaagagaccattttttccccaagatttgaagcagattagtcgtgcatgtaaaagtgaaaatgcaacaatgcattacagcagttttatctccttctttcttttctctttccagttccttcctgacctctcaagttacttgttttgcttatttatatgcacaagagattcttttgtggaaaataatattcacaaatgacattaacattctgaattaatgaggcaggaatgttagtctttttggattaactgcattgttatttccataatatagggcaagagtctgaaactaaaatgtttacaggccaggccactaaagttaatgactgaaataggctgcatgatagagttgggagtggtggggactatggcaaactggacattttacaattttaaaaactgtattcaactgaatgaaacaagtctgtgagctgaatctattctgtgggccacctgtttgcttgctgtgatagaaagtaaagcacatcttgctaacatgaattaactactgagtattcatgtgccctatgttccaggagccatacttggagttcttcatatgtgacctgattacaactcagaatggtgctgtga

SEQ ID NO: 594391 - DNA, 570 bp, Homo sapiens
caaatccatagatagagaaagtagattagtggttgcctaaggctgggagtgyggaaaaaaagcgagaatgactgctaatagtatggggtttctttgaggatgataataatgttctataattgtagtgatagttgctcaactttgtaaatatactaaaaaccactgcattttttaaaaaagtaactttataatatccactagaaatggaataattaaataaatatgaaaattttagacagaactatagagaaaagaaaacataatttttttttttttttttttgagatggagtcttgctctgtcgccgaggctggagtgcagtggcacaattttggctcactgcaacctctgcctcccaggttcaagttattctcctgccttagcctcccaggtagctgagattacaggtgcccaccaccacacccagctaattttttgcatttttagtagaaacagggtttcgccatgttggccaggctggtctcaaactcctgatctcaagtgatcctccctccttggcttcaaaaagtgctggaattacagacataagccaccacacccagcccagaa

SEQ ID NO: 594392 - DNA, 570 bp, Homo sapiens
caaatccatagatagagaaagtagattagtggttgcctaaggctgggagtgcggaaaaaaagcgagaatgactgctaatagtatggggtttctttgaggatgataataatgttctataattgtagtgatagttgctcaactttgtaaatatactaaaaaccactgcattttttaaaaaagtaactttataatatccactagaaatggaataattaaataaatatgaaaattttagacagaactatagagaaaagaaaacataatttttttttttttttttttgagatggagtcttgctctgtcgccsaggctggagtgcagtggcacaattttggctcactgcaacctctgcctcccaggttcaagttattctcctgccttagcctcccaggtagctgagattacaggtgcccaccaccacacccagctaattttttgcatttttagtagaaacagggtttcgccatgttggccaggctggtctcaaactcctgatctcaagtgatcctccctccttggcttcaaaaagtgctggaattacagacataagccaccacacccagcccagaa

SEQ ID NO: 594393 - DNA, 570 bp, Homo sapiens
caaatccatagatagagaaagtagattagtggttgcctaaggctgggagtgcggaaaaaaagcgagaatgactgctaatagtatggggtttctttgaggatgataataatgttctataattgtagtgatagttgctcaactttgtaaatatactaaaaaccactgcattttttaaaaaagtaactttataatatccactagaaatggaataattaaataaatatgaaaattttagacagaactatagagaaaagaaaacataatttttttttttttttttttgagatggagtcttgctctgtcgccgaggctggagtgcagtggcacaattttggctcactgcaacctctgcctcccaggttcaagttattctcctgccttagcctcccaggtagctgagattacaggtgcccaccaccacacccagctaattttttgcatttttagtagaaacagggtttcgccatgttggccaggctggtctcaaactcctgatctcargtgatcctccctccttggcttcaaaaagtgctggaattacagacataagccaccacacccagcccagaa

SEQ ID NO: 594394 - DNA, 550 bp, Homo sapiens
cttcaatctctgatatcctttcttctgcttgatcaattcacccactgatacttgtgtatgcttcactaagttctcatttcgtgtttttcagctccatcargtcatttatgttcttgtctaaactggttattctagttagcaattcctctaacctttcgtcaacgtccttagcttacttgcattgggttagaaatgctcctttagctcagagaagtttgttattacccaccttctgaagcctacttctgtcaattcatcaaactcattctccatccagttttgttcccttgctgctaaagagttgtggtcctttggaggagaagagacattctggttttgggaattttcagctactttgcaccggttctttttcatcttcatggatttatctacctttggtctttgatgttggtgactttcggatggagtttttgtgtagacgtcctttttgttgatgttgatgctattcctttctatttgttagttttccttctaacagtcaggcccctctgctacaggtctgctgtagtttgctggaggtccactccag

SEQ ID NO: 594395 - DNA, 550 bp, Homo sapiens
cttcaatctctgatatcctttcttctgcttgatcaattcacccactgatacttgtgtatgcttcactaagttctcatttcgtgtttttcagctccatcaagtcatttatgttcttgtctaaactggttattctagttagcaattcctctaacctttcgtcaacgtccttagcttacttgcattgggttagaaatgctcctttagctcagagaagtttgttattacccaccttctgaagcctacttctgtcaattcatcaaactcattctccatccagttttgttcccttgctgctraagagttgtggtcctttggaggagaagagacattctggttttgggaattttcagctactttgcaccggttctttttcatcttcatggatttatctacctttggtctttgatgttggtgactttcggatggagtttttgtgtagacgtcctttttgttgatgttgatgctattcctttctatttgttagttttccttctaacagtcaggcccctctgctacaggtctgctgtagtttgctggaggtccactccag

SEQ ID NO: 594396 - DNA, 550 bp, Homo sapiens
cttcaatctctgatatcctttcttctgcttgatcaattcacccactgatacttgtgtatgcttcactaagttctcatttcgtgtttttcagctccatcaagtcatttatgttcttgtctaaactggttattctagttagcaattcctctaacctttcgtcaacgtccttagcttacttgcattgggttagaaatgctcctttagctcagagaagtttgttattacccaccttctgaagcctacttctgtcaattcatcaaactcattctccatccagttttgttcccttgctgctaaagagttgtggtcctttggaggagaagagacattctggttttgggaattttcagctaytttgcaccggttctttttcatcttcatggatttatctacctttggtctttgatgttggtgactttcggatggagtttttgtgtagacgtcctttttgttgatgttgatgctattcctttctatttgttagttttccttctaacagtcaggcccctctgctacaggtctgctgtagtttgctggaggtccactccag

SEQ ID NO: 594397 - DNA, 619 bp, Homo sapiens
gcgtgcctgtaatcccagctacgcgggaggctgaggcgggagaatcacttgaacccaggaggcggaggttgccgtgagccgagatcgcgccactgcactccagcctgggcaacaagagcaaaattccatctcaaaaaaaaaaaaaaaaaaaaaaaaaaaaaaaaaaactaggacaggtgaacaaatacataattttttaaaaaataaaaacaatttgcttaaaattatatttcatatttaattaacttcattttccttgttttttccaaaaccaatttattcagtaatgtattatttcttattttgtcctctttcaacagttcccctcagttttatattcttgctgaaataacagaagatgccaatcattttgatgatcacttcagcaattaatcttcacactagaagcagaaaaaaattagtcttgtgcagtctggatttatytactcaaaccttcaataaggaataggcatccacatcttcacacgttacttgtggggaaacttcccatcattatggaaacattgatcctaaatgagccttgttctaagtcatactagaaatctagaaattctctggggcaatggaggagattagccaaagccaggtaacactggga

SEQ ID NO: 594398 - DNA, 575 bp, Homo sapiens
gggtctcactatgttgaccaggccaccagtcttgaactcctggcctcaagggatcctcccaccttggcctcccaaagcactgggattccaggcacaagccactgtgcctagccaggtgatttttattggccttaatttttttttttgaattgtggtaacatatgcaaaacatagaatgtaccatgtattcgtccattctcctgctgctatgaagaaatacccaagacggggtaatttataaagaaaagaggtttaattgactcatagttctgcatggctggggaggcctcaggcaacttacaatcatggagaaaagtcatcttaatttgcagccatctcctacctcttcacagggcagaggagagagaatgaatgcaagcagggaaaatgtcagacscttataaaaccatcagatctcttgagactcactcattatcacaagaacagcatgggggaaaccgcctccatgattcaattacttccacctggtcccaccctttacacgtggggattatggagattaccattcaaggtgagatgtgggtgggggcacagagccaaaccatatcatacca

SEQ ID NO: 594399 - DNA, 592 bp, Homo sapiens
aagcttgtcagatttgagttgctaatggcagcggtgggaatgaggcagctcaggtggctgtgcagagctccacactggggcaggtatggggaaaggtcccatgtccatctgtgtgctggggtagctyagggctgctagggcctgtcctgtttctgcggattgggtagctgggcacgtgtggccatctggagacccctattggcttggggtcagaccccagggccccatcttggctgctgtgactccagccaggtgagagtattagttactagtgtccctgggtgcctactatacacggccggcatttggtgtcagtgccaggagatcccagcggtccagccctgctgccagcctcactttagagccacggggaggctccaggaggggagacgctcaggtgctgaggatgaatggtgaggcggagccccaaacctagggcctctcgggctggagccctgtgccctacaccaaccaccaatcctacagggacaagaaaagtccagtgagaatcaaacaggttgggtcacgctcccaggagacaagaccatggcaggctgagggggttaaggggtattcctcaccacaaggcgca

SEQ ID NO: 594400 - DNA, 592 bp, Homo sapiens
aagcttgtcagatttgagttgctaatggcagcggtgggaatgaggcagctcaggtggctgtgcagagctccacactggggcaggtatggggaaaggtcccatgtccatctgtgtgctggggtagctcagggctgctagggcctgtcctgtttctgcggaytgggtagctgggcacgtgtggccatctggagacccctattggcttggggtcagaccccagggccccatcttggctgctgtgactccagccaggtgagagtattagttactagtgtccctgggtgcctactatacacggccggcatttggtgtcagtgccaggagatcccagcggtccagccctgctgccagcctcactttagagccacggggaggctccaggaggggagacgctcaggtgctgaggatgaatggtgaggcggagccccaaacctagggcctctcgggctggagccctgtgccctacaccaaccaccaatcctacagggacaagaaaagtccagtgagaatcaaacaggttgggtcacgctcccaggagacaagaccatggcaggctgagggggttaaggggtattcctcaccacaaggcgca

SEQ ID NO: 594401 - DNA, 595 bp, Homo sapiens
agttgctaatggcagcggtgggaatgaggcagctcaggtggctgtgcagagctccacactggggcaggtatggggaaaggtcccatgtccatctgtgtgctggggtagctcagggctgctagggcctgtcctgtttctgcggattgggtagctgggcacgtgtggccatctggagacccctattggcttggggtcagaccccagggccccatcttggctgctgtgactccagccaggtgagagtattagttactagtgtccctgggtgcctactatacacggccggcatttggtgtcagtgccaggagatcccagcggtccagccctgctgccagcctcactttagagccacggggaggctccaggaggggagacgctcaggtgctgaggatgaatggtgaggcggagccccaaacctagggcctctcgggctggagccctgtgccctacmccaaccaccaatcctacagggacaagaaaagtccagtgagaatcaaacaggttgggtcacgctcccaggagacaagaccatggcaggctgagggggttaaggggtattcctcaccacaaggcgcagtggtgccccagggaagct

SEQ ID NO: 594402 - DNA, 642 bp, Homo sapiens
gggttcaggggtatagtcttcctatacaattattgccacgtttcaactgtatagcaaatcaaatttctgttataaagataatttctggatgggtgcagtgcctcacatctgtaatcccaacactttgggaggctaagatgggaggatcacttgaggccaggagttagaggccagcctgggcaacatagtgagatcccatctctaaaaaaaatttaaaagttagccaggtgtgatggggcactcctggaggctgaggtgggaggaccgcttaagcccagaaatttgaggctgccgggaacttcgatcatcccactgcactccagcctgggcagcagagtgaaaccctrtctctaaaaataataatttccttaaactactactatttctttatatgttgatttttttatagttcattaacctgtttatcataaatacaattttttcttgtttttctttaaaagatcttgttttatatttattcacttttttccccttttttctttcaataccagaaacaaagtacggaagtgtacagcacaaatgcttagaaactgacctaatgccaatcatccatttgcaggcgttgcagagggactgtgtgaggtgaaacctccctgccctgtgaacgggatgcaggtccac

SEQ ID NO: 594403 - DNA, 570 bp, Homo sapiens
taaaaaaatagccaggtgtggtggcatgcacctgtagtcccagctagttgggaggctgaggtgagaggatcgcttgagcccaggagtttgaggttacagtgagctataattgtaccactgcattccagcctggatgacagaatgagaccctrtctcacacacacacacacacacacacacacacacacacacacaggctgggcaagctcactcctgtaatcccaaccctttgggaggtcaaggtgagcagatcacttgagcccaggactatttatttatttatttaagcccaggggtttgagatcagcctgggcaacatagcaagaccccatctctacaaaaaattaaaaagtagccacgtgtagtggcacatgccttagccatagctactcaggaggctgaggtgggaggatcacttgagcctgggaagtcaaggctgcagtgagctatgattgtgccactgcactccagcctgggcgacagagtaagaccctgtcttccaaaaaataatttaaaaacagaagagtaaggggcacctggagggagagttgggggctcagagttggcaag

SEQ ID NO: 594404 - DNA, 434 bp, Homo sapiens
atttatttgcagaataaacatggactcaaacactgaaacatggagtttgtgaaggatgtgggtggcagaggtcacgagatgagcacccccccaccttgttttttttaaaatttggtttaagaaattgatactgaaaaaactcaacagaacccaggcccatgaagtctcacatcctactcaagcaccctcagtcccctgccctgcatccagctggtccatttctgagaccagatgcccccacccctccccacttccaacttccttcaaaccccttccccagctgcaactctaaactcctcattttctctgttggggctgatcaccagccccagccttagagggctrgagactataccttctaaggaaaccacactccctcctaaataaatacccccaggcccccctcccattaccaaatgaaaaaataaatattg

SEQ ID NO: 594405 - DNA, 591 bp, Homo sapiens
cttaatctttggatgcctatgatatcctactttattcctattgtttgtttaattatttattttcccatgtctctctctttctctacatgtttgattgggagtcttctggtcaagcgtgttgcatttactgtattagtctgttctcacactgttaataacaacatacccaagactaggtgatttataaaggaaagagattcaattgactcacagttccacatgggtggggaggcctcacaatcatggcggaaggtgaatgaggagcaaagtcacatcttacatggcagtagtcaagacaatgtgtgcaggaaaacttcccattataaaatcatcagatctcatgagactattcactrtcacaagaacagcatgggaaagacctgaccctgtgattcaattacctctcaccctgtccctcctgccaagtgtggggattacgggagctacaattcaagatgagatttgggtgggcacacaaccaaaccatatcattaacccaccatgattgactaaaatatattaactgggcagaggttggccttcagcacctcttaaatcctctttgctactcacaaattcagcttccacatt

SEQ ID NO: 594406 - DNA, 542 bp, Homo sapiens
gctaatacatgatcaacatctactaaaaattaacaacaagcaaggtactttctctgtggagctgaagtctacgagtatgaaaagagcctttaaacatagaagtgcatcttgcatttgtttttccattagccttgattgctgtttttttgcttttattcagcaagatgtagaagcttccaagtaaattttaatctagtccatttctgaagccaaactaacattttctatagacttactattctgaatgaagggaaaatgagtttatctaaagctcttatctttaaatattcrttgtagaatcaaacttatgaaaactcttcaaaattaataattatgattgcattaataaaaggagagttaaaaaagtttgtaaaattttgagtttagaaagcatttgcatgtttaacattgagaagtaaagagcaattgatggtagctcatttaacgatgccagtagtacacgatctattataactggttttcatgaaaatcaaatgattgaacgtatttaaaatgatgtgtctttttaaattatatatgct

SEQ ID NO: 594407 - DNA, 542 bp, Homo sapiens
gctaatacatgatcaacatctactaaaaattaacaacaagcaaggtactttctctgtggagctgaagtctacgagtatgaaaagagcctttaaacatagaagtgcatcttgcatttgtttttccattagccttgattgctgtttttttgcttttattcagcaagatgtagaagcttccaagtaaattttaatctagtccatttctgaagccaaactaacattttctatagacttactattctgaatgaagggaaaatgagtttatctaaagctcttatctttaaatattcattgtagaatcaaacttatgaaaactcttcaaaattaataattrtgattgcattaataaaaggagagttaaaaaagtttgtaaaattttgagtttagaaagcatttgcatgtttaacattgagaagtaaagagcaattgatggtagctcatttaacgatgccagtagtacacgatctattataactggttttcatgaaaatcaaatgattgaacgtatttaaaatgatgtgtctttttaaattatatatgct

SEQ ID NO: 594408 - DNA, 542 bp, Homo sapiens
gctaatacatgatcaacatctactaaaaattaacaacaagcaaggtactttctctgtggagctgaagtctacgagtatgaaaagagcctttaaacatagaagtgcatcttgcatttgtttttccattagccttgattgctgtttttttgcttttattcagcaagatgtagaagcttccaagtaaattttaatctagtccatttctgaagccaaactaacattttctatagacttactattctgaatgaagggaaaatgagtttatctaaagctcttatctttaaatattcattgtagaatcaaacttatgaaaactcttcaaaattaataattatgattgcattaataaaaggagagttaaaaaagtttgtaaaattttgagtttagaaagcatttgcatgtttaacattgagaagtaaagagcaattgatggtagctcatttaaygatgccagtagtacacgatctattataactggttttcatgaaaatcaaatgattgaacgtatttaaaatgatgtgtctttttaaattatatatgct

SEQ ID NO: 594409 - DNA, 385 bp, Homo sapiens
ctagagtccaagatgcgcccatttctactgaatttcatgacatagaactatgctcttctgatttagagattatatctgattctagctttattactcatggctatagagagaaattagctggagagctatttgaagtcattcttctaaccaaagctctgatttttcaatttctgaccaaacttgtatgaatcagggagctccatcaccactttgatttcttataaagtgttacatttgactgagtcatggagatgtcawtgtcagacctggaggttggttagtggtgggaggccatattctttttgcctaacaatgttttagaggcatggtgtgaaaatgtttatatcatttaaagtcattttttctaaagaggccatttgagcct

SEQ ID NO: 594410 - DNA, 615 bp, Homo sapiens
ttagtttttttttttaacacaagtgacaaatttgattctgacaactttcacaatttccaacwattctagttgtagttctttttgaattcagttgaagtttaaaagtcatttaatctccaatattgacaggattcaataagtggccaatataacatggattgacatcaaaatgtcagcattagaaatttaatccaaaggggatttttttttttttcagagaggatgaaatgagataacctgagggggtgagaataaaaacaccagaacctttaattgaaaaaacaaacctatgttggcttcaggatttctagtgctttattggactttcagggaggaaacggaccttatgaaattggaagctggatacatttccaatgttccctccagggccttaatagttggcattcctctagaagctttatgaaataaattcccttatgggaattgtacctgttcaattttatagctttaatttagtcaaaatcttcgtatgttttccaggagtttaatcagtaaaattgctttaaaaaaatgaagacaattttgtttagtctaaaatactataatctaagctacaaataatagttgacattcacttagacttacatgttgcaa

SEQ ID NO: 594411 - DNA, 615 bp, Homo sapiens
ttagtttttttttttaacacaagtgacaaatttgattctgacaactttcacaatttccaactattctagttrtagttctttttgaattcagttgaagtttaaaagtcatttaatctccaatattgacaggattcaataagtggccaatataacatggattgacatcaaaatgtcagcattagaaatttaatccaaaggggatttttttttttttcagagaggatgaaatgagataacctgagggggtgagaataaaaacaccagaacctttaattgaaaaaacaaacctatgttggcttcaggatttctagtgctttattggactttcagggaggaaacggaccttatgaaattggaagctggatacatttccaatgttccctccagggccttaatagttggcattcctctagaagctttatgaaataaattcccttatgggaattgtacctgttcaattttatagctttaatttagtcaaaatcttcgtatgttttccaggagtttaatcagtaaaattgctttaaaaaaatgaagacaattttgtttagtctaaaatactataatctaagctacaaataatagttgacattcacttagacttacatgttgcaa

SEQ ID NO: 594412 - DNA, 615 bp, Homo sapiens
ttagtttttttttttaacacaagtgacaaatttgattctgacaactttcacaatttccaactattctagttgtagttctttttgaattcagttgaagtttaaaagtcatttaatctccaatawtgacaggattcaataagtggccaatataacatggattgacatcaaaatgtcagcattagaaatttaatccaaaggggatttttttttttttcagagaggatgaaatgagataacctgagggggtgagaataaaaacaccagaacctttaattgaaaaaacaaacctatgttggcttcaggatttctagtgctttattggactttcagggaggaaacggaccttatgaaattggaagctggatacatttccaatgttccctccagggccttaatagttggcattcctctagaagctttatgaaataaattcccttatgggaattgtacctgttcaattttatagctttaatttagtcaaaatcttcgtatgttttccaggagtttaatcagtaaaattgctttaaaaaaatgaagacaattttgtttagtctaaaatactataatctaagctacaaataatagttgacattcacttagacttacatgttgcaa

SEQ ID NO: 594413 - DNA, 575 bp, Homo sapiens
tctgcctttaactgtggccataagagaaattttgtagtaagatagacatgtttgcttttcacatgtcaaacttraaagcttaggaaaaatccctaataataattttttggcccatatgttagaattatttttattcattatttttaaattgacaagctgaaattatatgtatggtatacattgatgtttgaaatatacatacattatagaatggctagatcaagctaattaacatatgtattgcatcacatacttatttttttgcagcgagaatacttaaaatctattttcttggtaattttcaagtatagaaaaccttgttgttaactacagtcatcatgttgtacaattgacctcttgaatttattctgtctaaatatatactttttttggagatggggtcttgctctgttgcccatgctggagtgcagtggcgcgatctcggctcactgctacttccgcctcctggattcaagtaattccctgtctcagcctcccaagtagctgggattacaggtgcccgtcaccacacccagctaatttttgtatttttagtagagacagggtttcactat

SEQ ID NO: 594414 - DNA, 575 bp, Homo sapiens
tctgcctttaactgtggccataagagaaattttgtagtaagatagacatgtttgcttttcacatgtcaaacttaaaagcttaggaaaaatccctaataataattttttggcccatatgttagaattatttttattcattatttttaaattgacaagctgaaattatatgtatggtatacattgatgtttgaaatatacatacattatagaatggctagatcaagctaattaacatatgtattgcatcacatacttatttttttgcagcgagaatacttaaaatctattttcttggtaattttcaagtataraaaaccttgttgttaactacagtcatcatgttgtacaattgacctcttgaatttattctgtctaaatatatactttttttggagatggggtcttgctctgttgcccatgctggagtgcagtggcgcgatctcggctcactgctacttccgcctcctggattcaagtaattccctgtctcagcctcccaagtagctgggattacaggtgcccgtcaccacacccagctaatttttgtatttttagtagagacagggtttcactat

SEQ ID NO: 594415 - DNA, 603 bp, Homo sapiens
tgccagttttcaaagggaatgcttccagttttttgcccattcagtatgatatyggctgtgggtttgtcataaatagctcttattattttgagatacatcccatcaatacctaatttattgagagtttttagcatgaagggctgttgaattttgtcaaaggccttttctgcatctgttgagataatcatgtgttttttgtctttggttctgtttatatgctggattatgtttattgatttgcgtatgttgaaccagccttgcatcccagggatgaagcccacttgataagaagagtctgggaggtagagaggctccagaaacagcagcttcattcactgaggcgcagggctggccccatgggtgctttcaggggctctgggagtttagccagaccaacaagcccactgccagtgcagcagggcccatgggacagcctagcacttctctggctggctcagggaactgcatccaaggtatatatctaggagaggacttgctggatcatatggtatctcgctggttaatctttcaaaaaaaaaaaaaacagtagactgtttttcaaagtgattgcaccattttatattcccatcaacaatgtatgag

SEQ ID NO: 594416 - DNA, 603 bp, Homo sapiens
tgccagttttcaaagggaatgcttccagttttttgcccattcagtatgatattggctgtgggtttgtcataaatagctcttattattttgagatacatcccatcaatacctaatttattgagagtttttagcatgaagggctgttgaattttgtcaaaggccttttctgcatctgttgagataatcatgtgttttttgtctttggttctgtttatatgctggattatgtttattgatttgcgtatgttgaaycagccttgcatcccagggatgaagcccacttgataagaagagtctgggaggtagagaggctccagaaacagcagcttcattcactgaggcgcagggctggccccatgggtgctttcaggggctctgggagtttagccagaccaacaagcccactgccagtgcagcagggcccatgggacagcctagcacttctctggctggctcagggaactgcatccaaggtatatatctaggagaggacttgctggatcatatggtatctcgctggttaatctttcaaaaaaaaaaaaaacagtagactgtttttcaaagtgattgcaccattttatattcccatcaacaatgtatgag

SEQ ID NO: 594417 - DNA, 454 bp, Homo sapiens
tgaaacatttcagatacaaggctcaagttcagagaggttaagtaactggatttaagttcacagctaataagtacatgggtctcattgtcctatgagggagactcagggtagactctgtaagcaccaatccaggtggaatgcaacaagcattgattttcctaagtgctatatggccaatggcctttagtgcttgctgaggtttcacattgagacaatcagaaatacattccccacaggacctcttctgtacagtaaacatgttttctgtatttatctgctctcttcagtatttttaaaccrtaccctgatttctatatctgcctgtcccataaatttctgtctttaatgactttcaaactgtgggacatttgaatgtgataaatcagtggatatgaatgtaaatgtatatgtatttatgtgtatacacacacatagtgtgtgtgtgtgtgtgtgt

SEQ ID NO: 594418 - DNA, 455 bp, Homo sapiens
aaaaaaaaaaaaaaaaaaaagaatttagcaagaatataatcatatacacatgtaaaagttagatgggtgtgcatttttcaaaagtactgctcaagagctttttagttttagaaaaaaaccttcaccttatgtaaataaaaataagtatacaataataataaactttagcatggatatacaaaataaaagtataataacaactgatgcatcctgaattgcagagaaaagagtaatttcaggaagatcatttcttctgatcactaaagtttagttaaaagtaaaaaaacatagacstgccgggtgtggtggctcacacctataatcccagcactttgggaggctgaggcaagaggatcgcttgagcccaggagtttgagaccagcctgtgcaatatggtgaaactgcgtctctacaaaaaatacaaaaaaaaaaaaaaattagccagctgtggtggt

SEQ ID NO: 594419 - DNA, 253 bp, Homo sapiens
atcttcggaaaaaataaaaatagaaaaagaagaaatagggcattgtgttcaggagtacgggttctataaccaaagtgcttaggttcaaatctcagcaaagtcacttgctcattgtggccttggcaaagctatataagcactccaggcctcagtgccatcattccaraaaagtaaagacatgtcttagaacagttatgcagattatataaagcaatccatataaagtatttaatgtaataaataatatataggt

SEQ ID NO: 594420 - DNA, 605 bp, Homo sapiens
tcactttgaggagctaaggtagatgaaataaaatttaaaatacaagaaacaataaaaacaagaaaactaactaaagattaaaaatgtaaaaatagattttataaataaaactaaaagttggctttagggaaaggaacaataaaataacaaggctttggtatgtctgatcaatataggtgtattagcttgctaggactgccataacagaatatcacagactcgggggcttaaacaatagaaatttgttttctcacagttctggagtctggaagttcaagatcaatgtgttagtagttttggtttctcctgaggctcctattcttgctttgcagatggctgtcttctcactgcgtcctcacatggccttttctctgtgtgcccatattcctggkgcctcctcctgtatatactaatcttctgttttcacaaggattccagtcagattggattatggtccacctgaatggcctcattgatatggtttggctctgtgtcccctcccaaatctcatgtcaaattgtaatccccatgtgttggaggaggggcctgttgagaggtgattgaatcattggggggacttctgccttgctcttctcatgatagtg

SEQ ID NO: 594421 - DNA, 503 bp, Homo sapiens
ccgttctagtctaaactattatgaaagtctcaagccctcaaacstgtgcttccttctcattttaaagagcaatttccaacatccaaatataattatatcaccagcatgcttttaattcttcaatggcactccattacctatggaaaaaagtcccaggcccttatccggcaggcaaagctgtcccagacagcttatttcttatttctcatttctgtttacctccatgtgagccagtttatgccatagcaaacttcatatagctccttaatcacatcatcatgattcataactttatgccttgcatctcttgcttcttctgctcagaaagttctccctccttgcttactaacttctgacacatcttagtgttcactacaatatgtgttctttgctgaagcaggttaataaacctaattttggttgactatgggtgggtttctggtagtccctgggcactgttctttatcagtgtagagcaatgcttcatgtgacagcacacatgg

SEQ ID NO: 594422 - DNA, 503 bp, Homo sapiens
ccgttctagtctaaactattatgaaagtctcaagccctcaaacctgtgcttccttctcattttaaagagcaatttccaacatccaaatataattatatcaccagcatgcttttaattcttcaatggcactccattacctatggaaaaragtcccaggcccttatccggcaggcaaagctgtcccagacagcttatttcttatttctcatttctgtttacctccatgtgagccagtttatgccatagcaaacttcatatagctccttaatcacatcatcatgattcataactttatgccttgcatctcttgcttcttctgctcagaaagttctccctccttgcttactaacttctgacacatcttagtgttcactacaatatgtgttctttgctgaagcaggttaataaacctaattttggttgactatgggtgggtttctggtagtccctgggcactgttctttatcagtgtagagcaatgcttcatgtgacagcacacatgg

SEQ ID NO: 594423 - DNA, 585 bp, Homo sapiens
gccatgctgtaacaggcgagtgataacaggctttaatccttttaaagcatgctgtgsgatgggatattggtgttgagaagggtaaggatgattaggttttaaggggatagtaaggggtacatgatcagtcacctaggagggagtagagatgtcctatacttgtgggttaaggttgggggatacaagagaaagatgcgaaggaggctttgggttgggaagaagggtggcaatgaaatgtggctgtagtccaggaataatcagggaagcagataatttggttaaaatgtctcagcctaataagggaactgggcaggtggggataactaaaaaggagtgtataaaagaatattgtccaagttggcaagagagttggggagttttaagaggtctagaagcctggccgtcaatacgcacaacagttatggaggcaaggggaacaggcccctgaaaaaagataatgtggagtgggtagcctctgtattgattaagaagggacggacttaccctccactgtgagagtaccccaaagcttggcgtcagtgatggtctacggggcttccgaggtgatcgggcggtgtcagtctt

SEQ ID NO: 594424 - DNA, 587 bp, Homo sapiens
atcttgtttttcaggatcttataggcccctagcttatgaatctatttcaacagtttccttttgctagtcatgtgaaactgctgcctagaatttttctattctctggcgatcactctgtattattcctgtctcmctatgagccaagtcttctgctagatgctgagcacacagatatgaaaaagaaaattgcctagcatccagtgagttagtgaggaagcaattccatttagaaataagaaaacctttgaaaccacctttgcacaaattatagaaacgagaaaaggatgacagtggaatatacctgatctaaccagcccccaacttacctatagcctccaaactgcccttaatcatcgctaggcttgggccaagctaactttgggagaaatttagtttatagtttaaatgataatagcccttccccaaaactaaaccaccttggaaaagttaatgaaaggcctgccaagttaggaggatgagaggagcctgaattctgctaaggtgtagacataaaggattaccagccattattccagaagctgtaagatttgcaacttccctaattactcctgcagataatatcacta

SEQ ID NO: 594425 - DNA, 613 bp, Homo sapiens
ttcctgaaacctggtgtaaaaggtaaaagattactggcaattagttatatcaggttgctagtacctaaaatggtgggaatcataaaataatcaaataataaaaaataacttgtattttaaatttacaaaacagtttaatgaattgtttttattaaatatatgtttgtagccataacattcatatcaatatgaatagatatatggcagtgcttgactagttgtaccaagtattacaattttacatttaatttagccagaaattgtttctaatatatgctcagaatgctttaagcaccaaatgacatcacctgcgttcaggcccccagamctggggtttgaaacactaagctgtaaaatatattgggcttctttttctttttctgatgttaggaacatcctaagactctctgaaattgaatggtgctattttcagaagacattaaacgtgtgccttttcaaaatcttttgatagtttatgccacttttttttaccacaataataattttagagcattttggtatttttcaactcacatatttcttctttcctacttcacagtcttgaagtcttgtcagatttccccatatgatcaactcactccacattcagatg

SEQ ID NO: 594426 - DNA, 366 bp, Homo sapiens
tatcccaattacagtattagagttttacaaagttatctgttttctttcttttaccagtgagttttataccttcagatattttcttgttacacttcagtgttcatttctttcagaatgacgaactcacattagcattgcttgcaagacagtgttggtgctgatgagttccctcagcttttgtttttctgaggaartttttagctctccttcatatttgaagaattggttttttgggcagattattctttgttggcagttattttccttaagccctttaaatatggcaatcctctctctcctggtcagcaaagtgtctggtaagaaatccactgaaagccatattggtcctctgttgaatgccatgtt

SEQ ID NO: 594427 - DNA, 560 bp, Homo sapiens
tgtaaatgaagtttaatgataaaacattgggtagggcagagacaggatcagaaattctgtggaatacaactataaacttatttataaagactgcaatctattaactaatgaagtaattaatgaaccaatcatcagtcaattattattcttttggtatagtagatagaaaaaatataaatccacatactgtagtattacccagctcatgtgtctctttcattcacaagaacataatgagacacttcatcaaatgtctctttaaagtctagtctacttgtgacattcctctgaggtaatattaaagtgttagatcaagagtgtggtctgcagcaaaaaaaaaaaaaaaaaaaatttgaaatgtggrggaaatttacaaaagcatctaggttactggatgagaattgtgaggatttgagctacatacttttagtgctgggattttggagctaatataattcaatccccacaagaaacagataatcaaaaagtttgaaaaagtagggtgacttggtaagattctgtacttagaggcaaaatggatttaggacatgttttgctga

SEQ ID NO: 594428 - DNA, 595 bp, Homo sapiens
ctgcttaggcctataggcacatattccttattaagtttcctatttacatggattacttgaatgataatgctaactagctaaagtgctaggtaggaccaaaaagattattagttaacctgccgtagaaatgctttacatcttaatctggatagaacttgccaattgacattgatcttaacatgttaactgattgacccaagacctattttagccaattaactacttagtattctattgtactagagtccataaaggcaccagagaataatgcaggtgatagtcttccccagtcttggagctaaagcaaattaaaatgatgagcaactggatagttcatgtatatgcatgacttacgtgagcctgtcagtagtgatgccctcagaaaaatatttcctctaaccatgttctgtgaaacactaacccccatctcacccactaagctcaagcaaraaatgctgcacgctgcattcctgtcttcttaagtatgcacattgtgttgttgtttactaacggctaaagaattctgcaataaagcaactgatttaattttgtgtattccatccagctttgctcagttactctcacagcccactta

SEQ ID NO: 594429 - DNA, 596 bp, Homo sapiens
aaaaatgggcagatgctacacctcaagacttctttgcccctcacccttctcctggaaagccagtggttaaagtattaccaattcaccaccagtcttgaccctatcctaattcaattcaggttaaatctcactaaaaataattttattttcttttccctttgtctttaaaataagcataccaaaaaaagtcattttaatttagtgagtaattgctattaaaagcaaacaaaattaggtttcttgcataattcctctccatatatcactctacgaaagatatgtaattgtacaacaaagmaaattatatattcttagagtttgcctcacctgtcccaattgacgagtgtttctgtttgcagagaaaggaaatactcgtttcactgtgaaggatgaggagaaaagaagaaagaaattatttctcttttctgtctccccaaaatctaccttcatcctctctatcataaattatacaagtaaaatagaaccttgtcactcaaaatgtggcctgcagaccagcagcctgggcatctcctaagagactgttaaaaaaatgcagatctccaaatcaacctcagacctccagaatgagaatctac

SEQ ID NO: 594430 - DNA, 551 bp, Homo sapiens
tattttacctggcataggaaagcagttatctgtggtgtagggggttccatcgtgaggagttggaacagctctggaatcactgctttaatgctgaccccattgccccagttaaagactaagttcccacataaactgaattgtgaatttcactcttctgaaaaaggatattttaccacaaactccattctctaagctttcctcattcacttagacagcttgtttctaaatgcrggataaaagtgccatcatttttgcaataaataaaatcaggattaagtaatagagtcattaaggcagctggtctttgcaaatagttggtcttaatcatgtggcaatttatctttagtaaggttatttactgtggactctcatccataaaagcagtttgcatcctcagttgtttagagtcgctgtccttatgacccagcctgacttaatctaaagcatccatgcagcagggtctttaatcactctttgattttcatctatgattgttttagttctcaatattgaaacctatgctatttcttcttctggacattactgggtaa

SEQ ID NO: 594431 - DNA, 523 bp, Homo sapiens
ccaggagtcttaggaaaagccaagctcctcatgtggaggataacagctgacatccaggatgaataagtctaagctccagagaagtcacctcaaggtttctaggcagatggagaaggaattcagcttgaggaaggagtcaagagccttatcttggtttgaaaaaaaaaacaaaaaaaaaacaaaaacaagtaagacccacaaggttcatgtcctgataatgattatcagatcatctgcctgccagtgccagggggataaggaaataggagcaataaaaaagatagcaaatggtcactggaacttctggatgagctaaggggctttgtaaagcatgtaataatagcaccaattaaactaataataatatcttaatcacgtggcaggaatgtgattttatcmtcacaaccaccatatgaagggaataatattattatcccaatttttcagatgaggaccccaacaggcacagagaagttaagtaactttcccaacataactcagttagcaaatggctgctgggagt

SEQ ID NO: 594432 - DNA, 432 bp, Homo sapiens
tttagtttcatgctctcaagtaaacttcatccacaaataatttaattaatggacaaagaaagaagctccatttatcttattaaataaatatattttcatttaagatttttactttttaatgattttcaaaatttrgaatatatttatgtcctttggtcaaattgtgatgatttataattttaattccaaaaaaaatgttaatacttagagggttatatttcttttttttttcttttttcttttttctttttttttttttttgagaacgagtctcactcttgcccaggttggagtgcagtgatgcaatctcggctcactgcaacctctgcttcccaggttcaagtgattttcctgcctcagcctcccgagtagctgggactacaggcacgcaccaccacgcctacctaatttttgtatttttagtagagatgg

SEQ ID NO: 594433 - DNA, 637 bp, Homo sapiens
tgggactcaaataaataagtgctattggtactgggagagcttcatatgtgcatttttccacaatttaaattttgaaatagtgatgcattaccttcacaaaaaatggataaaggaatctttaaaaatgatatgaattcagtagattctatcatgctaacaagtaagttaaccctacrttaaaaataaaagctagaaacataactggggaattcaacatgttttattttgccaggccaatgatttcatcaatatccaattaaattttagtgtgacaactacatttagtttgttttcttacacagattgaacattcaccattatgacagtttcatcatgctaaaatctattcacaaacttacactttggaaaaaagtgtatttctagaaaattttatgtacaatacaaatggaatagatattaagtcactgaattgtcaagctacataaaataaaaccaatcaaccaccagtagtatacattaacagcatttttgaaaaaaaattttcttttacattcagcagagttatgttcatgaagaatttctacatttttaaaagtaatgaaagtgtacacaatttaataattgtgaaaatagaaagaattaaatagcacaaatatagtataaaactaaacaccgt

SEQ ID NO: 594434 - DNA, 562 bp, Homo sapiens
ggaaacccacaccaaacttttttgaaatgtcaaaataaggcaggacttacatgcaatcaatacagacataaaggataacgcaaggctcatcacaaatccccccttcagagcttttcctgaaataatttttccatagtctcctatctctttctcattcagagccttcttgggttttcatttttttttggaaaaaatgtgagaaatgttgccrtatttcctaagaggaagtgagaaagatagatggtctctgccccagcaggacacctggataacagtgttatctagagccaaaatgggcttacatatgcctgcctgtttatttgttctccttctgtttggagactttccctgattaattactttctagtaatcgaggctgctaactaatgtctcatctgattaacctgtagtttggcccttagtcccagagggtgggctggccatcctgcctggggaatgaaggaggtcattggccaggggcctctgggatgccagttttgggctcgtttatttgctttaagtcttgtttgctattcctgctgcagtgactggcgacagcttc

SEQ ID NO: 594435 - DNA, 523 bp, Homo sapiens
ctgctcagattcagcatctgtaactcctttaagtggcatttagtattatgacaggaaatctttactgtttttctattatgaagaaacattagtagactgtattgtaatatgtgttcaaattgggttaccgtctctgatgaactgcagaagaaatggaaacagatagtgagtggaacagggatgctggtgcaatcaatccccaatctcacagcacgcaccttggggcccacagactgagggtcacatcttcctagagtttcctgagatggagaaaatgatttctttctctcagttggtgcaatgcttacatgggacaatgtgtgcaattaacctggcacacagtagttattcagcaaaaataatttccwttgttatctcctgttttatgaattcagctttcttcagaattttaaaaaaagcagttataaattaaaccacattggtttcttattcatagctggagggcctggcacatagaaggtgtgatcatgggagtctgtgggatgaattatttgtggtgctt

SEQ ID NO: 594436 - DNA, 523 bp, Homo sapiens
ctgctcagattcagcatctgtaactcctttaagtggcatttagtattatgacaggaaatctttactgtttttctattatgaagaaacattagtagactgtattgtaatatgtgttcaaattgggttaccgtctctgatgaactgcagaagaaatggaaacagatagtgagtggaacagggatgctggtgcaatcaatccccaatctcacagcacgcaccttggggcccacagactgagggtcacatcttcctagagtttcctgagatggagaaaatgatttctttctctcagttggtgcaatgcttacatgggacaatgtgtgcaattaacctggcacacagtagttattcagcaaaaataatttccattgttatctcctgttttatgaattcagctttcttcagaattttaaaaaaagcagttataaattaaaccacrttggtttcttattcatagctggagggcctggcacatagaaggtgtgatcatgggagtctgtgggatgaattatttgtggtgctt

SEQ ID NO: 594437 - DNA, 552 bp, Homo sapiens
tcacagttttctattcatgattgaatcaacagtattgcagatgatgtcaagtagggatcagtgtcagtcacagagggaagaaaagcaaagtatgcaacccagggggataacagacacaaaccagaagggttcaatgctagttttcccagtgagggagtcaacattaccctcatatgtgtagtaatgggtttttttttacagaaraaccacagaggttttcttccaatatatttaattgttttcttgagatcccagtttattgtgagtgtttttactccttaagggattcggatgtggtgaaattgatccagaatgacctgcaattctgaaaattagaaggctgttgaatattttctttgaaaatgttaaagaaaatgggcatgttgaagtatcccggtctttggtattatgttagggactctgaacaagaaaaagaattcatcaactatcaccatttttgagaccagaaagtgaaaaaaaaaaagctataacatgatctatttgaacccagataagatttacaattttgcgaatactctaaggtttcagcac

SEQ ID NO: 594438 - DNA, 549 bp, Homo sapiens
ggcaaacacttggtgctcaataaaagcctatggactaaattgcacctgtgctttctgagtgaaagaktaggaactgcgggctcagaagggaagaggctgatcaggtgaggtttatgatttggcaggctatctggggggataaagtccatagaaagcaaaaagtatgtgtttgagctgcaggagacagatctgggatataggaaaggatttgggtgttacctgttgtgaaagacctggaagacccaaagtgatgaaaaaagcagatctctgggctccggaaggtacttagtggttgtctctgtggtgctgatgaaaggagtttcctggagaggtaggtaaagaaagacctaaaatactgagttcaagtggactgatgggctggaatggggcaagcagccagggggagagaaggtgggcatagacccggccaggggtggtttttcagcagaggagttgtcaacagaaactcaatgctgcagtgtttagggaaaacaaggcaaataaggaaattgtcagaagacagaatacagagccctgcagtcaatttcc

SEQ ID NO: 594439 - DNA, 608 bp, Homo sapiens
atcccataaaagtttgccgtgtgtatatatcataaatgctcatcagctagttgagacacatgtccacacagagagggaaactgatgagattgttatgctctcactccaggtgattatgaatagtagacacacaattattggcaggatgttcatagatakatcattttgcatatggttgtgctgatccaaggcattgcatgcttctaacaggctttagagatccccatgtatcctgagttgtacttttgagatgcctatctcacctacacactcctcctgacttccagccccatatttctttatatattcattaaaaagcatatacttcagttttgattccaaatttataaaaaaagctattatgtgctatgtaatattttgagatttacttctctgcttgattatatattgctatgatttattcatataattgcatatagagtttatatgttttaactgctataagatatcccattgtgtaaatatatcacaatttatccattgtattattaaagagccttgtaatatttccagctattgatcttataaatttcttatatatgttttctgcagatatgtaagagtagcttttggacactcacacacac

SEQ ID NO: 594440 - DNA, 603 bp, Homo sapiens
ggatccatataaactagaagactgaagctggattcagtgtctgaaatcaaagactgaataagttccaaaccataacttgaagcccaaagaagctgttgcatattctacctacggcttatgcttataggagacagtgatcatagggtgcaggaaaacaaagacaaagaccaagaatagagccatactacctgctggctcagtgatgggatatgtaattcccacaattctgccacaaagaagagatgccaaaatgccactagacgatgtggggctggcctgtaagttcaagagcactaagaattcgcatcaaaaaaccttcttagtaagaaaacatataaaggggaatgtgagaaaaataaactttcacatcaatctgaaactaaaattttaaatgtgctaataaattatatcataaggaaggcaaaagatactaacagattgaaaagtttagttttctccaggttaaactacaaattattaayaggaaggtagctagcagacctcaaaatagatggcgtttaaacaacagagttctaaataacacataggttaaacaagaaatctgaaaaaagttcaaaaacattttaaattaaagttaaatta

SEQ ID NO: 594441 - DNA, 583 bp, Homo sapiens
aagaaaatgtggtatatatacacaatggaatatcattcagccatgaaaaaagaataaaatcctgtcatatgcagcaacatgggtgaaactggaagtcattatgttacacaaaataaactaagcacagaaagacaaatatcacatgttttacttatatgtgggatctaaaaaagtggacctcatgaagacagggaatatactggtggttatcagaggccaggaagggttggattgtagggaagatgaagagaagttgctgaatgggtataaataygtggtttgatagaagaaaacctaacacttatctaacagtaagacctggtgttagatagatccgtaggttgattatcatttagaataatctattatatatttcaaaatagctagaagagaataatcagaatagttctagcattaaaaaaaggtaaatattagggtgatggatagtccaagtatgctaacttgatctttacaaattatattaaattattgtatgtaccccaaaactgtatacatctattatgtatcaatagaaaaagaaatataaaatataatcagtgcatgttgttttatggaaattata

SEQ ID NO: 594442 - DNA, 410 bp, Homo sapiens
tgctgtgcactctggccactgacctttgcatgtgttggtttcgtaacgtggaaatgaagctgtytgctgtacccacctcttcagatcacagggagagttcaatgaaataatgttcatgtaagcactctgaaaagcacagagctctaaataaatgctgaaggttggcattccaggcagtggggggcatgaaaaatactgggagtttctattctgcccttgctcagttatgagaccctgggttgctcttgcaccttctgaggtatgataagtagacacctgtgatcaccttgaaagtggaggctaatcgaggcaaatgtggcttggttatagaaatcttaaaagcacgtatttgctaagggatgaatcagttacctgggaaagtaaaatcacttcatccaaaacttgaattc

SEQ ID NO: 594443 - DNA, 410 bp, Homo sapiens
tgctgtgcactctggccactgacctttgcatgtgttggtttcgtaacgtggaaatgaagctgtctgctgtacccacctcttcagatcacagggagagttcaatgaaataatgttcatgtaagcactctgaaaagcacagagctctaaataaatgctgaaggttggcattccaggcagtggggggcatgaaaaatactgggagtttctattctgcccttgctcagttatgagaccctgggttgctcttgcaccttytgaggtatgataagtagacacctgtgatcaccttgaaagtggaggctaatcgaggcaaatgtggcttggttatagaaatcttaaaagcacgtatttgctaagggatgaatcagttacctgggaaagtaaaatcacttcatccaaaacttgaattc

SEQ ID NO: 594444 - DNA, 659 bp, Homo sapiens
tagcgctgcattctgacgccacctacattaagtgtaattgcttttctatgcgatagctctttaagtactggtagacatttaaccatggccccctacaatcttttgttttcccagctaaataaaggcaccttgctttaatccaacccctcctacaaaactaagttaactgccagcatccatgaacaaatctgcggttcatcacagtcactacagggcagccaagagctggataaagaaagacattgctttcactgacaggcaaccccatgttttggaaagtagaattcctggaagtctggcacctcaggaaatttaagtcccacacaaaccccatgggctataataagatattgctgatgttttggctgatatgcaccagaaagccttgggaggaaagtggcctagagactgtaatgaatgagagcataatgtcctgcccttgaagccacacaatyagaaagtgagaggactacagaaaaaccagcagggcactggcattttccagttgagcattctgagctgacagtgaaaataacgaatgaaacacggcagagcagaagtggactttatttggaaaaccttgttttcccggaactgaagctaacctctgggacgagaggtttcagaacaatgaagaatcaacaaataagatgaagaga

SEQ ID NO: 594445 - DNA, 659 bp, Homo sapiens
tagcgctgcattctgacgccacctacattaagtgtaattgcttttctatgcgatagctctttaagtactggtagacatttaaccatggccccctacaatcttttgttttcccagctaaataaaggcaccttgctttaatccaacccctcctacaaaactaagttaactgccagcatccatgaacaaatctgcggttcatcacagtcactacagggcagccaagagctggataaagaaagacattgctttcactgacaggcaaccccatgttttggaaagtagaattcctggaagtctggcacctcaggaaatttaagtcccacacaaaccccatgggctataataagatattgctgatgttttggctgatatgcaccagaaagccttgggaggaaagtggcctagagactgtaatgaatgagagcataatgtcctgcccttgaagccacacaatcagaaagtgagaggactacagaaaaaccagcagggcactggcattttccagktgagcattctgagctgacagtgaaaataacgaatgaaacacggcagagcagaagtggactttatttggaaaaccttgttttcccggaactgaagctaacctctgggacgagaggtttcagaacaatgaagaatcaacaaataagatgaagaga

SEQ ID NO: 594446 - DNA, 538 bp, Homo sapiens
ggtaaaacagttccctctgagacctttctaagaggctagaggtactgacttttccaaatcataccaggagaaagggtagtgcctgtgwttctctgaaaagttctgacatttgaggagaaggaaaactgctgtgatcaaattcattcaacacaagacttctcaacatccacttattctgtcacacaagtctgtctgcacacattgctttaacaacgctcacctatatgactatttctcatactgagtgaaattgtaacatgcctcagcaagtgatctagagtggtatgattttaatactttgcctcatttcattaaagatttcagccagcatacaagaattcacaaggtagaaaatgctaactaaagaaaaatctgatcagagaacagtttagatgatcaagacctagagaaagttaagagagaatatgcaggccgcaatccaatagagttggaataactgagcagctaataatctgagtttcctggaaacaacaatctgagtttcctggtaagcaatgagtaaaggaaaccaaaatca

SEQ ID NO: 594447 - DNA, 574 bp, Homo sapiens
tggagccttttaatgctcccagtgtgcagtaaacatgctggaatttcaatggattccaaagcgtaacaataatagcattaagtacatgccagagcctttgatgttattgatgaaaaaaaaaaaaaaagtaggtggtggtgggggcaaaggggcccctgtcatttctgtcatgagcttttaaacttttgacctccaaccttttgtgtctaagagctttttccatatgggtgttagcagcctgatcaagtatcctgaattcactggagccatcagtgtttctctgatgggaaagggcattctcagtcaaaaggtcccaaccaggattgtgattgctgagcgcccatcagtgtctgccctgtcttagaggtggtggcatggggtagggtggtgagtttactcactgaagttactcactgcccagcagaaggcaggcagcctggtcargctggaagctgcctttcagagtgctaggatttggtccagggtgtgcatgcatctgctgggccttgccctgggctcactctgaacatgggaagcatgcagaaaactgcacagggaggattccaaagaggag

SEQ ID NO: 594448 - DNA, 503 bp, Homo sapiens
ctcctgagtaactgggactacaggcacacaccatcataattgttaaaatttttttttaattttttttttatagaaacaggatcttgccatgttgcccaggctggtctcaaaatcctgaatgcaagctatctcctygacttcccaaagtgttgagattacaggcatgagccacctcacccagccatgtctcagggatcttgaaaacaagtggttcaaaaggaaaagctgtctgaaaggtgtacagatctctcattcaacacctgcctgacatcacacatctgcaaggcagagaggtaaactatctctaagaaatcaggcccctgacacagttccagagcaagtaagattagcacctctgtgagtctgctgccctgccacatattatatttaacagaagtttcttaggagtaacctatttgaactaggaagcaacagaagtttccacatgactgtaccatctaccactttctagaatgaaaatcttaacctggggttagaattca

SEQ ID NO: 594449 - DNA, 593 bp, Homo sapiens
attgcagcaattcaattacattttcaggctcctctttgaattctagttctcttgctatttctgtcatatctgcagttccccyactgatgtcttaaaccactcaaagtcatccatgagagttaaaatcctgccaagttccttttaatgttgatattttgaccttctatgaatcataaatgttcttaatggcatctagatggtgaattctttccagaaggtttcaatttacgttttccatgtccatcagaggaattaatatctatggcagctatagccttctgaaatgtatttctaaataataagacttgaaagttgaaattactccttgctccatagactgcagaactgatattgagtttgcaggcataaaataatattgatctttttgtacatctacatcagagctcttgggtgactaggtgcatttttaattaggagtaatacttagaaaggaatcttattttctgagcagtagttctcaacagtaggctaaaaacattcagtaaatcatgctgtaagcagatgtgctgtcatgcaggcttttcagttccatttagggaacacaagcagagtagatttagcataattcttaa

SEQ ID NO: 594450 - DNA, 593 bp, Homo sapiens
aaattctaagcaattatgtgcctatttaaaaatggaaagatgaggattatttgtgacatattgacataaaaggaaatgaattataaacaatcaaataataaacatgcacatactttattagctaccaaattattctgaaacaaaggtctgaggaaaatttaaatctgactctgctataatattttaaaaagtatgaagccagtgtttacttatttgcaatgcaaacatttgacctataaactgtgaacatttataagatacattttaaagaataacacaaacaataacacacaattattgycagaaagcatgttactttatacatgtttattctctatcacatacatctaagtttctaaagtttctcattcccttttaaaattacataactgagcctgatgcagtggatcacacctataattccagcactttgggaggctgaggcgggaaaatgactggagcctaggaattcaagaacagccaaggcagtatggtgagactttgtctctataaaaataaaataaaaatagctgggtgtggtggcacatgcctatagtcccagatacttgggagactgaggtggtaggatcact

SEQ ID NO: 594451 - DNA, 528 bp, Homo sapiens
tcacatgtacccaatttacttgtaaacacttttttaaaaaaataattaaataaatgcttgctgcttaaaaaaggaaaaaaattgaaaacgttattttgaagacttgtagccaagaaaaattagaatttagctgaaactgtagaaaataataaaaagcraaaacaaaattaggcaaactagaatctaataacaaatgtactctagttttgaaacaatgttttctctctccagtctcccatttctactaaagaaaaatcatggtaggactggtttgcattatcatacttggtctaattattagtatacagtgcagcaagaataattattttttacataggcttttaaattggctttgatggaactttgttccataggaggaatctcagataagacatttttaaagccgggcccagtcatggatttgcgccatcaaatatccatgagtggggtgaatttcctctcctcttaaggttccaagatcaacgtgtagcttctgtgcctgtcagaaagtgacattctttacttacc

SEQ ID NO: 594452 - DNA, 468 bp, Homo sapiens
ttttcatatgataatttttgcacacaataatcataattatcatcaagcataatgctgaaatttgtttagggtaaatctagctaaggaataagtaatttcaaatttctttaacacagttccttcaaataagggtactaatagaatttgttggaaaaataaaagcctattttaaaaataaagcattaatgcttaaraagtcaaataatcatatttgtcataaataaaaattactatatatgaaaaattactagatatacaattatatatatgctatatatacaaaaatatactatatatgaaaaaagataaaaattggaactattacctgctaataaaattatttggttcaagcgattctcctgcctcagcctcctgagtacctgggattataggcatgcaccaccatgcccagctaatttatttttgtatttttagtagagatggggtttcaccatattggtcaggctg

SEQ ID NO: 594453 - DNA, 533 bp, Homo sapiens
tactcatggaaccaaataccacctgttccccaaatcctatggaaataatagataaaattatgcaaggctatatggttattaagacagtaattaaaaacttagcttacwtttcctagacctttgtttctatgacaatgtacttttaattctctgtttaaaaataatgtgagaattattttatttgtatgaaatagatattaaatttttaggtattagaatctgtacattatcaaattatactaaatatgctttatgcccttgcttaaaaaaattatagaaagattctgtgacacacatatgcattccccattaaatttatatgacaaataagcctaaaatcagtctgccttgatgatttaaatatatattacacagaattatttttcattcacagcagtctagtagtttagattcattttagtacataataattcaatgcattaacctttgaattattttgaaataggcataataaaagtgaaaacataaatacaagtagcaaataacattatttgctgttggcatagcagaat

SEQ ID NO: 594454 - DNA, 533 bp, Homo sapiens
tactcatggaaccaaataccacctgttccccaaatcctatggaaataatagataaaattatgcaaggctatatggttattaagacagtaattaaaaacttagcttacatttcctagacctttgtttctatgacaatgtacttttaattctctgtttaaaaataatgtgagaattattttatttgtatgaaatagatattaaatttttaggtattagaatctgtacattatcaaattrtactaaatatgctttatgcccttgcttaaaaaaattatagaaagattctgtgacacacatatgcattccccattaaatttatatgacaaataagcctaaaatcagtctgccttgatgatttaaatatatattacacagaattatttttcattcacagcagtctagtagtttagattcattttagtacataataattcaatgcattaacctttgaattattttgaaataggcataataaaagtgaaaacataaatacaagtagcaaataacattatttgctgttggcatagcagaat

SEQ ID NO: 594455 - DNA, 533 bp, Homo sapiens
tactcatggaaccaaataccacctgttccccaaatcctatggaaataatagataaaattatgcaaggctatatggttattaagacagtaattaaaaacttagcttacatttcctagacctttgtttctatgacaatgtacttttaattctctgtttaaaaataatgtgagaattattttatttgtatgaaatagatattaaatttttaggtattagaatctgtacattatcaaattatactaaatatgcttkatgcccttgcttaaaaaaattatagaaagattctgtgacacacatatgcattccccattaaatttatatgacaaataagcctaaaatcagtctgccttgatgatttaaatatatattacacagaattatttttcattcacagcagtctagtagtttagattcattttagtacataataattcaatgcattaacctttgaattattttgaaataggcataataaaagtgaaaacataaatacaagtagcaaataacattatttgctgttggcatagcagaat

SEQ ID NO: 594456 - DNA, 540 bp, Homo sapiens
caattgaggtaattagcaatatttttcataataatgaatgaaatgccctgattttgataactgcattatggttataaaaaagaatgcctttttttttttaagttccagggtatatcagcagaatgtgcaggtttgttacataggtaaacatgtgccatggtrgtttgctgcatattaagccccacatgcattagctatttttttctgatgctctccatcccccaaacctacccccaatgggccccagtgtgtgttgttcccctccttgtgcccatgtgctctcatcatttagctcccacttataagaacatgttgtgtttggacttctgttcctgtgttatttgctgaggataatggcttccagctccatccatgtccctgcaaaggacatgacattgttcctttttatggtcaatcctttttatggctgtatagtattccatggcgtatatgtgtcacattttctttatccagtctatcattgatggcagttgggttgattccatggctttactattgtgaatagtgctggaatgaaca

SEQ ID NO: 594457 - DNA, 557 bp, Homo sapiens
atactgtgggcagagatagtctcctcatagggggaaggagagtgaagtgatcacctaactttgccatgcacccctgaccaagcaggcactaatggcctcaggctccaggcccactccactaccaatcctgctccggcagccccaggatccagctcaattcctgcagactcatagtccagacctaccccagtttccaaagtggcctgacaagtcaaaataattgtcttaagaaaattcagtgatctacaagagaacacagacaactaagcaaatatcagtaaaacaatayggaaacaaaattagaagttcaataaagagatagaagccatggaaaagaacccaaaaagaaattctggacaatgacaaaactgaaaaattccacagagagctccaatagtacactaaatcaagcagaagaaagaattagtgagcatgaagataggttatttgaaattacccagaggaacaaaaagaaagcaaaaaacctacaagacatatatgggacatcatcaactgaatcaatatatgcattatgcacttcccagaaggagcagaga

SEQ ID NO: 594458 - DNA, 567 bp, Homo sapiens
tttgtaggtggtggtttaaatctcaattcagttctttaagccttcgctgtgctagtttcacaggcaaagctaagcatcatttaatcagagcatcttgctttattctgtaagttaaactcatgaatttcatttttccttatcatcaagcaatgtcaataattattaattaaaaatggaaatatcctaactaaaaaactgggatatatcaattaactgaaaacctgcctgttrtagatttacaacagaggatattttgatgtattttttgaaagcagatttcttggatacaaatttactttttaagatgatgtgtccagcttcttgatgataagagaaataatttctttcaggtggaagatggtataaaataaagctttgaattattgatatcagttttatatttgatgatatataatgttggtaaacaatttttaaaaggcacaaatagttaagaattctgcaataataaaaggaaaatcagacaactgagattaaccaagaggataactacacattataattataacccatgatttgaaaataattttaattaatgtattcataagt

SEQ ID NO: 594459 - DNA, 395 bp, Homo sapiens
attaaacatatgagtgaaataacaaattaagatctcagtggttgaggtcttcataaactgaatgattgagcttcatcaccagataatacaaaattaaaaaaagtaaataaattgaaagtaaggtcaaataaaatatacaaacagaagcaaggagcttccaaaggatggaaaatatggagaataacataatggacactaagaatatagcacaaatgtcaagtaatatgtaattggactcgtaagtgaaggaaagagtaaattgggtggaagggagagttgaaaagagtgtaactgaaatgtttgttaactatttwaaaaattcaaggtagagatttaaggagtcccataaaaccgaagcagatatagatagaaagaaaaaatatgttaaggaatgc

SEQ ID NO: 594460 - DNA, 595 bp, Homo sapiens
aaatccactccagctgactaatcttataaaacgaataaggaaggacaggctagaccctgactggggtctctgtaagtagtctccactaactttcctcatctctgcctcatgkctgttacattcagcttctactaaacgataacaggaggaagaaaagagcttgtatagcttccctccttactgtaaggtctcaaaatgaggtaagttgatgacaagagtttgtgttataatattgagaatagatattggttcaaacagcatggtgattatttccaggcaaaatacctacaacaagaaaaaggcaatttaatgtgcagtcttgtgctaggaacagcagaagcatttcatctcatgtgccagctttgttcaaatgtcaaagtcactgggttaagaaagagtctaaggttcaagaggacccacagaccctctaaaagaagtccacagactcatgcaggaccccaggggaccccccaaaactgtgagtaccccaactgcagaagtgggaaagggagaccgtcctctcccgaacgcacacccccactggagaagctgaagttctgtttctgggagacgtttctgactttacctgtagctg

SEQ ID NO: 594461 - DNA, 595 bp, Homo sapiens
aaatccactccagctgactaatcttataaaacgaataaggaaggacaggctagaccctgactggggtctctgtaagtagtctccactaactttcctcatctctgcctcatggctgttacattcagcttctactaaacgataacaggaggaagaaaagagcttgtatagcttccctccttactgtaaggtctcaaaatgaggtaagttgatgacaagagtttgtgttataatattgagaatagayattggttcaaacagcatggtgattatttccaggcaaaatacctacaacaagaaaaaggcaatttaatgtgcagtcttgtgctaggaacagcagaagcatttcatctcatgtgccagctttgttcaaatgtcaaagtcactgggttaagaaagagtctaaggttcaagaggacccacagaccctctaaaagaagtccacagactcatgcaggaccccaggggaccccccaaaactgtgagtaccccaactgcagaagtgggaaagggagaccgtcctctcccgaacgcacacccccactggagaagctgaagttctgtttctgggagacgtttctgactttacctgtagctg

SEQ ID NO: 594462 - DNA, 595 bp, Homo sapiens
aaatccactccagctgactaatcttataaaacgaataaggaaggacaggctagaccctgactggggtctctgtaagtagtctccactaactttcctcatctctgcctcatggctgttacattcagcttctactaaacgataacaggaggaagaaaagagcttgtatagcttccctccttactgtaaggtctcaaaatgaggtaagttgatgacaagagtttgtgttataatattgagaatagatattggttcaaacagcatggtgattatttccwggcaaaatacctacaacaagaaaaaggcaatttaatgtgcagtcttgtgctaggaacagcagaagcatttcatctcatgtgccagctttgttcaaatgtcaaagtcactgggttaagaaagagtctaaggttcaagaggacccacagaccctctaaaagaagtccacagactcatgcaggaccccaggggaccccccaaaactgtgagtaccccaactgcagaagtgggaaagggagaccgtcctctcccgaacgcacacccccactggagaagctgaagttctgtttctgggagacgtttctgactttacctgtagctg

SEQ ID NO: 594463 - DNA, 552 bp, Homo sapiens
gctactccggaggctgaggcagcagaattgcttgaacccctgggaggcagaggttgtggtgagccaggatcgcgccattgcactccagcctgggcaacaagagcaaaactccatttcaaaaaaaaaaaaaaaatgaattttaagggatgtatttttatgagttaatttaacatgttaattttttcctatggaagatgttatctcttagctgtaaagtgaagagattgtatccaatatcatccaagtgctattaaataacattgaataaggccctcatttactaattgagattaaatgaaaagatattcagtgtaaattaagagaatagctattacatgtacatattttgttgtcatttattttgtttattagaacaaaagagtttaatatttttaaaatgttgagatttccatctccatctagaaggggaataaaaaaccagyattctcagagaccaagaaaaaaacaaaaacaaaacaatacccaaaccctctacatattataatttgggcatgatgtctcaatttttatgattctgaataacagggttaa

SEQ ID NO: 594464 - DNA, 552 bp, Homo sapiens
gctactccggaggctgaggcagcagaattgcttgaacccctgggaggcagaggttgtggtgagccaggatcgcgccattgcactccagcctgggcaacaagagcaaaactccatttcaaaaaaaaaaaaaaaatgaattttaagggatgtatttttatgagttaatttaacatgttaattttttcctatggaagatgttatctcttagctgtaaagtgaagagattgtatccaatatcatccaagtgctattaaataacattgaataaggccctcatttactaattgagattaaatgaaaagatattcagtgtaaattaagagaatagctattacatgtacatattttgttgtcatttattttgtttattagaacaaaagagtttaatatttttaaaatgttgagatttccatctccatctagaaggggaataaaaaaccagtattctcagagaccaagaaaaaaacaaaaacaaaacaatacccaaamcctctacatattataatttgggcatgatgtctcaatttttatgattctgaataacagggttaa

SEQ ID NO: 594465 - DNA, 566 bp, Homo sapiens
tttaattcaataaatatttatggaggtcctctttgtgtactatgctggttatcaatgggctagggggaaagatgaactggtgggtcaagctgaccatatacacactctgtgaaggtttatctggtgtactgggattaaaagttagcatttttaattatcttagttgaagaatatattaagatgatcaattaaaagtaaatacctgcttttaaaaattaatctaactcataacttcaaaaaataaactcaagtgtcattggatcacacacaaacatttactgagttatgasggttaattttttcttcttctttttttaagtgagatgagggtctcatatgttgcccaggctggactcaaacttctgggctcaagaaatcctgtgcctcagcctccctgactagctggggctataggcacatgacaccacacctggctatgatggttaactttgtgtgtatatttggctaggctaagagatgcccagagagttgtgaaaatgttactgggtgtgtctgtgagtgagtttccagaagaaatttacattttaatcagtagactgagtaaa

SEQ ID NO: 594466 - DNA, 579 bp, Homo sapiens
tgaacaaacacatactttcatatacttgacgacgatgttagtggttaggaatgatttaacaaaatgtgagatctaaagttttatgtagggttaatgctaaaatactccagcaaaactatttctccactgatttgggccagagtcatgagccatttatttcacacttttggcctcattaccaaatacctctaccattcttccaatcagagcttcccaatcactttgctgagctactgattgtcttactctctctggaagagccaggagtaaccaaatcccttagcaagtcattgtcaatcatggacagctgtcaacagcaccagtaggaatcaccacacatgtgtgtgttttgttagttgtttcacctccttaaaactttttttctcgtctgcaaagtggattagtcttatctactataatcatartgaaaattacaatcaatataaaatatgaaaattgtatatgtggtatcataatacagtaggcactatttaaacaataactcgtacattttctataaacacattttacatttgtttgccgactatttttgcatttgtgtaaaatgcacatatttaa

SEQ ID NO: 594467 - DNA, 441 bp, Homo sapiens
ggttgtgttaacttgccctagtacttggactgtttggawgtttccatgggttcataaccctctcaatacttgcaattaccatgatttgttttgtttttaattgtagacattcttatatgtagcaatatctcaccagtttccttttgtattgagctataacatatatgcaataaaatggacagatcttaagtgttcagcatgatggattttgaaattttattcacttatgtaattactatccaaggaaaaatacagtttagaccatatccatcaccccagaaagcactatctttactttttccattcaattccagacttccacttaacatattactatccaaaattctattacagtagtcctgttcttggacctcaaataagtgaaatcctacggcatagggtattttatgtctggattattttgctcaatattatttataa

SEQ ID NO: 594468 - DNA, 542 bp, Homo sapiens
tatgtagcaatatctcaccagtttccttttgtattgagctataacatatatgcaataaaatggacagatcttaagtgttcagcatgatggattttgaaattttattcacttatgtaattactatccaaggaaaaatacagtttagaccatatccatcaccccagaaagcactatctttactttttccattcaattccagacttccacttaacatattactatccaaaattctattacagtagtcctgttcttggacctcaaataagtgaaatcctacggcatagggtattttatgtctggattattttgctcaatattatttataaaatttattcacaatgtggcatatattggtactatttrtttccttttaattgtcaatcagtataccagagtattactataccaaaaattgttttttctattctcttgttgatgagcatttgagtttcaaatttgggactattataatgaggatgtgataaatagttttataaacatttctgtggacatatgttttattttttctgtcttgtgtaaat

SEQ ID NO: 594469 - DNA, 542 bp, Homo sapiens
tatgtagcaatatctcaccagtttccttttgtattgagctataacatatatgcaataaaatggacagatcttaagtgttcagcatgatggattttgaaattttattcacttatgtaattactatccaaggaaaaatacagtttagaccatatccatcaccccagaaagcactatctttactttttccattcaattccagacttccacttaacatattactatccaaaattctattacagtagtcctgttcttggacctcaaataagtgaaatcctacggcatagggtattttatgtctggattattttgctcaatattatttataaaatttattcacaatgtggcatatattggtactatttatttccttttaattgtcaatcagtataccagagtattactataccaaaaattgttttttctattctcttgttgatgagcatttgagtttcaaawttgggactattataatgaggatgtgataaatagttttataaacatttctgtggacatatgttttattttttctgtcttgtgtaaat

SEQ ID NO: 594470 - DNA, 560 bp, Homo sapiens
aattataatatgtgatttatattctcctaaaactattttaatatttccttgattacactggtaaatctaggagataaaaactttccattatatttcagackcagttggatatcaggaacaacgttactcactcagattctcaccttggcaaaatatttcagtaaaattaagtttagctttttgcagctcacttaccctggaattgatgatgtctgttggatggtaaataaatgccaatgaccatgagctgagtgaacaaagtacgctacaaagatttgttgatagaaaagtgggacaagtattgcagttcctaaggatgggatgactaataaatcatctgtgtctcaagacagacataaaacaagggaacagcgtgccctgcattgcctttttctttctttcttttttttattttttaagcggcagtcattttttatttatctaatttttactttgtttcttttttatttttccataagttattggggtacaggtggtatttggttacatgagtaagttctttagggatgatttgtgagattttggtgcacccatccctg

SEQ ID NO: 594471 - DNA, 462 bp, Homo sapiens
atgctttatgtcttactacttaatcactgtgtgattaaataatccttattccttgttataagtccatgtcattgttagtactatttttaaaattttgatcggccccttctccctgccacacacatacaaactgaattagaatctttggcagttgattcagcagtatgtattattagagaccaaggtggggaatctttactactttaatttcttacaaaatgcattttggtttcagaactcaagagtagtatagtmtcaaagtaattcagttttgttgccaaatacagtgttttgtgtttttttttgtttgtttgtttgttttgcttagaccttctctggcacactataatgtatcaaattatggaccaccatccacatttgctttaaaagtcattacacttgggtgattgacccatcattggcttaaatcatcattggctagcttttttatatttgtcttat

SEQ ID NO: 594472 - DNA, 520 bp, Homo sapiens
atatgtatgtatatgtatgtgatacacacacasacacaaattacttggggtgcttgttaaaaatgcaaacttctttatctcatgttttcaaatttcaatttagtaaaaatggggcccagaagtcctcatttttgacaacacttgagctgtatctgttacaagttgtctttgggctctatgctgagaaatcatgttcaaggtagcccttgaggatagcaaagtttttagttttcttttgatgaaaggggcacagaacagtagcatagtcaccccccttcaaggactcaaggaagagccttccttcctctcccatgacatatttgagcaaagctggagcagagctgagcaaggctagaaagtattgctttcataaaacatccatgtgtagtttcgtggtacagccagcaagcaactcatcccagtaaaagaaattatattaaagagcagcttgcatggagtaggaaaataactgagtatttgaatataactatgatgtaattgttcgaaaacactgccccca

SEQ ID NO: 594473 - DNA, 520 bp, Homo sapiens
atatgtatgtatatgtatgtgatacacacacacacacaaattacttggggtgcttgttaaaaatgcaaacttctttatctcatgttttcaaatttcaatttagtaaaaatggggcccagaagtcctcatttttgacaacacttgagctgtatctgttacaagttgtctttgggctctatgctgagaaatcatgttcaaggtagcccttgaggatagcaaagtttttagttttcttttgatgaaaggggcacagaacagtagcatagtcaccccccttcaaggactcaaggaagagccttccttcctctcccatgacatatttgagcaaagctggagcagagctgagcaaggctagaaagtattgctttcataaaacatccatgtgtagtttcgtggtacagccagcaagcaactcatcccagtaaaagaaattatattaaasagcagcttgcatggagtaggaaaataactgagtatttgaatataactatgatgtaattgttcgaaaacactgccccca

SEQ ID NO: 594474 - DNA, 537 bp, Homo sapiens
tctcttgggttcaaaagcgtgatctctgagtcaaatctatttgtgcccgctgcttgcctgtttctggtttctcttgtatcctcagcacctagtagagtactctgagcagaggacccctaaataagatcttgttcataaataaaattgtctgatcacatagatactacaaatgtaaatgaagaaatctgtttattaaagtgagattttttattgtgtccagtaaattgtttacaactaatactaataatttattgtgtccactaaattgtttgcaactaatacttaaaaatgccagctatccaaacattaattcaatcaaattaatccaagctagtctcaaatatacttcttatgtatttgatctcaagtacttagcattagtcaccatttttctttagccaataacaggttggttttaaagttgaagcattgaattcctgtcctraatttccgttttcacaccagctgaggagattcttattattgtgttataggaatgttcagtagtgtactgctgtttccatcttatttccagtc

SEQ ID NO: 594475 - DNA, 587 bp, Homo sapiens
gcatcaggtttggtttgatccagtagctctacactgytctcaaggactcagattcctcctgtctctccactctgatgtctatggtattgatttcattcctaggctggatccccttatgtttgtattattggtaccagaagcaagcagggcgatatcttcctgatagagtctgattttccgtagacttcctctgaagggtgaagaagttttactccagaagttcccagcaaacttcttttccatatatcattgtctcaaattatctaaagacctgccatcctagaaccagtcactggggcgggggtagggggagcgggggaatgagattattataattagcttagactaatcaggcttcacccctgaacctgaggtataatgaatattggattgtcaaacacaaggtccactgcacattttattgtcattagttatttagttacctgtttcctcctctaagttatactttcctggaggttaggaagcaaattttttttcctctacccccacaaagcctggcatatagtaggtacttaacagatgttaatttagtgagacttagaaagggccagccagtataggcaaac

SEQ ID NO: 594476 - DNA, 531 bp, Homo sapiens
agagggctagaggtgacgtgaccaagatggaagccacagtacctttttatgacctaatccccaaactcaccacccacagtcacttcagccacattctatttgttagaggtgagtcaccaagtccagcccaggctaaagacgagarttaggctttacctcttgaagggaggcatatcaaaggttttgtggactatcaaaggttttgtggacattaaaaaaaaaaaaactaccatgaaaacttattccaaggttgccgtttttaacagacaacagtcattgaagcatgtgctcaataccaattatatttagtgttcaaataagactgtagacatatttattttaatgtccttttcagattgatattcatagggcatagaaattcacaggggcagtttctttaagtcatgagcaactttcttatgtcatgagtcagatgtgacactgccaaaatcacaactaagtccactgggaggttacaggaaagaagatgaagacctatcatatttgtattttttaagtcgggatatgtag

SEQ ID NO: 594477 - DNA, 578 bp, Homo sapiens
tgcctctccagaccctgaccatccagatcattgcatttgaacccaggccatgctccccggccaatgactaagcacagtcacttgcacaggctatttctgggagatgtgggattcttccaacaggccactttggctcaagacctggctgagactttcctagggctggctgcgaccccagacacttccttcagttctgcttccttccttctctcctccacaggggtcagactggcatctgacatcagatggcatcaccatctgaaaatcccccttcttcattcccctgctctttctccttgagcttcacagacrtttctcccaccaacatctctcacatatctaatcctgtcttggcctctgcttcccagaggacctgatgaattaacacagctactcacctagcctttctatgactcagtttcctaacctgttaaacagagagactataacctaccttgtcttgtgattatgtgacctaaatacagatggaggagggtggcagcatcattccatatactacctgctagttgagattattttgttattctttggatcaaaaagaaatacaacagaagcta

SEQ ID NO: 594478 - DNA, 548 bp, Homo sapiens
caatggcagactgcctaaagaaatgtggtacatatacaccatggaatactatgtagccataaaaaggaatgaaatcatgtcctctgccgcaacatggatgtgactagaggccagcatcctgagcaaactaatgcaggaacagaaaaccagatacctcatgttctcatttataagtgggcctaaacattgagtacacatgaacataagtagggaacaacagatgctggggactactagaaggtgaagggagggaggggagtaagggctgaaaaactacctattgggtactatgctcactgcctgggtaacaggttcacttgtaccccaaacctcagcatcatgccatatacctttgtaacaaacatgcacgggaaccccctggttccaaaataagttgaaaaaataaaataaaataagatgatgaagtcatgaaagaaaagatcaaagccataagacaaaacaaaayattatgacaaaaaaaagcgcattttgaaaaagaactaattgggacttccagaaatgaaaaatactttttgaaattagtcaaa

SEQ ID NO: 594479 - DNA, 531 bp, Homo sapiens
attttgtctcttaatgtgcatgcccaggaaattgtttctccctggcgtctgcattcagttaacactttaatgttttttttcgtttttctttttaagacagaatgtcactctgtcacccaggctggaatacagtggcacaatcttggctcactgcaacatctgcctcccaggttcaagagattctcccacctcagccttccgagttgctgggactacaggtgtgtaccactaagmccaaatacttcttgtattttttggtagagacagggtttcaccatttgggccaggttggtcttgaactcctaacctcacatgatccacctgccttggccccccaaagtgctggagttacaggcatgagccaccctgcctgggctttttttttttttttttttttttttgagacagagtttcacttcttcacccaggctggagtgcggtagtgccatctcgactcactgtaacctctgcctccaggttcaagtgattctcgtgcctcagcctcctgaggagctgggattacaggcatgc

SEQ ID NO: 594480 - DNA, 531 bp, Homo sapiens
attttgtctcttaatgtgcatgcccaggaaattgtttctccctggcgtctgcattcagttaacactttaatgttttttttcgtttttctttttaagacagaatgtcactctgtcacccaggctggaatacagtggcacaatcttggctcactgcaacatctgcctcccaggttcaagagattctcccacctcagccttccgagttgctgggactacaggtgtgtaccactaagaccaaatacttcttgtattttttggtagagacagggtttcaccatttgggccaggttggtcttgaactcctaacctcacatgatccacctgccttggccccccaaagtgctggagttacaggcatgagccaccctgcctgggctttttttttttttttttttttttttgagacagagtttcacttyttcacccaggctggagtgcggtagtgccatctcgactcactgtaacctctgcctccaggttcaagtgattctcgtgcctcagcctcctgaggagctgggattacaggcatgc

SEQ ID NO: 594481 - DNA, 488 bp, Homo sapiens
gtttttatctttgacatttcaatctatgattcatttcaaattaattttgtgtatggtgtgaggtagtcaagggtgttattcccccatttggttatcagattgcctcagcatcattttgaaaatcatccctttcctrtggaattgcagtcgtgcatttgtcataagcagctgaccatatgttgaatctctgccatttatttttttagtaaaatctgtgatatattccagtagactctaagttccaggaaagtttggaatttgcccactatactgtactgcctaatttgcccactatactgtactcattgcctagcacagtgtcaggcacataatagacattgaattaatgtttgctggttggaagttataactcagaaaaatccacagcaagtctgaaaaatgttggtgagtaaaagagagttaagctgttccctaagcatgttgcccagcatgcttagatatgtagtagaactgaaagtgtttttata

SEQ ID NO: 594482 - DNA, 470 bp, Homo sapiens
atgattcatttcaaattaattttgtgtatggtgtgaggtagtcaagggtgttattcccccatttggttatcagattgcctcagcatcattttgaaaatcatccctttcctatggaattgcagtcgtgcatttgtcataagcagstgaccatatgttgaatctctgccatttatttttttagtaaaatctgtgatatattccagtagactctaagttccaggaaagtttggaatttgcccactatactgtactgcctaatttgcccactatactgtactcattgcctagcacagtgtcaggcacataatagacattgaattaatgtttgctggttggaagttataactcagaaaaatccacagcaagtctgaaaaatgttggtgagtaaaagagagttaagctgttccctaagcatgttgcccagcatgcttagatatgtagtagaactgaaagtgtttttatagaatatt

SEQ ID NO: 594483 - DNA, 477 bp, Homo sapiens
atgattcatttcaaattaattttgtgtatggtgtgaggtagtcaagggtgttattcccccatttggttatcagattgcctcagcatcattttgaaaatcatccctttcctatggaattgcagtcgtgcatttgtcataagcagctgaccatatgttgaatctctgccatttatttttttagtaaaatctgtgatatattccagtagactctaagttccaggaaagtttggaatttgcccactatactgtactgcctaatttgcccactatactgtactcattgcctagcacagtgtcaggcacataatagacattgaattaatgtttgctggttggaagttataactcagaaaaatccacagcaagtctgaaaaatgttggtgagtaaaagagagttaagctgttccctaagcatgttgcccagcatgcttagatatrtagtagaactgaaagtgtttttatagaatattctcaact

SEQ ID NO: 594484 - DNA, 415 bp, Homo sapiens
catcaataacaaagactaaaaactcagacttgagccaggtacagtggcttatgcctgtaatcccaacactttgggaggctgaggcaggaagatcacttgacgtcagaagtttgagaccagtctgataaatacagtgagaccctatgtctacaataaaggtcgtggcacatgtctgtagtcccagctactcagaaggctgaggcaggaggatcacttgagcctaggagtttgaggctgcagtgagctataatcgtaccactgcagtcaggcctcggtgacacagcaaaaccatgtatcataaataaataaataaatatatatatatatatatatatatatatatatacayatatatatatatatatacacacacatataaaataaaaactcagatttaaaaaatgagcaagaattc

SEQ ID NO: 594485 - DNA, 578 bp, Homo sapiens
ttttttctgttgttctagatacaaggtcttgctatactgcccaggctgctggtcttgcactcctgggctcaaactatccttccccttcagcctcccaagcagctggcattacaggcctgtgcctccatgcctggttttactacttcaatttgaatgtagaaatcttgtcactctaaagttcctttgtcctcttgtctttatgcaatagttgccttacatattacatttacatatattaaaaactccactagatgatgttatattttttcctttcaactgtcaaacatattttttaaaattctggaagggaagaataatctatygtatttacccagatatctaccacttctgttactctttctctattcctgatgttccattttttttccttctggtatcggaagagctttctttaccatatctattttttttttaaagatacaaggtcttgctctgttgcccaggctggagtgcagtggtgcagtcatagctctctgcagccttgaacttctagaatcaagtgatcctcccacctcagcctcccgagtagctgggactagaggtgtgtgccaccgcac

SEQ ID NO: 594486 - DNA, 625 bp, Homo sapiens
tttacagacagatgccttcttgttttgtcctcatatggcagagacagataatctccctcatgtctcttcttgtaaggggaataattccacacatgagggctctgccttygtgaccagctggaagttttccagcaaagaagagtagggtggggaagataattctgatattttgagcccagggacatgaggaatagaggtaccactggctaggaatgaaagcttaaccagcagtttagcactgtggagtggaaattgactgattgcttgttcaacattcattcacccttctttgagttccagattctgattttcattctattccttacccactatatcagtcagtataggttgtaggtatatgctatagcaacaacagttccaacatcttagtggcttaagacaacaaaatttcatcttaattttgctcacattatgtataaaacttggactgctggagggggtcagctcattggggtcagctcattggagtcactcagttgaaggtttcatccactcactcacaagtttctgcagtcaatgaggcagtgaaaacttgagtatggtcttccatatggaagtgacatgtatcacttccactcacctgctgtgaggcacagcaaggcat

SEQ ID NO: 594487 - DNA, 625 bp, Homo sapiens
tttacagacagatgccttcttgttttgtcctcatatggcagagacagataatctccctcatgtctcttcttgtaaggggaataattccacacatgagggctctgccttcgtgaccagctggaagttttccagcaaagaagagtagggtggggaagataattctgatattttgagcccagggacatgaggaatagaggtaccactggctaggaatgaaagcttaaccagcagtttagcactgtggagtggaaattgactgattgcttgttcaacattcattcacccttctttgagttccagattctgattttcattctattccttacccactatatcagtcagtataggttgtaggtatatgctatagcaacaacagttccaacatcttagtggcttaagacaacaaaatttcatcttaattttgctcacattatgtataaaacttggactgctggagggggtcagctcattggggtcagctcattggagtcactcagttgaaggtttcatccactcactcacaagtttctgcagtcartgaggcagtgaaaacttgagtatggtcttccatatggaagtgacatgtatcacttccactcacctgctgtgaggcacagcaaggcat

SEQ ID NO: 594488 - DNA, 575 bp, Homo sapiens
gaatgataattactgtaattatctgcttggcctcccagacccctaaatagagcgggtgaagtgagccgccccaaacttctggaaacggctggagccagctgtgccatgtgccccaggaccaggaaactgctgggtaatgacatgctttgggtttgttttaagttctcttttcctcattacaaatgtcatgtataaaatggcatgcttataaactttttaagaatggcctgcaatttattggccagtgccatttatggattcagattaatcaaccatcacagcttcataaggctgtcccctggggagcagaggcaagaaattgggccgcctgaggccctggaaaagcttccagatgtggggaggggcccggactctgccgaccctggatttccctctccaaacctacctcctggcttccctgtaaagtgagaagtggctcaatagtccccacggtccctcaactacracattctataatgcctccagaatgaccatctatggtcacagataagcacagagtatgcaaaggcttaaaatgatttcaagttgtttggcaattacttacaaaatgaaac

SEQ ID NO: 594489 - DNA, 432 bp, Homo sapiens
ttttactttacaagaatttacatgggacttgagggaacacaaaaagcaaataaacgttcttttttgtktgtttgtttgttttctaacactgtataatgaatctgcacatcccataacttttctttcatattccacaaaaagtttattgtcacaatatgcctcaaatcctggaagcccaggggatagcagagctcatgtggaaagatgttctactttccactgttgttcactttccatcatctccagcccttccccatccaggctcaatggatacacaaattaaaccccagcaagcagtctttctgcaatggtgctgtctgtccaccaaacttgcttttgggtgaaataaggatcacatataaaatgaggattcttggaaccaaggttcacagtttcatctcatcccatgtcatttgtgctcttagccttcca

SEQ ID NO: 594490 - DNA, 473 bp, Homo sapiens
gtatgatttacatttcattgcagacttttactttacaagaatttacatgggacttgagggaacacaaaaagcaaataaacgttcttttttgtgtgtttgtttgttttctaacactgtataatgaatctgcacatcccataacttttctttcatattccacaaaaagtttattgtcacaatatgcctcaaatcctggaagcccaggggatagcagagctcatgtggaaagatgttctactttccactgttgttcactttccatcatctccagcccttccccatccaggctcaatggatacacaaattaaaccccagcaagcagtcttyctgcaatggtgctgtctgtccaccaaacttgcttttgggtgaaataaggatcacatataaaatgaggattcttggaaccaaggttcacagtttcatctcatcccatgtcatttgtgctcttagccttccatgattttgagacctta

SEQ ID NO: 594491 - DNA, 335 bp, Homo sapiens
ttgtttccttgttcatagatggcaccttctagctgtgtcctcacgtggtgggagaggtaagggatttttcaggggtctcttttmtaagggcactaatgccattcatgagggctcaccctcatgacctaaccaccccctaaaggccccacctcctaataccatcacattaagggcaaggaattttggggggaccaaacattagaccacagcagatggtatggatgggattgagggagagaaagtgtcagagccaacatagaagtttccattctcttttttgtccccctacttggtgactaaacaacatttctccagtctggttggggtgggaatcg

SEQ ID NO: 594492 - DNA, 550 bp, Homo sapiens
cctcatgccaccatctgtccacccttcaaaaattacattgattttactaggcacagtggyttacacctatgatcccagcactttgggagaccaaggcgggcagattgcttgagctcaggagttcaagaccagcctgggcaacatggtgaaaccccatctctaccaaaaataacaacaacaacaaattggccaggcatggtggtgggcgcctgtaataccagctacttgggaggccgaggcaggagaatagctcaaacctgggaggcagaggttgcagtgagccaagactgtgccactgcactccagcctgggcaacagagtcagaccctgtcaaataaaaataaaaataaaaaaattacgttgatctgaagagcctggttcctagagtcaggaattcatattgttctagataaaatggaaagaggcaacttctacatgtttcatccctgagctctgatatcatctctccccagaatgacaaagagtagaggggccttctgtcagttttgcaagctcttgaccagttgcagtgtcaggacaacaggatcat

SEQ ID NO: 594493 - DNA, 573 bp, Homo sapiens
gcgtgaaccaccacacccggccaagagattcttagagaacttctgagattaactgattgctagcatgtggcagagttttagttcagacttgcaggaaggggactagccttctagtaaagccaactggaagattttttytctggaaagagttcctttcaatagtggggaaaaggtatccagacaagtgcatctcaaacttcaatgtgtacatgaattacccgaggatcctgttaaaatgcagattcagattcaagaggtctggggtggggcccaagattctgcaattctaacccaaactgcctttgcaaaaattatgacagtgagaaaaatctgacataggaaaattatgacaataaaagaaatttgacctaactgattccatcttgcttctaacctccaagatgcccttgttcattcctggggatggatctaggtaaccatagtaggaatttagtttcaaacaaagatgatttggaaaactagcaaattagccacaagattagaaattatggctctggagtcatacagccagaggccacaagattcctgaccacccccattgctcctatagat

SEQ ID NO: 594494 - DNA, 552 bp, Homo sapiens
tttcgtgcccatgagggtagccagccttgggcaaagatgatatggaggaaaggcagagaagagagtcagagaaaaactcgttccacggtgccttgttgaactgatcaagcttcactggaatcttgacttytcatgaacatttcctttattatttataacagcttaaattaggttttctgttacctgcagccacaaaattctatctgaaatacatccctctcttgggagtggcaaaacagctaagagactgagacttcttttaactagttctttttcttttcccaacactgcttttgaggtatcaagatcagatgacccccattctggtgtattttatagtgaaagcaatgagattggccatgttgagatcaaatatttgaaaacaaggttgcctgtctttctaatcccacttattttggagaacctcattatatatttcctgcaggcccaaagtaactttccaaaaagatgctgtgaactaagcatatttataaatgaaggaaaaataagcacatcagaaattttcctgccagataatttgaaaacacatga

SEQ ID NO: 594495 - DNA, 538 bp, Homo sapiens
taggtgtactattttttatctcatactctattttggctgtaccttttctgttatccctagatacacaaatacttaacattgtgttataattgccttcagtattcagtacagtaacatgctgtacaggtttgtggcctgggaaaaataagctgtatataccaggtgtatagtaagctatgcccaggtrtatagtaagctatgccatctaggtttgtgggagtgcactctataatgttcacacaatgacaaaatcgcctaatgatgcatttctcaagatgggtccccattgttaaatgacacaatggtcattacatctgcagtgaccctatttccaaataaggtcatcgactgaggtcctggtgattaggacttcagcatatcttagcagagagggtcacacaattcaacccataacagtcaggtatgaataaatatttccatactatacaaaaatcaacaatattctttttttctgagacaagagtctcactctgtcgtccaggctggagagcagtggtgtgatctcggctcactgcag

SEQ ID NO: 594496 - DNA, 611 bp, Homo sapiens
atagcaggttctcagccaaggtcagccagaggaatgaatgaatgaaatgttatcacttagctgccacccatgtgatgtgatttgaaaaatgctggaaaatcccgacctcccgcctcccagcatattcccaatggacatttgtaagagtcccccgatgaaatgaaatgmccttcataacaccttagctcgtcttagcaaataagcaggggtcaactaatcatatgagtctggccatggcagctggctgggaatattcccatgcaaaaccgagcacaagagagacatgagaggagaggaagaggccaccttcaaacagggaaagaaaatcctactttctccaggaagaggtcttcagcctccccctagtctcaattaggtgcccccttccccaaagcccagagtcctgcctctcccattaccctgtgctattattgacatcatgtatctctctctccctctctcctactgaaccatgaaccctgagggacccaatgtcttgttcatcactgtatccccaacagtcagtacaatacccaacacacattgcttgcttactaggaatttggagaacaaataaaattgatggttgcttattaggaatttggagaaca

SEQ ID NO: 594497 - DNA, 667 bp, Homo sapiens
ctaacagcctcccatcagtttctgtcatrctttgctaccaaataagccatttaaattgttttggtttaaagactctttggattttggaattggttaagtggttgtgaacctgtattgattttattcttattagagaccaaatttccaagaaccaaccgaagacctacctagaaatgagtagacttttacagagtcacagacatcagctgtggggaaatttgacaagctctaatgctgcctcccctacccctgtggccatcttccctagttacagtggagaagaaacaggccagacccctggccaaagaagggagtgaagagttacctactaaccttccagcaggtacagcacacacctcaaaggagttgttccaacaggctcgagtccccagagtcctgtgctttcccctggtgccacaggggcagtacagttgtctacgtcttattgcttcaggctgtccagagagacaccactgggcccactgtttagtggggagaccaagtgggtgtaatccctacgcttacaatcctgattcttataatcctgactcttgtaatccttactcttaagagacaccagacattcaagggctgggctgtccaggcacaaaaaatccacccttcctttagaaatacacatatgagtaaaaggcaaccaaccacactt

SEQ ID NO: 594498 - DNA, 581 bp, Homo sapiens
cattatccttggcaaactaacacagaaacagaaaaccaaatactgcatgttctcactgataagtgggagctgaatgacgagaactcgtagacacaaagaagagaaccacagacactggagcctacctgaggatggagggtgggaggagggagaggagcagaaaaaataactattgggtacttaatacctgggtgatgaaataamctgtaccacaaacccccgagacacaagtttacctattaatgtacaacaaacctgcacatgtacccctgaacctaaaataaaaattaaaaaaaaaatttgggaaatagtaggaaaaaaattaaaaccagaagactacatataatagcatgatctcatttttataaaacaagaataagcaagagtaaaacacatgctgtgtaggtatgactttatatatgcaaagcagtgatacactcccaaactcaggataacaatgacctctgtggaggggacctggggccctggactgggaaagagcatcaggtgtatgccttattggcaatgccctagttctttggttgacggggccacatattttcattatacaattaatctgt

SEQ ID NO: 594499 - DNA, 662 bp, Homo sapiens
ctggtctggaactcctgacctgaagcaattggcctacctcagcctcccaaaatgctgggattacaggtgtgatccgccacacctggctgcaatctcctcttctgaaaaggtcatggagggaagaaatgcatctctctaaagaatactttgtgtgatggagaggaaaggcttctccttctctctctctggaacaaagtggaagttgggatttggaggagagatagtcaaagactccaacgacatgggaaacaggatgagcccaygacaccatggcaggagaaaaaggttcaccagttggggtgctcatgagcacgatgcatgagctctaaaatatgtgaagtccgggatttagggtccaggctttcctatgatgtttttctgctctcacctccagatctccagtaaaagaaatggggctaattagggcaatgaaagatgtctagcagagaacttaggaggaggctcccagaggaatactcttaaaacagatgtgggaacatgaaagcattcctcaaggacccccagaaatgcccagggagcactacctggtataaaactgcaattcttttggatcaacgcaaaacagagctcaattatataacactgtaatggaagatgacccatgaaagctggaaaattccaagacatctgggtaacaatga

SEQ ID NO: 594500 - DNA, 510 bp, Homo sapiens
aacaattatataccatcaagttaaamtcttctagtcatggagaagtgaggtggggaggacgcggtacaagactatgtctctttctctctacttgggtaatttataatggaggaggtggagatcttaccccaatttatttgttcatttagagaatattctttttttttttttttttgagatggactctcactctgtcacccaggctggagtgcagtggtgtgatctcggctgactgcaacctccatctcttgggttcaagtgattctcctgcctcagcctcccaagcagctgggattacaggcatgcaccaccatgccctgctaatttttgtatttttagtagagacagggtttcaccacattggccaggctggtctcaaactcctgacctcaagtgatccacctcccttggccttctaaatactggaattacaggcatgagcccagcccacttagagaatattcttagattccccatctgtgccagtaactgcgctaggtttggggaatt

SEQ ID NO: 594501 - DNA, 510 bp, Homo sapiens
aacaattatataccatcaagttaaactcttctagtcatggagaagtgaggtggggaggacgcggtacaagactatgtctctttctctytacttgggtaatttataatggaggaggtggagatcttaccccaatttatttgttcatttagagaatattctttttttttttttttttgagatggactctcactctgtcacccaggctggagtgcagtggtgtgatctcggctgactgcaacctccatctcttgggttcaagtgattctcctgcctcagcctcccaagcagctgggattacaggcatgcaccaccatgccctgctaatttttgtatttttagtagagacagggtttcaccacattggccaggctggtctcaaactcctgacctcaagtgatccacctcccttggccttctaaatactggaattacaggcatgagcccagcccacttagagaatattcttagattccccatctgtgccagtaactgcgctaggtttggggaatt

SEQ ID NO: 594502 - DNA, 547 bp, Homo sapiens
gggaaatctgggaagacctctctgaggaggtgacttttagatgagtcctgaaggatgaggaagagccagcagtgtgatgagaaggtggaatgacattccaggtagaaggaaaagtgcatgcaaagtcccaagtccagaagggacatggagaatttgaagaggatggacaagtggtagatgagggctgcatcacrcaagccacaaatgccagagttatgatgcgggatttgatcttaagagcaccagaaagccactgaaagtttttcttccctgttctgataacccaataacttctgccctttctagcttactccttgactccagagaccatccatcccgatgaatgcatctatacaacaaagtttgcatcatagcccgttgcactctcattttcacagcactgatgggctgaatgctctggggctagggttggagaagactaatccttgccctttccttctgggagctaacagtccagtagggaagatggaaaggtaaacaggaaagtagcacacaggggtctggatgttgtgggaggaagcagcct

SEQ ID NO: 594503 - DNA, 547 bp, Homo sapiens
gggaaatctgggaagacctctctgaggaggtgacttttagatgagtcctgaaggatgaggaagagccagcagtgtgatgagaaggtggaatgacattccaggtagaaggaaaagtgcatgcaaagtcccaagtccagaagggacatggagaatttgaagaggatggacaagtggtagatgagggctgcatcacacaagccacaaatgccagagttatgatgcgggatttgatcttaagagcaccagaaagccactgaaagtttttcttccctgttctgataacccaataacttctgccctttctagcttactccttgactccagagaccatccatcccgatgaatgcatctatacaacaaagtttgcatcatagcccgttgcactctcattttcacagcactratgggctgaatgctctggggctagggttggagaagactaatccttgccctttccttctgggagctaacagtccagtagggaagatggaaaggtaaacaggaaagtagcacacaggggtctggatgttgtgggaggaagcagcct

SEQ ID NO: 594504 - DNA, 601 bp, Homo sapiens
ctactgaactgtggtgtcccgaaccccatcctagcagggtgaatacactaagatttaagagtaagatgagaaagtaaaaaatgtacccagaatcccttccatgagttttataatgtgaaacaggaacttacaagcaggtccctggagtctttgcagagttgttggaacttctacacatcctcacatcccagracatcactttctcacaagcaatgtctggccctgaagatacatgagtcttttaagagggaccctcttacgaaagggagaaaagggtcttctgcaaaccctcttccctctgtgggagggaatttggggggaggaggaaaggttgttatgaactaactcacataaaggtattacagaaggaaattaatgctggtcctcccacagtgagattcagcccacaaatctaatggtggaatttctgtcattattatgggggaagtaattgccctccatagtaacattaaaatcaagtcaaacaaaccacagcgtcgtaaggatgatgttgagttgtagttgttcattcatccaattactcattcagtttttcaaatgatagttattgagcacctactatgagttaggcagtattcta

SEQ ID NO: 594505 - DNA, 390 bp, Homo sapiens
gacttttacattacattgctaatttttattacagaatatttttcattcttttattttgatccactgatatttatttctgattctgactctgcctactgttattcaccctacttgttaattctaatctattctttttatttgtaaaagcataacttttctgaggcatagttgtgtgtgtatatgtgtatttaacctattctagaaacattaaattagaagagatwgagattacagattataatagcatgtaaagagtttcatacagttaatacctgagagtctgcacagtggggaactctgaagtaatatgtaaggtgtcaagaacaagcaggtcaggactgtggcactcaaagggcaggtaactagcttttcagtaacatttttaagtaa

SEQ ID NO: 594506 - DNA, 390 bp, Homo sapiens
gacttttacattacattgctaatttttattacagaatatttttcattcttttattttgatccactgatatttatttctgattctgactctgcctactgttattcaccctacttgttaattctaatctattctttttatttgtaaaagcataacttttctgaggcatagttgtgtgtgtatatgtgtatttaacctattctagaaacattaaattagaagagatagagattrcagattataatagcatgtaaagagtttcatacagttaatacctgagagtctgcacagtggggaactctgaagtaatatgtaaggtgtcaagaacaagcaggtcaggactgtggcactcaaagggcaggtaactagcttttcagtaacatttttaagtaa

SEQ ID NO: 594507 - DNA, 390 bp, Homo sapiens
gacttttacattacattgctaatttttattacagaatatttttcattcttttattttgatccactgatatttatttctgattctgactctgcctactgttattcaccctacttgttaattctaatctattctttttatttgtaaaagcataacttttctgaggcatagttgtgtgtgtatatgtgtatttaacctattctagaaacattaaattagaagagatagagattacagattataatagcatgtaaagagtttyatacagttaatacctgagagtctgcacagtggggaactctgaagtaatatgtaaggtgtcaagaacaagcaggtcaggactgtggcactcaaagggcaggtaactagcttttcagtaacatttttaagtaa

SEQ ID NO: 594508 - DNA, 589 bp, Homo sapiens
gacaatcaacagtttgcaaaatataaatattctttttgaaagttaagaattkttctctatttgtagtctagggtacttagagcattatttttaaatgcctcagaagatcacaggaaatgtttcatttttttattttgcatgtcccttggtcacaattctcctggacagggcatcagcttggtgcacaactgttgtattttcactactctagagtttctgttttcttttaataatttcctctgtcagaaagaagttatctttgtattgagggagattaataagccaaacaataacaacaacaaccaccaacaacaacaaacaccaacaacaacaaccttggaattagagaaaaagtattaaacaggagttaagaagttctaatttagttctcactattacaaatttttcccaaccaatgagtaggacgattctttccctggttttcgtaatgtgaacatatacttttaaagtgaggatgatgattttcctactctctcaaagaatacattaaagagaaagagaaaacaaacttcttattttgtaacagatttcagtttaaaatgtcactttgtaataactcttaaattca

SEQ ID NO: 594509 - DNA, 546 bp, Homo sapiens
ggcttcagagataatagggggagggcagggaacattccaagtgctgactgttgataatgcagttcaaatatctatggaatasatctattctgagaatcttttaagtttttacttggttttatacagtaaatacatactctaagacatagttcttgaaatagctaaactgaccaaagttaataggtagataaattttcattagactcaaaacttggtaacggtatctatttatttagctatttgccaataccttctgtggtgctatgtatgagcctagtgagaaatgactcatatcttatcattaaactatttatttttggcagaagccttgaagcaaagaagatgatgtatctaaagtaagcaggatcctcaatgaaaaatgaggtgcccctagaagaaaacctaggcaataccattcaggacataggcatggacaaagacttcatgactaaaacactaaaagcaatggcaacaaaagcaaaaattgacaaatgggatctaattaaactaaagagcttctgcacagcaaaagaaactatcatcaga

SEQ ID NO: 594510 - DNA, 575 bp, Homo sapiens
taaacgtgaataaaacaggtagagcattagagtgttcttggaagaataaacacaagttggaagtcttatgtggatagtgcaaaatacaggaaggcaatgaatcatgtaaacatcaaatgaaaggttggtarggaagccattggaatctgtcaggcactccctgcaataaatggcatattccgttcctttcctttcattcagtttaggaaagggagttctgtgaactctctaacagatcgcaaaagattctgtaagttcttattcctgtgtaaaggtacactttgaatagaatgagctgaaacccgctgaagaggatgtttagtttatatgaaatggacacagatatgtcatagtgctcacctccctgactgttttgccttctcccacaaacaggaaactgttaaggcagcaataatagaagagcagaaacgaagtgaaaaggctgtggaagaggcagtgaaaagaacaagagatgaattgatagagtatataaaagaacagaaaagggtaagtatctcctgaagagttttaatttgtgcttcaataaactgaatcagtgacttccatacaataac

SEQ ID NO: 594511 - DNA, 603 bp, Homo sapiens
tgaataagagctgggtaaataagactgaagcttactgggctgcattccagggaaattraggcattctaagtcacaggatgagatgggaggtcagcacacgatacaggtcgcaaagaccttgttgataaaacagttgcagtaaagaagccagccaaatcctgtcaaaaccaacatggcgactaaggtcacctctgattgtcctcattgctcattatatgctaattaaaatgcatgagcacgcaaaagacagtcccagcagtgccatgactgtttgcaaatgccatggcaacaccaagaagttaccctatatggtctaaaaagggaaggaaccctcagttacaggaactgcccacccctttccaggaaaactcatgaataaaccaccccttgtttagcgtataatcaagaaagaatgataacattaaatatagttaaccagcagccttggggctgctctgcctatggagtagccattctttatccctttactttcttaataaacttgctttcattttactgtatggattcaccttgatttccttcttgtgcaagatccaacaaccctctcttggggtctggatcaggacccctttctaataacag

SEQ ID NO: 594512 - DNA, 603 bp, Homo sapiens
tgaataagagctgggtaaataagactgaagcttactgggctgcattccagggaaattaaggcattctaagtcacaggatgagatgggaggtcagcacacgatacaggtcgcaaagaccttgttgataaaacagttgcagtaaagaagccagccaaatcctgtcaaaaccaacatggcgactaaggtcacctctgattgtcctcattgctcattatatgctaattaaaatgcatgagcacrcaaaagacagtcccagcagtgccatgactgtttgcaaatgccatggcaacaccaagaagttaccctatatggtctaaaaagggaaggaaccctcagttacaggaactgcccacccctttccaggaaaactcatgaataaaccaccccttgtttagcgtataatcaagaaagaatgataacattaaatatagttaaccagcagccttggggctgctctgcctatggagtagccattctttatccctttactttcttaataaacttgctttcattttactgtatggattcaccttgatttccttcttgtgcaagatccaacaaccctctcttggggtctggatcaggacccctttctaataacag

SEQ ID NO: 594513 - DNA, 603 bp, Homo sapiens
tgaataagagctgggtaaataagactgaagcttactgggctgcattccagggaaattaaggcattctaagtcacaggatgagatgggaggtcagcacacgatacaggtcgcaaagaccttgttgataaaacagttgcagtaaagaagccagccaaatcctgtcaaaaccaacatggcgactaaggtcacctctgattgtcctcattgctcattatatgctaattaaaatgcatgagcacgcaaaagacagtcccagcagtgccatgactgtttgcaaatgccatggcaacaccaagaagttaccctatatggtctaaaaagggaaggaaccctcagttacaggaactgcccacccctttccaggaaaactcatgaataaaccmccccttgtttagcgtataatcaagaaagaatgataacattaaatatagttaaccagcagccttggggctgctctgcctatggagtagccattctttatccctttactttcttaataaacttgctttcattttactgtatggattcaccttgatttccttcttgtgcaagatccaacaaccctctcttggggtctggatcaggacccctttctaataacag

SEQ ID NO: 594514 - DNA, 396 bp, Homo sapiens
gtttgggtctgggcatggtggcttatgcctataatcccagcactgtgggaggccaaggaaggtggatcacttgaggtcaggagatagagaccagcctggccaacgtggtgaaaccttgtctctactaaaaatacacaaattaaccaggtgtggtggtgtgtgcctgtaatctcagctactcaggcggctgaggcaggataatcgctttaacccaggaggcggaggttgcagtgagccaagatcgcaccactgcactccagcctgggtgacacagagactcggtttcaaaaaaaatcaaaaagaaaaagaaaagaaattatggtttgggagtcatgcagctggaggctatgrcattctgaccctccctgaacttctcctaagatcggcacttgagat

SEQ ID NO: 594515 - DNA, 497 bp, Homo sapiens
taatgtgtttcagcatgaacttctttggattcatcctagttggaggcttttgagctttttttttttttttttttttttttkagacaggttcttgctctgtcacccaggctggagtgcaatggcatgatcttgcctcactgcaacctctgcccccttgggctcaagtgaccctcccacttcaaccttgtgagtagctgggacaacaggtgcacaccaccatgcctggctatttttttttggtatttttggtagagacaggatcttgctgtgttgcccaggctggtcttgaactcctgagctcaagtgatccacttgcctcagccttctaaagtgttgggattacaggcaggagccaccatgcccagccttttttgagcttcttgaatttgatgttcattgccttcctcagatttggaagtttttggccattatttttttcaaaaaagtgctgtattaattttccttctcatctccttctgggatatttttgatgcatt

SEQ ID NO: 594516 - DNA, 497 bp, Homo sapiens
taatgtgtttcagcatgaacttctttggattcatcctagttggaggcttttgagcttttttttttttttttttttttttttagacaggttcttgctctgtcacccaggctggagtgcaatggcatgatcttgcctcactgcaacctctgcccccttgggctcaagtgaccctcccacttcaacctygtgagtagctgggacaacaggtgcacaccaccatgcctggctatttttttttggtatttttggtagagacaggatcttgctgtgttgcccaggctggtcttgaactcctgagctcaagtgatccacttgcctcagccttctaaagtgttgggattacaggcaggagccaccatgcccagccttttttgagcttcttgaatttgatgttcattgccttcctcagatttggaagtttttggccattatttttttcaaaaaagtgctgtattaattttccttctcatctccttctgggatatttttgatgcatt

SEQ ID NO: 594517 - DNA, 600 bp, Homo sapiens
tggtttttttattctgtggctcatatatgggcaccttgaaataccgtgacatactgtgaaatcaatgcaaaccacagatgtttattaaactcctgcataggtagcactctactgggactattagaataaaggaaaatgtttaggacaattgctgctcttaagagccttatatgtagctgagttgggctgagtgtgtgggtgagtatgataacttgtcagaagggtgatgcaaaacaaaaggtgctggtgggtagagaaggcccagccgagaaggcttcagggtggaagcaggacttgggtctccaggaggctgtgaagcatagaccctattaggtgaatgccttacaagtactgacattgggaagatctgggatgcttatyagacatatatatccatgggccccaccccagaactatagaatcaggatctctggggcatggatctaggaatctgattttcaattaattaattaactttttttgagtcagtatctcattctattgtccaggctggagtgtggtggtatgatcatagctcattgcagcctcaaactcctaggctcaagcgatcttcccacctcagtagctcctgaataactg

SEQ ID NO: 594518 - DNA, 597 bp, Homo sapiens
tagactgggtagtttataaactatagatacttattgctcatggttctggaggctgggaagtccaagatcaagtccagatcatgcccaagatcaaggtgcttgcagattctgtgtctggtgagggcccactttgcagttctgagatgatgctttcttgctgtgtccttacatggtggaagggacacaagctccctcaggcctcttttacttttcaaaaatttttatttaggttggtgcaaatgtgattgcagtgtttgcaattacttttaatggcaaaaaccacaattacatgtgcagcaacctaataattttaatttttataggtacatagatggtgtatatatttatggcatacatgagatattttgattcaggcacacaatgtgaactaatcatatcagagtaaatggkgtatcccttacctcaagcatttagcattctttttgttacagatgtttgaattatattcatagttattctaaaatgtaaaataaattattgttgtctgtagtcaccctgttgtgctatcaaatactagatttttttttcttttttaagatggtatctctctctgttgaccagactggagtgcagtgg

SEQ ID NO: 594519 - DNA, 571 bp, Homo sapiens
ctccttattaagaacagtcactccctccttgtttggggataatgttgtcccctacaaaacaacrttgcctatgcatccaggacctgccccgatagcccctcttgtcaggtgagcctacaggaagactcagccaagcacatcctgcccctaatagggaggaaaagtacaatgccctccatgatcttgagttgctgccatagatggagaaacggatttaaaaatgcagggaaatggggagctcaggtggatgtacagccagaagatccatcaaataaggatgttctacaagaagcccagggatccaggattctccaaggcaataaggaatgagctggggaaatggaaaccattatcatccaaaagttcagtgaagggccaggagtggtggcccatgcttgtaatcccagcacgttggaaaagctgcagcgggaggatcatttgagcccaggagtttgaaaccagcctgggcagcacagtgagaccccatccctcctaaaaatttaaaaattagtccattgtggtggcatgtgcctgtagtcccagttacttgtgaggctgaggtaggaggatc

SEQ ID NO: 594520 - DNA, 571 bp, Homo sapiens
ctccttattaagaacagtcactccctccttgtttggggataatgttgtcccctacaaaacaacgttgcctatgcatccaggacctgccccgatagcccctcttgtcaggtgagcctacaggaagactcagccaagcacatcctgcccctaatagggaggaaaagtacaatgycctccatgatcttgagttgctgccatagatggagaaacggatttaaaaatgcagggaaatggggagctcaggtggatgtacagccagaagatccatcaaataaggatgttctacaagaagcccagggatccaggattctccaaggcaataaggaatgagctggggaaatggaaaccattatcatccaaaagttcagtgaagggccaggagtggtggcccatgcttgtaatcccagcacgttggaaaagctgcagcgggaggatcatttgagcccaggagtttgaaaccagcctgggcagcacagtgagaccccatccctcctaaaaatttaaaaattagtccattgtggtggcatgtgcctgtagtcccagttacttgtgaggctgaggtaggaggatc

SEQ ID NO: 594521 - DNA, 571 bp, Homo sapiens
ctccttattaagaacagtcactccctccttgtttggggataatgttgtcccctacaaaacaacgttgcctatgcatccaggacctgccccgatagcccctcttgtcaggtgagcctacaggaagactcagccaagcacatcctgcccctaatagggaggaaaagtacaatgccctccatgatcttgagttgctgccatagatggagaaacggatttaaaaatgcagggaaatggggagctcaggtggatgtacagccagaagatccatcaaataaggatgttctacaagaagcccagggatccaggattctccaaggcaataaggaatgagctggggaaatggaaaccattatcatccaaaagttcagtgaagggccaggagtggtggcccatgcttgtaatcccagcackttggaaaagctgcagcgggaggatcatttgagcccaggagtttgaaaccagcctgggcagcacagtgagaccccatccctcctaaaaatttaaaaattagtccattgtggtggcatgtgcctgtagtcccagttacttgtgaggctgaggtaggaggatc

SEQ ID NO: 594522 - DNA, 514 bp, Homo sapiens
aaaaaaattttagtagctacctttattaggactagaatgggaagcaggtttgccctaagcagttcctagccttgacttttcttttcggcttagtgattttggggtcccaagatttattttcctttcaccattggtaactagtctcccccatatactactaccactggctcagtctgtctctgctgcttaacaaaatatctgagactgggtaatttacaaggactagaaaattgatttctcagtgatggtggaaaaatttaaattttgccagaatatgtttaaggtgatttattctgagccaatgcgagtgactgcagcctgggttacacaacctcaagaggtcctgagaaagtgtgtctgaggctgttgacactgargattacagtttggttttataaactttaggcagacagcaattgcaggtaaaaatcataaatctattgaagaaagtatacactcgtttagcctgaaaaagcaggacatcttgaaggtgggtcttacaagtcaaaggtgt

SEQ ID NO: 594523 - DNA, 574 bp, Homo sapiens
tttaggctgaagtctcagataccatggagcagagacaagccaatctcactgtgccctgcccaaagtcctaccccacagagcctgggagcaaaataaattattattattgaaatttggagttgattgttttgcaggaatggataaccaaagaaaaccaactctaatagatagagttgttggtgtggtcactctccccaaagacctcttctgaattctcttctctttttccaaactttgatgctcctcctctgggtgagctagtcttttccagggctctaaagacactgagaggctgaagagcctccaaactccatcatttcccaaacctccctatctgcccatagaaatatccagccaatttacaatcaacatattcaaaygcaaaaggactctcttttctgctcccctttccagttttttatttcaatcaatggcagatcacttgtgccagtcatttgttcatcttagaaaccccttccccatctccaattagtcagatttactccaacaaggtctcagtatcctgcttttcctcaagactatctgtgccttttttgtctacttttgttattgc

SEQ ID NO: 594524 - DNA, 655 bp, Homo sapiens
tgaagtatttatttcacttttccttagaataggagaaactagaagagctactctgggatccagtccctgaggaatgcagaaaaaaagattgttgaaaaatgaaaaaacactttgggacgttggggaatgggtggatcacggggtcaggagttcaagaccagcctggccgccatagtgaaacccggtctttactaaaaatacaaaaaaattagctgagcgtgttggcgggcacctataattccagctacttgggaggctgaggcaggagaatcacttgaacctgggaggtggaggttgcaatgagccaatatcatgccactgtactccaggccgggcaacagtgcaagactccgtctcaaaaaaataaataaataaagtaaaaaagccacacacaaaagagaaaagaagggaacacctctgagatgagtggccctaatttgcaatctgacctgggccggcaagaatttgtttatattcytatgttcttcccatttaaaattctccctcttctttccattgcatcattgagataaaagtgctgaggtaggtaccagagacatctcctggctaacactgtgcaccaatttggtctttcagctctcctgcttctcattctagatgctatcttccaaattctctcctttcatgccaaact

SEQ ID NO: 594525 - DNA, 655 bp, Homo sapiens
tgaagtatttatttcacttttccttagaataggagaaactagaagagctactctgggatccagtccctgaggaatgcagaaaaaaagattgttgaaaaatgaaaaaacactttgggacgttggggaatgggtggatcacggggtcaggagttcaagaccagcctggccgccatagtgaaacccggtctttactaaaaatacaaaaaaattagctgagcgtgttggcgggcacctataattccagctacttgggaggctgaggcaggagaatcacttgaacctgggaggtggaggttgcaatgagccaatatcatgccactgtactccaggccgggcaacagtgcaagactccgtctcaaaaaaataaataaataaagtaaaaaagccacacacaaaagagaaaagaagggaacacctctgagatgagtggccctaatttgcaatctgacctgggccggcaagaatttgtttatattcttatgttcttccyatttaaaattctccctcttctttccattgcatcattgagataaaagtgctgaggtaggtaccagagacatctcctggctaacactgtgcaccaatttggtctttcagctctcctgcttctcattctagatgctatcttccaaattctctcctttcatgccaaact

SEQ ID NO: 594526 - DNA, 655 bp, Homo sapiens
tgaagtatttatttcacttttccttagaataggagaaactagaagagctactctgggatccagtccctgaggaatgcagaaaaaaagattgttgaaaaatgaaaaaacactttgggacgttggggaatgggtggatcacggggtcaggagttcaagaccagcctggccgccatagtgaaacccggtctttactaaaaatacaaaaaaattagctgagcgtgttggcgggcacctataattccagctacttgggaggctgaggcaggagaatcacttgaacctgggaggtggaggttgcaatgagccaatatcatgccactgtactccaggccgggcaacagtgcaagactccgtctcaaaaaaataaataaataaagtaaaaaagccacacacaaaagagaaaagaagggaacacctctgagatgagtggccctaatttgcaatctgacctgggccggcaagaatttgtttatattcttatgttcttcccatttaaaattctccctcttctttccattgcatcattgagataaaagtgctgaggkaggtaccagagacatctcctggctaacactgtgcaccaatttggtctttcagctctcctgcttctcattctagatgctatcttccaaattctctcctttcatgccaaact

SEQ ID NO: 594527 - DNA, 538 bp, Homo sapiens
gaaaagttaaggggaagggagatagattatatatttagagaaagagtagtatgcttctgtaaaatcatgtggaatgagaaatattattacagacatcttaaaaaacacagtgtaccacagcttccttctcagtcttccagtattatgaataatattacaatatatacaattgcatacctcctggagaaagtgtttaaatatatttctgtatgaattacaatggcctatcctcccaatatttatacatatatatctgtttacctatttattatctagtaattctaatattttatcaaaaggttgtacacaatgacttacagtmtgtgaaagtttcaatttccaacacaaattactcatactagatttttcacttttttgccacatttatgaaagaaattatttcattggcatagtttgcattttcttggttactatttacgttaggcaaatttaataattattactaactttaatttttctttgtgccatgtttaatatctttcacacttttctccaggttttaaaatcaatatgtaag

SEQ ID NO: 594528 - DNA, 640 bp, Homo sapiens
gtattcatatctgtagatttatagcagattggtgtgttttctgttttagattgcctgttttgtagtagagagatgcttctcaggacgtcgtgggatcacactgttcagactgatttccaacaggcacagcgtggtaaccaaagtctcccctttggctgatgagtgtaaacattscaattgagtgaagtttcaaaactatttttacattacaggtttgggtaatatgggagcaggaaactgtttctattccacacatgcctcagtttactaagcaggaagttaccaagaaactaaagcaaaccagaactcctacaaattcttagagcatatattaaaagagtgagaatttactcacttcaacatcacagatcacttttaccttgcacttcttttaatttacttgtaaattactttttaatttacaaaattacaatcaggttatgtatttttgcccggaatatgacataagacataccatatccttaaagtattacattctgtggcacacaatttacttcatttttactttactggtaatgttgattttaattacatggttaggggattatccagattctgcatgatatagtttgtacatattaaagtgattttacttttagaatcaacatataatttatat

SEQ ID NO: 594529 - DNA, 588 bp, Homo sapiens
aacatagcacgtccttacttatttgtgggtctaaaaatcaaaacaattgaactcatggaaatagatagtagaaggatgattaccagaggctgggaaggataatggggttgggggagaagtggggatggttaatgggtacaaaagaataaataaaaagatgtataagacctactatttcatagcacaatagggtgaccatagtcaataataatttagttctgcattgtaaaacaactaaaagagtagagtataattggattgtttgtaacacaaaggataaatgcttgtggggayagctaccccattctccatgatgtgattattacacattgcatccttgtatcaaaacatctcatgtaccccataaatatatgtacaaaaataaaaaatactataaggggcgtgtttctaccagcatttatgtaatgcaatagaacacaataaaataggatagactaaaacatacattatcacagtatatcacaatttttaatagtaaatattgtttgggaaatcttttatactattcacactgtttatgtgtacatatgtgcatgcatacatgctcatgtatgcacccgtgtgtgt

SEQ ID NO: 594530 - DNA, 588 bp, Homo sapiens
aacatagcacgtccttacttatttgtgggtctaaaaatcaaaacaattgaactcatggaaatagatagtagaaggatgattaccagaggctgggaaggataatggggttgggggagaagtggggatggttaatgggtacaaaagaataaataaaaagatgtataagacctactatttcatagcacaatagggtgaccatagtcaataataatttagttctgcattgtaaaacaactaaaagagtagagtataattggattgtttgtaacacaaaggataaatgcttgtggggacrgctaccccattctccatgatgtgattattacacattgcatccttgtatcaaaacatctcatgtaccccataaatatatgtacaaaaataaaaaatactataaggggcgtgtttctaccagcatttatgtaatgcaatagaacacaataaaataggatagactaaaacatacattatcacagtatatcacaatttttaatagtaaatattgtttgggaaatcttttatactattcacactgtttatgtgtacatatgtgcatgcatacatgctcatgtatgcacccgtgtgtgt

SEQ ID NO: 594531 - DNA, 588 bp, Homo sapiens
aacatagcacgtccttacttatttgtgggtctaaaaatcaaaacaattgaactcatggaaatagatagtagaaggatgattaccagaggctgggaaggataatggggttgggggagaagtggggatggttaatgggtacaaaagaataaataaaaagatgtataagacctactatttcatagcacaatagggtgaccatagtcaataataatttagttctgcattgtaaaacaactaaaagagtagagtataattggattgtttgtaacacaaaggataaatgcttgtggggacagctaccccattctccatgatgtgattattacacattgcatccttgtatcaaaacatctcatgtaccccataaatatatgyacaaaaataaaaaatactataaggggcgtgtttctaccagcatttatgtaatgcaatagaacacaataaaataggatagactaaaacatacattatcacagtatatcacaatttttaatagtaaatattgtttgggaaatcttttatactattcacactgtttatgtgtacatatgtgcatgcatacatgctcatgtatgcacccgtgtgtgt

SEQ ID NO: 594532 - DNA, 550 bp, Homo sapiens
tacgctgcttcatttaaatctttggttaaaatccctgctggacatartggctcatgtctgtggtcccaaaaatttttaggagcccaaggcaggaatatcacttgaggccaggacttcaagaccagactgtgcaatatagtgagacccccatctctccaaaaaacaaaacattaatcccctcctttatcccagcccacgtaattgcctactatttttctgacactttgcccatattcatcaagaactatagtatgtcatcatcttggttcacactgcaaatccagcatttattctgggaacatctaacaaactgttccttgacatctgcaccttctatgatttcacccaccaggattatccagccatttccactgtccactgtcatatgtttgttatttcagcggaggtaaaactacctttaccctcttagggctcccaggctgggcctgagaatttgacataaaataaattaataggagtaaagcataatgatttaatgtaaattttatgtgacacaagatccctcataagaaaatgaatacctgaagaa

SEQ ID NO: 594533 - DNA, 556 bp, Homo sapiens
cattctgttaggataaagactattctttttaagacagaaaatgtcagcttgagctctatcaatttcctacttagtgactcartttctttaaaacagatacatatattatctgcttaatggggaaaagagcttccctacctctacttctgaaaattgtacacctacctctgtcctcagccccatctcctcctgcctcttaaggaaaatttccttttgaaataatccctaatttactatattttttatttcattgttttattttctgcatcagataaacatgttcaaatttaccacatcttcttaaaatgcttcactcacttgtattaccctcattgccatggtaactttctcttaaaagtctaggaaactcccaccacttaattgatatatctcagttagtcatcagtttcaaatttgtcaaagtcaagcaatctcttcagttctcatcatccttggcagagctcagaaatatgacaaagggggccatgcattgctttcctgagatgtgctccttcccagactgctcctattccattgtcttgcatgttttcttctc

SEQ ID NO: 594534 - DNA, 556 bp, Homo sapiens
cattctgttaggataaagactattctttttaagacagaaaatgtcagcttgagctctatcaatttcctacttagtgactcaatttctttaaaacagatacatatattatctgcttaatggggaaaagagcttccctacctctacttctgaaaattgtacacctacctctgtcctcagccccatctcctcctrcctcttaaggaaaatttccttttgaaataatccctaatttactatattttttatttcattgttttattttctgcatcagataaacatgttcaaatttaccacatcttcttaaaatgcttcactcacttgtattaccctcattgccatggtaactttctcttaaaagtctaggaaactcccaccacttaattgatatatctcagttagtcatcagtttcaaatttgtcaaagtcaagcaatctcttcagttctcatcatccttggcagagctcagaaatatgacaaagggggccatgcattgctttcctgagatgtgctccttcccagactgctcctattccattgtcttgcatgttttcttctc

SEQ ID NO: 594535 - DNA, 545 bp, Homo sapiens
agaagaaaagcaagtaagtgtttttcagcctttggggaggcatggtattcaattgattggttcttatagtttagttattgcttcattaactatagyagacaaattattgtggattcaaagctaaagacagacaataccttttattccataagggaaaatctagttatacgttaaagagtctatgtgagtaatactgttatgaaatgtagaagaggactattaaattacctcagtaaagtattagtaatagacagatgactttttaggtcagtaacattttttccccatttttctggagaataattatttattcgttaggtacctttggtaactatttaagcactactttctatttcaattttatatttgctatattctccattcctgtctcatataaaatgatttttaaaacaaaaatttgtcatctactgcttgagtgtattggtgggttcaagattaaaacttggaggttacctatgtatacctgagaactcaacagctaaattatggcttgttagaaaacttgttagcattttaaacaattt

SEQ ID NO: 594536 - DNA, 486 bp, Homo sapiens
ttccacttctttcctaactatgcatttcatacctaccctttggagttgatcttgaaagaaaattaatgggctccttattcagtattgcartgtttcaggtagcaaatgcatgacagctacttaaccaacccctgagtagccaaccagtgagtatggcgttaatgattttggagaaagttaactaagtgcatctatcactttgtcatgtgtggtaaaagaatacatcaatcaaaggttaagagggaactgtctttgcttcagtctgtgggtactactaaaatctgttacaaaaatcaatagaacaggtatggtaagctgcatttatgctgattaaataaaacaaatggaaaaacagaaggtaggaggctggtaatatagctcctagaataaagcagaggtcagtttcctgatataggaaccatccttatgagcttgatattccggagaagtatttccactgtcagtgtcttataaaggttgaaccag

SEQ ID NO: 594537 - DNA, 567 bp, Homo sapiens
ttgaattacaccacccactctcgttctccagctcactgatggcagaccatgggctttctcagcctccataatttcttgagacaatacccataaaaaatctcctcttgtatatttatatattggttctctttttctagagaacactaatacaagatccaatgataaaggtaattgctccagatgctagaagcaaaattwaaatagaagaaatgtgagtttttccatcaatgttaagaggaaaacagaaagagagagagagcctttagtcatgtagaattaagagacttaaccaagtctttggaattagagtgttcagcaccactagaatggaaatttgagactcacatttctcatttaaataattctcttggagacttagaatgtagaatttacacaaaagataccatccagtttatttccataaaagatctgagtatcctgtttgaggaaaatattagagaagacacagacattcttacaatgactaggtctatatgttatagaccattaagagtttaatttgttttgtactatttgaaatgtagcaccatgctagaatattatttt

SEQ ID NO: 594538 - DNA, 385 bp, Homo sapiens
atctcctatgactttgtataggtgtctttgttgctctgtggagaaaaacgtactgagttttattttatttatttatttatttatttttttatttttatttttattttttacatttctttgaaawtttttcttttatttttcttttttttttttaattatactttaagttttagggtacatgtgcacattgtgcaggttagttacatatgtatacatgtgccatgctggtgcgctgcacccactaactggagatggagtttcgctcttgttgcccagactggagtgcagtggcagtgatctcggctcagtgcaacctctgtcttccagtttcaagtgattctcctgcctcagccttccgagtagctgggattacaggtgccccacc

SEQ ID NO: 594539 - DNA, 561 bp, Homo sapiens
atattatttattgtcttatttgtagaatatttatttgttttcaaaattattcctattttttaatccataatatgctgtttctgtcttttagagtctattcacccttataatcagttagccatttcacttgtaattcagatcattctattgtctcaaggacaagkcttcaaatattctcatgtgtttcatgtactgactttccattggggtggtttctttccctcattctttccctgatttctttcccatgtctatatgttaggagtggcttttgaatcagctcagacctccatattgagcagataatatatgctagattgtttgaaaccactttcaaaatgaccagccaaaattcagttacagctctttggctagactctgaaaggacatagccagaagtgtactcaccctcaccctcataaatgtcaagcttccgaaaaccctctttttcacgggctgcattcacagtcctgtaaaattttttaaaaaatgaggtgttttatgtggttttcttaaaaaaaaaaaaaaaaaagaccccttctctccaattgtataagtttc

SEQ ID NO: 594540 - DNA, 627 bp, Homo sapiens
attaagcaaatgttctgatttttcaaaatgagtagagaaaagatgtcatttgagaaaattacagtcaggggaggagagactattctagcaaaactctaaataatcaaagaacatgaatggattttcttaagtatatrgaaatttttataatatagttgaactcaactacagtagataatgacaaacttgactcattcatctattggatgaaatggctaagaggctcttaggtagcagtagatacactgtattaacaccaagacacaggatatcatgcgaatttctatacaagataaaaaacaagatgctttgaagcagttttcttattcagttctgttgaaacctgggtaagctgctgctggaatgccatgtagctctgtttaaggtttttaactgatatctggggtatttgggtgtattttttttcccaaatttaaaagcattaaagcagatttttcaaacttgtaagtgaagcagctggaggacaagctaatttagtaggcaacaaaatcaacattcatttatttaggtcaaaacaagagaccaaattagaaacgatcataaaagccttctctttgatgtccaagaatttagtgtagaacattggttatatacagcatttgtcaa

SEQ ID NO: 594541 - DNA, 572 bp, Homo sapiens
ttgctgcaaatgacaggatctcattcttttttatggctgagttttactccattgtgtatatgtaccacattttctttatccattcttctgttaacagacacttaggttacttaaaatgtctagaatagccaattttggctattctgaatagtgctgcaataacacaggagtgcagatatgctctttgatcaactgatttcctttcttttaggttatataactagcagtgggattgttgaaccatatggtagctctagttttagttttggaggaacctcaaaagtgttctcaatagtggtagtactaatttgcattcccaccaacactggagaaatgtacccttttatccacatcctcaccagtattttttattgcctgtcttttcaataagagccattttaattggggtaagataatatctctcgtaattttgagttacatttstatgatgaccagtaatgttgagcactttttcagatacctgtttgctatttgtatatcttattttgagaaatgtctatttcaatttttacccacttaaaaatcagattattagatttttttcctattga

SEQ ID NO: 594542 - DNA, 572 bp, Homo sapiens
ttgctgcaaatgacaggatctcattcttttttatggctgagttttactccattgtgtatatgtaccacattttctttatccattcttctgttaacagacacttaggttacttaaaatgtctagaatagccaattttggctattctgaatagtgctgcaataacacaggagtgcagatatgctctttgatcaactgatttcctttcttttaggttatataactagcagtgggattgttgaaccatatggtagctctagttttagttttggaggaacctcaaaagtgttctcaatagtggtagtactaatttgcattcccaccaacactggagaaatgtacccttttatccacatcctcaccagtattttttattgcctgtcttttcaataagagccattttaattggggtaagataatatctctcgtaattttgagttacatttgtmtgatgaccagtaatgttgagcactttttcagatacctgtttgctatttgtatatcttattttgagaaatgtctatttcaatttttacccacttaaaaatcagattattagatttttttcctattga

SEQ ID NO: 594543 - DNA, 533 bp, Homo sapiens
tcagggcagcaggttcccttttgaccctgggtgtgcctaatgatactgtgtgggagctagggcctggaatgggggtttcagaactctgcttggtgcttcatcttactgtggctgagctcttatccaagttgcaagacaaagtcctttttactctcttctctcctttcctggaggggaagaaaggagtctctctaggagcggcaagctatgatgccttaggttgggggaggggtgacacaagcactcccttggctgccccagccggtgtctctctgggttacctgcaccccaagtccaccggctccaaacccagcacagcaccaagacttgcccaggaattgcygtccatgtggcctaggctgcctttcaactttacttagcactccagagtgctttagcccgtggtggtaggtctaggagggactcaagttgcagcggctggattgcatgattctcctctagttaggactgatctaaatgtttcctctgtaagtgctggctggatgctgccctgtgtagctttctcctgtgac

SEQ ID NO: 594544 - DNA, 626 bp, Homo sapiens
tactcattgtctctcctgatggcctctggagagatgcctttgccatgattgtragtttcctgaggcttcctagccatgtggaactgtgagtcaattaaacgtcttttctgtataaattacccagtcttggatatttcttcatagcagtgtgagaacggactagcacaagcatatttccaaaatacattctgacagtcatttaagattcatttcagaaagactataatcttgcaatagacattacctaactttttgctaagaaaatacattttcaaactcttcatcctttggtgtgaccaggttcagagatgtcccttcatgtatcttgtgtttatattgcaattttgagtataatgggatcaactacatgaattaaagacagaaataggaagcaggtttcaaaaaacataatttaagaacatataatggaggaataattgtaggagcttattctttatattccagttttattagccaagtaaaacgatttccttactctgtcactttttagtcataccaagaatgttgtcagtatttctcaaattattgtgcagatttagaagaatccacgttatagtgcaattttgagtctcttaaaagaaaaacaaggatcttaaaccaaaggc

SEQ ID NO: 594545 - DNA, 459 bp, Homo sapiens
ggatttctaatatatttccccctasttatattttacttgtaggaaaactataatagattaaagagctcagagaaaatgccactgtttgagatatttggaaaattattcatttaagaattctatcaattctggattaatatcagcaaccagctcctctttgctgtactaagtgaatgtaatcaaagtagcagccagaagcaaagaaaacagctcacaaggaagtattgtattagactaacatggcaccatgaatttgtccttggggtacaaatagatttttttaaaaggggagagggaaaatcaagtactattgtgtctgatagtacttgctgatagaagtctaatggttaagaacaaggaaactgtcctgactttaccccttatcccttttgtaaacttctataggcttgatttatctgtgtctcagcctttttgtctgagagatggacataatagttt

SEQ ID NO: 594546 - DNA, 564 bp, Homo sapiens
ctttgcaaaagaagattgatatactcaatcagttctgaaaaagactgtaaactgtggagtgttcatttttgtggtaatctttcactgtttgtcagttttcttcctttcactccctttaattaaattatgtgacttgtgttggtctttgaaacttgaggtgtgtcrttttctggaggaaacgtcaactgctggagcagggtttgccatgttactttctctctgccacattacctgccaatgtggtaaaagctctatgaaatgtggtccttgagggaggacaatgaggaacagagcatagtccacatagaacagacaggtagaatgagtgagaaataactttgctatttatattgatcagctattgttaaataagggtgcaagaacaaagaaccccaaatttttagtggtctacaataacaaccgcttatttttctctcatgttacatgatggtttgggtcagccccaactctgaatctctactttagaagtactctccatccaaggatgtagacttaggaagcagcccctgttttgccctaatgctaacgagaaaagagggtgaa

SEQ ID NO: 594547 - DNA, 564 bp, Homo sapiens
ctttgcaaaagaagattgatatactcaatcagttctgaaaaagactgtaaactgtggagtgttcatttttgtggtaatctttcactgtttgtcagttttcttcctttcactccctttaattaaattatgtgacttgtgttggtctttgaaacttgaggtgtgtcgttttctggaggaaacgtcaactgctggagcagggtttgccatgttactttctctctgccacattacctgccaatgtggtaaaagctctatgaaatgtggtccttgagggaggacaatgaggaacagagcatagtccacatagaacagacaggtagaatgagtgagaaataactttgctatttatattgatcagctattgttaaataagggtgcaagaacaaagaaccccaaatttttagtggtctacaataacaaccgcttatttttctctcatgttacatgatggtttgggtcagccccaamtctgaatctctactttagaagtactctccatccaaggatgtagacttaggaagcagcccctgttttgccctaatgctaacgagaaaagagggtgaa

SEQ ID NO: 594548 - DNA, 435 bp, Homo sapiens
ccaggtggtcctaaggtagtcaggacatgtgctgaatatctggctgtgaggacccaacagaacaagggcaatcctgtctggccctcctcctcttcaactcaattaggatttcttctactattctgagcttttactatcatagctaaaattctgtgactatatgaaagtcaaggaaactasttttacccagaaacaatttaacagctacaacaattgttctcttcagcatctagaaatcatgttattaacctaaatttattagctaggaatattgtcactatgaaaggaagcactctgagtttctattttccttaatcagaaagttatgctttttcttttctaaacctattttttcaaatattttactttaaaataatttcacttttttggtaatgatttcaattttttttattttgaaagaattttagacttaga

SEQ ID NO: 594549 - DNA, 590 bp, Homo sapiens
attttcacatatgttttaaatgatattttacaaacaaaatggaggtcgaggctgtagtaagtcatgatcacacaccactgcactccagcctaagtgacagagagagaccctatctctctaaaaattaaataaataaaaaatgaagacaaaatttaatctgttttatttttctctattgagaaagggactggattatgttgatataaatggaattagcttaaggtttctttgtgttttcttttttaatacaaaacaattttgaattacattactgtgttcaaaatagggaaacaatgacaattactatttcccaattgctttaaagcattggacatgtagatggtaaagcattcacttattttcagatgaaccagtaagtaaacaggtaaagcaatttatagattattaaagttaactaaataaatggtgttgaggaagtaggaaagacaacaggttggagcatctgaaaagtttcattgaggaagtgaagattgagattggcacaaaagcatkggcagaacttgaatcccctaaagaaggagaaataaaattgatgatttaggaacaatttaaaaaataaagggattcaa

SEQ ID NO: 594550 - DNA, 381 bp, Homo sapiens
aagctgggaccttcatctccaccagtaagtaataaagtcctactccctttggtgtcagtggaaaaaatgtgggaagcttggattttcactctcacctggcagtcatgaggtgcttctctccatctgtccggggagctatccaaaaaggccgagcggagaagaggaacttttgccattccgcagtggtaatgaggccaccaccactgtagtgttggtagagatcatatgggtagccagaacttccaccctggtccagtgataacagagactatatgtgaggtttcagtggaggtcagacgycaagtagaaaacctggacttctatctctacctggttagtaaggcagcatcacctgcctcctccgcttacatcccccgacaa

SEQ ID NO: 594551 - DNA, 423 bp, Homo sapiens
actttttaaaagaggaatacaacagaaaacacattttaatttttaaaaaaaaatttaaaaaaagcaaaataaattaattataaacatggaaatatgtcagtatcactcataatttaaaacatgcttataagacataatgaaatagatgtttaattctataagtaagattggaaaaactgaaacagaaatatacaacattgatgcagtctaagaaaatgcagaatttcatacactgttggttagaaaagagaatgacacacttccttgtaagacagtttaatgttatctatcaaatttattatgtctatagcccttcactttacaattctgttttcagaagtttatcctgaatgamgtgtataaaatgtatgaaaagaagtatttataggaataatcattacagcattaatttcagtatttata

SEQ ID NO: 594552 - DNA, 679 bp, Homo sapiens
gtaagtggttaaaccttatcaaatttgacatttgatcaaatttgatccttatcaaatttgacattcttttagcatttggactgattactctctcctggatcctctttcctctgttggttgcatgaaacttaccttttttggttcctggaagatttttcttgctttcataaataaactattatttctctatttatattacatgttggtattccttgtggttccatttttagtacccttcttaggcattttccaggtgatctcatttaatctgttggcttaaactataatatgtaagtctcaacatatcctgccaaagtttctagtttgattttcaaatctataggcacaattactgttcttcttcatctggatagcccagagattatttccaaaacaaattcattggcatgtccttccagaacaatttgttctcttttctctktcttaaaaggtatccttcacttagttgcttgagccaaagccatgatgttcacctttgatttcttactacatcttctcctcatttgctgtgatagtcaatcatcaagtaacattgattttacttgcttaaaattctttagcttccattctctttcctctacgttcactactcctccttccttttggaatatatcttcttgtatgcagattattataatagtctcttaagtggtttccc

SEQ ID NO: 594553 - DNA, 556 bp, Homo sapiens
aggcaatgtaggctgggcagggtggctcacacctgtaatcctagcactttgagaggccaaggcaggaggatcacttgaagtcaagagatagagatgagcctggccaacaaagtgacacagtgtctctacaaaaataaaaataaaaaaattagctgggcacagtggagtgcacctgtagttctagctattaggaggctgaagtgggagggttgcatgagcccagtagttagactttgcagtgagctatgayggtaccactgcactgaagcctgagtgacagtgtgagagaccctgtcaaaagaaagaaagaaacagagagagagagagaaggaaggaaggaaggaaggaaggaaggaaggaaggaaggaaggagagaaggaaagaaatagtcaaatagacaaataggcaatgttacccttttggagaagcacttttgtttttgcagaagattttaattctgtaattgctttaaagtcaatgatatataggaaatatcactagtaatggctgacactgaaatcactgctatatccattaagctgtatttcttgctctt

SEQ ID NO: 594554 - DNA, 432 bp, Homo sapiens
ttgcatgaaacctaatctttgtttcatgatactcatcatctatgcttggtttgtcatttgtaatatgcttaataatgtactaaataccttgacagttacatcttttagtctcctttgctgaattcactcctggtcccaacctaagaaccactcagttatgaatctattcaagcatttatatctgataagtttacttgaatagaagtatataggattattaactgaagccagagagacaaaygaggaaactactgcaataatctaggcaagacataatgagaattttaattttgtcactatcattagaaataggaaagcagtcaccagaatctaaagaaacagaatttgggattggccttgcctgtaagtacagccttagttttctcaggtttttctttttcttttcttttcttttttttttttttttttttt

SEQ ID NO: 594555 - DNA, 382 bp, Homo sapiens
aatctattcaagcatttatatctgataagtttacttgaatagaagtatataggattattaactgaagccagagagacaaacgaggaaactactgcaataatctaggcaagacataatgagaattttaattttgtcactatcattagaaataggaaagcagtcaccagaatctaaagaaacagaatttkggattggccttgcctgtaagtacagccttagttttctcaggtttttctttttcttttcttttctttttttttttttttttttttttttttgagacagtctcgctctgtcattcaggctggagtgcagtgacatgatctcatctcactgcaacctctgcctcctgggttccagcgattctcctgcttcagtctcc

SEQ ID NO: 594556 - DNA, 453 bp, Homo sapiens
gaattcaagctaatcatactcaggttaagaaaattcatcctcagattctttttttaattattattttgataggagtctcactctgtttcccaggctggagtgcagtggccggatctcggctcactgcaacctccacctcttggcttcaagcgattcccattcttcagcctcccaagctactgrgattacaggtgcatgcccacacactcagctaagttttgtattttttttagtagagatgggatttcaccttgttgaccaggctggtctcaaactgctgacctcaggtgatccacccacctcagcctccaaaagtgctgggattacatgcgtgagccaccattctaggcccatccttggattctttttttcagttttttgaccctagataaattacttaaacttgttgagcttcagagtacttacctgcaaaacaggaataatagctacttt

SEQ ID NO: 594557 - DNA, 517 bp, Homo sapiens
  misc_feature 234: n = A,T,C or G
gtttttgttttgtttttgtttggtttggtttggtttggtttttctgagacagaattttgctcttgttgcccaggctggagtgcagtggtgcartctcagttccctgcaacctccgcctcttgggttcaagcaattctccctgcctcggcctcccgagtagctgagattacaggtgcccaccaccacacccagctaatttttgtacttcttagtagagatggggtttcacatgtntggcccggctggtcttgaatgcctgacctcaggtaatccacctactttggcctcccatagtgttgggattaaaggcgtcagccaccgcgcccggcccagtcagcaataattttttgttgtacattttatatacattttagaatagctgagggagtacaattggaaagtttgtaacaaagaaatgataaatgcttgaggtaatgcataccccatttaccgtggtgtgattacacattttatgcttgtatcaaaatattttataaatatatacacttacctcatc

SEQ ID NO: 594558 - DNA, 517 bp, Homo sapiens
  misc_feature 234: n = A,T,C or G
gtttttgttttgtttttgtttggtttggtttggtttggtttttctgagacagaattttgctcttgttgcccaggctggagtgcagtggtgcaatctcagttccctgcaacctccgcctcttgggttcaagcaattctccctgcctcggcctcccgagtagctgagattacaggtgcccaccaccacacccagctaatttttgtacttcttagtagagatggggtttcacatgtntggcccggctggtcttgaatgcctgacctcaggtaatccacctactttggcctcccawagtgttgggattaaaggcgtcagccaccgcgcccggcccagtcagcaataattttttgttgtacattttatatacattttagaatagctgagggagtacaattggaaagtttgtaacaaagaaatgataaatgcttgaggtaatgcataccccatttaccgtggtgtgattacacattttatgcttgtatcaaaatattttataaatatatacacttacctcatc

SEQ ID NO: 594559 - DNA, 641 bp, Homo sapiens
ctagactgcatttcagtttatatgacaagaagatatgattttacagatttggcctcggacataagtcaatgccttgtatttttatttaacatttcttttgactaattttatagtaatgaagatgttgatttatattcttaatccatgttaagtagctgacaaggtattttttctatattaagttccaagcagattccttctgaagccagtgccaatggcaaagttcatcaggcgggtggtattcttggcagcaccacaggacgtcctatccctgggctttgtagccctgtagaacagttaatctggacttgattcctttatatttaagataattaatattcaattttttagaattaggtaatccctgaaaaaacagtacaatagcaggtgatagtttcttatgtctctgatcatattccatgttaaaaactaaaaatttttcagtctggtygataatgttataagacttgcaaatgtttctaaaaacttttatctacaaagcagtaatggaaagtacatgtgaaatgctcaaatttgtatgtatgaaatgaattaagaaacagtgttaaaatagtgcttacatcatgttcctaaggcctgtgaaattctaaacccagaactatgactgttaacagaagagg

SEQ ID NO: 594560 - DNA, 506 bp, Homo sapiens
ctatacattttctcttttttctgttttcttcacccacttttactacattttattgtgtacatttttgcaggrtgccttaaattccttctttcctttagagaatgttacagaatgcattcattcatgcaggtaatgaacaaaataatctgagtagttcttgaattggagcaatcttcttaatttaatggaaaaaaggagtatgttgactgctgaatgtgttactccatgggtttcagtaaatgtgacttcaataaaaagtgttatttggtgttaagtgtcaaatgtagacatccgggaaatctatataaaatagattcaggagagaatacaaagaaaaatttataacttgagagcttttttctaaaagctctctaattttaaatacatattattataaaaattcactgatttataaagattattatcctaccgtagcatggttaaaatcatacttatgtgtaaatattgatagtttccaaagcttgaactttttatatgaacacagg

SEQ ID NO: 594561 - DNA, 506 bp, Homo sapiens
ctatacattttctcttttttctgttttcttcacccacttttactacattttattgtgtacatttttgcaggatgccttaaattccttctttcctttagagaatgttacagaatgcattcattcatgcaggtaatgaacaaaataatctgagtagttcttgaattggagcaatcttcttaatttaatggaaaaaaggagtatgttgactgctgaatgtgttactccatgggtttcagtaaatgtgacttcaataaaaagtgttatttggtgttaagtgtcaaatgtagacatccgggaaatctatataaaatagattcaggagagaatacaaagaaaaatttataacttgagagcttttttctaaaagctctctaattttaaatacatattattataaaaattcactgatttataaagattattatcctmccgtagcatggttaaaatcatacttatgtgtaaatattgatagtttccaaagcttgaactttttatatgaacacagg

SEQ ID NO: 594562 - DNA, 632 bp, Homo sapiens
ttacatagttttgctatatgcttccacttctggctcgttcacatggtctgcatagggatcgtttgtaattattttgctaacattacatagtgagagcccatagcttcttcagatcactacataaattacaaggtattgttaaaatgaaagataaaattatgtgattataatttaaatactcttcattgagtcatgcctgatcatatttattataactttgttataataaaaaatatatatgtttatatataataaaaataaaatataaccttattatatctttgttatgatagacacaataatgaccatgttcatcacttcagtgcacattttaaaaatgtgcttaactacaggagctagggtatatattttttccttagtgtgtatgaaatctataatcttaacatccattatcaagatctaaarttcttgatgctaacatatttaactttttgtttattagatccaaaagaattagaattaaatttccaaattacactagttttttcaaacttttgattaaactgttaaaaaagcaaatgaggactgtgtttcaaactgtgcttttagtagaataaattttatttcagcctgtagattataatgataatgatgacaacaacagtacaaat

SEQ ID NO: 594563 - DNA, 560 bp, Homo sapiens
tactctgtattgtatgagacagagattggaaaatgtaagatttttttgtcctttcagctggacctaggagaacagtgaccaaagggcagatggtatctcagtttcatcatctttcaaatgtaagcartaattgtccttacttcatccaagtgttgtgtagaatagatactatgtgttaagggcataggtttgttactgggaaaaacctgattatgtcgatgaccagtttccttacaacctaatatttatggcagtgattttcaactcaggtagcaagtgagaacatcccatggagatttttggagccacaaatacctgggctctgctttagtcctatcaaatcagaatttctcttgctgaagtcagagtttcagagtcctaggggtgatttatcctatcaataatgactaagcatatgctagggatactactgtatttactaaaacttatttatgattaaagtaatatgaaagttatttatgattactcaaaatacaatagtaacagatgtgtactattaaattagataaattcacagatttaaaaataactactatatt

SEQ ID NO: 594564 - DNA, 560 bp, Homo sapiens
tactctgtattgtatgagacagagattggaaaatgtaagatttttttgtcctttcagctggacctaggagaacagtgaccaaagggcagatggtatctcagtttcatcatctttcaaatgtaagcagtaattgtccttacttcatccaagtgttgtgtagaatagataytatgtgttaagggcataggtttgttactgggaaaaacctgattatgtcgatgaccagtttccttacaacctaatatttatggcagtgattttcaactcaggtagcaagtgagaacatcccatggagatttttggagccacaaatacctgggctctgctttagtcctatcaaatcagaatttctcttgctgaagtcagagtttcagagtcctaggggtgatttatcctatcaataatgactaagcatatgctagggatactactgtatttactaaaacttatttatgattaaagtaatatgaaagttatttatgattactcaaaatacaatagtaacagatgtgtactattaaattagataaattcacagatttaaaaataactactatatt

SEQ ID NO: 594565 - DNA, 585 bp, Homo sapiens
gacacttcttcaaaggccttccctgatcccccaaacaaaagtaaatccttctctcttagtcttaatatcggaccctggctttgcaatgcacttttattctaatttgcaattatgttgtttgtctgctcatttgtttttgtcagcctttcccactaaaaacttaygttccacaagggcagggactctgtctttaactctgcagcccctgagcctagcacaatgcctggcacatactggcctgcgaaatgtgtgtggaatcaatacataaaaggaaggaggtcagcacctactaggaaccacgtagatatggaccgctaaaggcgagtttccgtaacaggacctctgaaaagaggtgggaacgacagaaatgaaaatgggaataaattctgcttgttccttccaccttcgtttcatttttgtggttcctagaaacaacgagcacatcaactgcctgatattagagctgagctgctaaccaccccctcttcctgttctcacaaaccccattcctgactcctctctctcttgtccccagtgagaggtggcccattcaaaccaccacctcccacctgtgcttcaaaaatg

SEQ ID NO: 594566 - DNA, 555 bp, Homo sapiens
ttaacaagtgggagacatcatcattaggaaatccaatagctggctacgctaatgtcctaaccccaccctcttgggattagtttcacagaaggagacaacttctggtgtgtaaactgtggtttccatcagcatgcactttggtaatagcctccctgcaaaactgttgcttgcccttgcttttttgtttatattttagattctgtttgtttgctgagcctgctattaatccttattttaaaccagatttcatttctgtaagaatattaggctgagaagcccactcatgagatcagctattccaaactcgtatctgtctctctaaacatgagcccaaataatgtagaagataggaccacataactaatttgagacttgtactttaacttgattgtggtttgattaatttggatgagagcagaaaaactcactagtgtaaaatataatgattctaagtatgttattttcctaatgaatgcttgaagttacttaagtagtagaaacttaagttayttaaatttatcttgggtgtatttcatggggttatattccaagctt

SEQ ID NO: 594567 - DNA, 555 bp, Homo sapiens
ttaacaagtgggagacatcatcattaggaaatccaatagctggctacgctaatgtcctaaccccaccctcttgggattagtttcacagaaggagacaacttctggtgtgtaaactgtggtttccatcagcatgcactttggtaatagcctccctgcaaaactgttgcttgcccttgcttttttgtttatattttagattctgtttgtttgctgagcctgctattaatccttattttaaaccagatttcatttctgtaagaatattaggctgagaagcccactcatgagatcagctattccaaactcgtatctgtctctctaaacatgagcccaaataatgtagaagataggaccacataactaatttgagacttgtactttaacttgattgtggtttgattaatttggatgagagcagaaaaactcactagtgtaaaatataatgattctaagtatgttattttcctaatgaatgcttgaagttacttaagtagtagaaacttaagttacttaaatttatcttgggygtatttcatggggttatattccaagctt

SEQ ID NO: 594568 - DNA, 555 bp, Homo sapiens
ttaacaagtgggagacatcatcattaggaaatccaatagctggctacgctaatgtcctaaccccaccctcttgggattagtttcacagaaggagacaacttctggtgtgtaaactgtggtttccatcagcatgcactttggtaatagcctccctgcaaaactgttgcttgcccttgcttttttgtttatattttagattctgtttgtttgctgagcctgctattaatccttattttaaaccagatttcatttctgtaagaatattaggctgagaagcccactcatgagatcagctattccaaactcgtatctgtctctctaaacatgagcccaaataatgtagaagataggaccacataactaatttgagacttgtactttaacttgattgtggtttgattaatttggatgagagcagaaaaactcactagtgtaaaatataatgattctaagtatgttattttcctaatgaatgcttgaagttacttaagtagtagaaacttaagttacttaaatttatcttgggtgtatttcrtggggttatattccaagctt

SEQ ID NO: 594569 - DNA, 585 bp, Homo sapiens
atattcaagctactagcttccattattatggctgaaagaccacaaggaaaaaactgtggaatcatttatgtgtcaagacggagggcatcatgtacagatctgggcaggaagaggcaaggttgatccaattatccaactaatatgaccagcagtactttgccataaaacccatacattatagagttatatatccattacattagtaataaatttatgttagtccacaaayatattatcatttttaagagcagtaccaccattaacaagagcatgtagagctctgagccagatgcagcatatttgctctattttcttaatcatataccataaaaacagggcacatatgaaatttttttaaatgttagaaatccttagcctagtgccagatcaatagtattaaaaatgctatgagaaactatggcgatgacatctccaaatgttaagataatctcaaaggcttcatggacaaaataaaatttgagctggcttttgagggtattacaagttcggcaaaaggtgagaatgtacaccatgtctaaagatcataatgtagactcttttggttagaaaagttttcacataaca

SEQ ID NO: 594570 - DNA, 474 bp, Homo sapiens
gcagtaggataaaagacaagctccttagaagaaatgaccaagaatctaataatagttggaagatattcatgagctacccgagaattatgaaagagcagagtggttaagtttttaatagatgatgtctttggaagcaatgacaatgttagatatatacttcaaagaaggatggtgggtaataatgagaaagcacctgctctgaataatctgtttcaggagtagaaaaaatgggcttctatagaagctgaagtaattgagcctgtattgcatagtggatttagtcctcatctttcttttttattctacatttttgtgtgtacataataggtacatatatttatgagttacatgagatattttgacataggcatgcaatacatcatrgagaatggggtatccatcccctcaagcatttatactttgtgttataagaatccaattatactcttagttatttaaaaatgtacaattaag

SEQ ID NO: 594571 - DNA, 454 bp, Homo sapiens
taaaggaaatcttcaaaaataaaactgtctagtgaagataaaagcatataatgtaggatctgcagcagcagccatcattagctattgctcttccctacgaactgaaaaaaagctgcagacttccataccaactgacagaatgattgcttccatcccaagcctctgtggtgcagatgtaaatagtaaagtcatgtaaatagcattaagggaaaatttcaacattctctacatttatcacatttcytcattttagagaattcatgagtattaaatgggttattatgaaaaatgttcattctcagtgatcatcagagtgtggcgaaattcatggtgatgagattaatgtctgttacctctgttttttccacaagtgcaccactgagctttagtgtacatttttcttgtttgttttcctctttgccattccactccagtcacacaggcttcctgcaat

SEQ ID NO: 594572 - DNA, 522 bp, Homo sapiens
taatgaaaatatagcttcagaataaactttcaaatatctggcatttaccctcccagtgagctttttttttatgaaatgccataaaaatcaacttaaacataggaaataatacagtcacattatgtagaaatgtttttaatgggttgtttaattatcaggttttagtgtaagcaaagaaaatctaaaataacagtgttttatgttagataagaatttatttcttytcacccaaaggctgaaaattcaggaggtgtagggctactaggagcctgagggtataggaaatccagacatattctatcttgatactgcataacatgtagtcttcttaaggtcacctcatattctaagatagttgttgcggcagtagtcatcatatttgcattccaaccaagacgaaggaggaagagcaatgggcatgttcacattccataaggaaaatttataaattgcacattcaagacttctgcttacatcccatttgccagaaatctatcccttggtgacacctaactgcaagga

SEQ ID NO: 594573 - DNA, 571 bp, Homo sapiens
attatatgtaaagaggcaatttcagcatagttttataaattttctgatgggataagtaaaggcttcaaggggaactttgggagaaatgcctaattcaatctggtggctttgagggaggatttgtatagaagatatctatctgggcaaatgaaagaagagtaggcattagcctggtaaagaagttggcaagatggggatagggtattacatggagaggggccagtttctgcaaaggctggaataggattctgcctggagtatttgaaatactgtgagggttcagtttggcctgaatgttgagatggaagaaaacatgagtcagatcattaagctttttaaaatcatgttgagaatcttgagcttccatctgttgatgatcaaaagacattgaagatattgatttccatttcagaatgatccctaggtctgtggaatggattgagattgagacggagcagaattgaaagcagtttgatttgttctaagactaaagaaaatgataactcaaatctagatgatagctaggcttcaygtatacacaagtagaactgaatgggagtagtgatttatg

SEQ ID NO: 594574 - DNA, 658 bp, Homo sapiens
tttatacaatttggaatatgtttcattgcaaaaaatagaaaacccaaattatggtagcttaaacaaagagaagtctagtttacttaataaaataagaaasgcagaggcatgcaaaaatctagcattgggaactcaggatcttttcatctttcctctcaaaactgttttatgtattggcttttatcctcatctcatggtaacaatggaactcctctagtttgaaacacaatttccatgttcttgtgaggagaaaaaggagagagaagaaagagggaacaccagccctattctctctattatcaggaaaaacaaaaagagccttccttaagcctccagtagatgcctatttttttttctcattggctgaaacagatggcatagatactcctagctgcaagggagccagggacaatgagtatctcaccagggttaggaactctcacttgccaaaaaaattatagatttgttttagacaaagaaaatgagaaaagatattcggtgtgtgccccaggttatgtttaatacttagaagaatactgccaattgggtattttctccatttacttttgaggaaactgaggcacacagaatttaaattatatgttgcaagggctcacaattggtaagtaccagctgtaactcatggcatgcaggccaa

SEQ ID NO: 594575 - DNA, 658 bp, Homo sapiens
tttatacaatttggaatatgtttcattgcaaaaaatagaaaacccaaattatggtagcttaaacaaagagaagtctagtttacttaataaaataagaaacscagaggcatgcaaaaatctagcattgggaactcaggatcttttcatctttcctctcaaaactgttttatgtattggcttttatcctcatctcatggtaacaatggaactcctctagtttgaaacacaatttccatgttcttgtgaggagaaaaaggagagagaagaaagagggaacaccagccctattctctctattatcaggaaaaacaaaaagagccttccttaagcctccagtagatgcctatttttttttctcattggctgaaacagatggcatagatactcctagctgcaagggagccagggacaatgagtatctcaccagggttaggaactctcacttgccaaaaaaattatagatttgttttagacaaagaaaatgagaaaagatattcggtgtgtgccccaggttatgtttaatacttagaagaatactgccaattgggtattttctccatttacttttgaggaaactgaggcacacagaatttaaattatatgttgcaagggctcacaattggtaagtaccagctgtaactcatggcatgcaggccaa

SEQ ID NO: 594576 - DNA, 567 bp, Homo sapiens
agagtgattcttataaaacatgatagattatgtcactggtctattcagcatcttccaaagtctttccagctcacatagaatgaagctcaatctatttgcactgaccaagaagacctgacttcatcccctaggattttgctgacctcagctcytactaccttgccactcattcaacttcagtcacactggcctccttggtttactcaagattcttcctgccagagagtctctcacctcaacccctttgcacatgctgcttctctgcagtgctcttccagtatctaggtggcttgcttcctaggaaccatgggctcctactttattttttgccgtcacgcttgttgtccagtcacatacttgatgtttcatttattgcctgctacggtcaaataaactttaaactccctaaaggcagaaatttttgtctgaatttttcactgatagtctacattccctaaaatagtacctggaatctagtacacgctcaataaatatgtctcgtgtaagtgagtgtacactagtccctccagtcatagatagatacagtcaatcggatggcccacgttc

SEQ ID NO: 594577 - DNA, 598 bp, Homo sapiens
tgggctgctgctgccatcaaaagtaacgatggagatgttcctgtcttggattaatccaataatttttaaatgaggcacagtcagcccttcctatttgtatgttccacatctggggattcaacaagacaatattctaacaaaagacagacaatattctaaaataatgatagtgaataatgcaaaatttgaaaatcagtataattatttatatagcattaacattatattaagtattgtcagtaactagagatgttttaaagtatatgggaggatgtgtkcaggcttatgcaaatactacaccattttatagaagggatttgagcatcctcagattttggtatctgcagaaggtcctagaactaatctcccacatccccataccctcctccctaataaatagtgaacacaatggaaggcataattatgtaaacaaattttgggtggaatttttattgtatttgaagcatattcctagattactttttctgtgctcatttggccccttttaatcaactttgcttcaatatgaataagaaaagaagtttctctacctttcagaaccactttttcagtcctgcagcttccaaagcaatgtaga

SEQ ID NO: 594578 - DNA, 493 bp, Homo sapiens
cccgtctccagcacccatcctacaatacacctgctgtaaaacaagagtgggaagggattttagagakacaagcacagtgttcacgcacaaacccattgtttggagcagcacttcgcagagtatgttgccccaaatatgaggcttctaaagtgttccacaaggagaatgtttatgagataaaagttctgagaaaatttcatatcttctctttggaaattcacacgtagcacatttgacaacttgcctcataacagcctgtttatctgcacttaaaatagtattgtctaacagtacctaactatgcagacttttaaaataatgcataatgccccatgacaataatgaattagaggaatatgagaaacattgttctcccgccttctctgagaacctctttcaacggctgtaatggcattataagagccacttttggagttaatagtgaatgtgcctggtttcttgactcatcaattcatgcatttactaggacagc

SEQ ID NO: 594579 - DNA, 602 bp, Homo sapiens
cacagagctgggtctagagtagacagtgagtaaacacttgtgcccaaccraaaatctcagtgaccaactggaaattgatcacactaattcctttaattcttaggttgacacatttgaagtttccttttccattatcactttctgtctctataatattcattttgatgttatttcctatgctgtaaacctcaaataatatcgaagaaagagattaaatacttatagctggcatatacaaatacacaattttaaatgcctgtttaccaaggcgttctataaaatggaaagggagaatttattgctctcacaaagcatcgacactcaggctgtccattcaactgagtgaaatcatttacctatggtaatgtgcagtttgctagttttaccaatgctttttgtttttctctagtgtctgtaacatagtaattctcatttccctgaatgtgaactctaatccaaatgatcgaccaatatactccttaaagcttaacttggaaatggtaatctctttctaaaaacattgcaaaataacaagatcctgtcttaatgcaaaggctgaagtgtaatgaaggatttgtgatactatttgtgaattgcttaag

SEQ ID NO: 594580 - DNA, 602 bp, Homo sapiens
cacagagctgggtctagagtagacagtgagtaaacacttgtgcccaaccgaaaatctcagtgaccaactggaaattgatcacactaattcctttaattcttaggttgacacatttgaagtttccttttccattatcactttctgtctctataatattcattttgatgttatttcctatgctgtaaacctcaaataatatcgaagaaagagattaaatacttatagctggcatatacaaatacacaattttaaatgcctgtttaccaaggcgttctataaaatggaaagggagaatttattgctctcacaaagcatcgacactcaggctgtccattcaactgagtgaaatcatttacctatggtaatgtgcartttgctagttttaccaatgctttttgtttttctctagtgtctgtaacatagtaattctcatttccctgaatgtgaactctaatccaaatgatcgaccaatatactccttaaagcttaacttggaaatggtaatctctttctaaaaacattgcaaaataacaagatcctgtcttaatgcaaaggctgaagtgtaatgaaggatttgtgatactatttgtgaattgcttaag

SEQ ID NO: 594581 - DNA, 199 bp, Homo sapiens
aatactaaaaaggtaccccaaaaccaaaaaaaaatacctttaacattgtcaaccaaagtaacatatactcaaccattctttttctcttgtcagataattgagttatgcctgcacaccaccaaactagcatttggctttcactattttaaataactggccataggacatakgagacatctgcacagttacaattaaaaac

SEQ ID NO: 594582 - DNA, 567 bp, Homo sapiens
tttagcagtatttctatggaaaagaatttgaaccataataatcatgatggctattattaattaaacccctataatgtgtcatgctctaggctaagtaactttcggacagtaactaatccttttataacatcttgaggaggctgctgttactattcacatttgacatttgaagaattggagtctcagagaggttagataatttgccagtgtcatataaccatctctcatattttttttccatttagcaggatcaagtataatgtagggtgtcctttttctttttcttttaatttttttttaastacagctcattggaacttagcctatttcatccagatgtgtaacatcctccttaatactatttttcttcttattcccagttactctgagaattctttccctttcttcactagatctgtgagccaaagatgatgctaatcatagctcataaacatgagtttggtattaatattatatgtttgtataataaaagaaaaggaaaacatttagccttaaagtaaaataagttggctctgttagcctctagagttcttaaaaataattata

SEQ ID NO: 594583 - DNA, 503 bp, Homo sapiens
gtctgttttggtcactgtagtatccccaatacctagaatagagcctgacaccaagcagatactcaataaatacatgtagagtgaatgattaataaataaaagattccagatccttgattccattcaaaataacagccatcccatcaaagtaaaacattccctgaggctgaagttaaaacagccttactccctgctaaaaagaacctcttttatttaatgaacacatatattcaccaaccacaaccagtcaaaacaaaatatgcattaagaataaaacatgttaggctgagataggtggatcacgaggtcaggagatcgagaccatcctggctaacacactgaaaccccgtctccactaaaaatayaaaaaattagccagacgtggtggcacatgcctatagtctcagctactcgggaggctgaggcaggagaatcgcctgaacccaggagtcagaggtgcagtgggccgagatcacaccactgcactccagcctgggtgacag

SEQ ID NO: 594584 - DNA, 582 bp, Homo sapiens
aattttgtaaacacaagaagcagaataacaaaaatgacctaaatggttcacaaggagagtaagaatattgaataactgtagactttgttaagatacacatatataaatacaaacatatgtggacatatacatatayacacacacacacacacacacacacacacgcatatttacaaacatatattctaaaataacagaataaacaattttaaaaataactaagctccctgctagtggaggggacaaaacaaatgagaaggaaaaactcaaaaaaatcaccaaaaaagaggaaaaaaaaaaccaacagaaatggaaatgttacattaaaatgctaaaaataatcacaaatatattaataattataataaatctaagtgaaccaaattccctgttatctttaaaagtctgaatttttaagaaatctattgatatgctgttcataagacattcttaaaaaataaggacacaaaaatattgcaaataaaagactttaaaagaggccttcaaggaaagccaatttagctatatttgcatccaacatatagacttaagtagaaataaggaaatggcatataagtacat

SEQ ID NO: 594585 - DNA, 582 bp, Homo sapiens
aattttgtaaacacaagaagcagaataacaaaaatgacctaaatggttcacaaggagagtaagaatattgaataactgtagactttgttaagatacacatatataaatacaaacatatgtggacatatacatatacacacacacacacacacacacacacacacgcatatttacaaacatatattytaaaataacagaataaacaattttaaaaataactaagctccctgctagtggaggggacaaaacaaatgagaaggaaaaactcaaaaaaatcaccaaaaaagaggaaaaaaaaaaccaacagaaatggaaatgttacattaaaatgctaaaaataatcacaaatatattaataattataataaatctaagtgaaccaaattccctgttatctttaaaagtctgaatttttaagaaatctattgatatgctgttcataagacattcttaaaaaataaggacacaaaaatattgcaaataaaagactttaaaagaggccttcaaggaaagccaatttagctatatttgcatccaacatatagacttaagtagaaataaggaaatggcatataagtacat

SEQ ID NO: 594586 - DNA, 483 bp, Homo sapiens
ctaataccaggggcctcttggaaactatttagaaactattaactgctatagtccattattattttgacagttttaccagctttatcatattgttggctcatataaaacatgcagtcaactaaaacctttctgcactgtttcctcgaaattaagtgaatattttatatatcattaatgcagacatatatatttattcacattaaataacatattatttgccatgacatagcacrtcagtccactgtgataatgttaaattcctatttctctactcaatatattagctattcctttcaacttttcatgccctaaaaatttattttgtgtaccttcatctaagtcattcataagaaatgtggagcagatttcaagagctccctttccaagccagtgctgattcatccaaaccactctcttttggaatctttagtcacccaaccatgaagaatttcaactgaaagttgttctctccagtagagtagt

SEQ ID NO: 594587 - DNA, 610 bp, Homo sapiens
caaaggaagaatcaggggagaagggatgcaagaccccaggagtatgccagtgtacaaaaccccaagtcaaaaggtcaagctatgcacttgrtctctcaagtcacccccttggccctcttacaattgtactttacatcctttcattcctgctttaagcttttcaataaactttcactccttttctaaaacttgcctcagtctctcttcctgacttacgtccctcagtcaaattctttcttctggggaggcaagaattgaggttgctgcagaccccatatggatacaaattctccactggcgcaattctaaaggtacattgcagtaaatccacaggttccagaacataggaattgcttaatttctgccttagtttgcaatcttctctcaaaagacaaaagcaaaatacagatgctcctcaacttacaatggggttacgtctcaaattcactataagtggaaaatatcctaagtcaaaaatgcatttaatatacctaacactatcatcatatgaacatcaaagcctagcctcgcctaccttaatcacgttcagaacacttatataagcctacagttgggcaaaatcatctgtcaacaaagtaccttatattga

SEQ ID NO: 594588 - DNA, 610 bp, Homo sapiens
caaaggaagaatcaggggagaagggatgcaagaccccaggagtatgccagtgtacaaaaccccaagtcaaaaggtcaagctatgcacttgatctctcaagtcacccccttggccctcttacaattgtactttacatcctttcattcctgctttaagcttttcaataaactttcactccttttctaaaacttgcctcagtctctcttcctgacttacgtccctcagtcaaattctttcttctggggaggcaagaattgaggttgctgcagaccccatatggatacaaattctccactggcgcaattctaaaggtacattgcagtaaatccacaggttccagaacataggaattgcttaatttctgccttagtttgcaatcttctctcaaaagacaaaagcaaaatacagatgctcctcaacttacaatggggttacgtctcaaattcactataagtggaaaatatcctaagtcaaaaatgcatttaatatacctaacactatcatcatatgaacatcaaagcctagcctcgcctaccttaatcacgttcagaacacttayataagcctacagttgggcaaaatcatctgtcaacaaagtaccttatattga

SEQ ID NO: 594589 - DNA, 453 bp, Homo sapiens
agtggacttggaaaccaactcccctgaaggaatttacttaacatagtagaaaaaatcaaatgctagaatctccaattttaattttgcaacagcccaatgttttattttacctcaaaaggccttaaataatgtagtgttaattctcttccattatgaatcaaacaaaaaggaaatactacaaagtttaaggatctgtggtcaggcagcagtgtcctgatgctagcagtgagggctgttccattttragcattaaggaaaagtcaactttaattctcttgcaaaagcaagcacatttttgctaacacaatgggtttttatttctttgtatggttgtttttttttttttttcattttacttttggggttcatagaaccttaggaaatctcacaaaatgcatggatcccctttgtagaaaagtgcatacttcttcatacacacaaagttgtggatgc

SEQ ID NO: 594590 - DNA, 591 bp, Homo sapiens
tgaactccttatatattctgattattaatcccttgccagatgggtagtttgcaaatatttttccccattctttctgtgggttgtctcttaacttggttgattgtttcctttgctgtgcagaatctttttaacttgatgtaatcctatttgtccattttttctttggttgcctgtgcttgtggggtattactcaataaatttttgcccagaacaatgttctggagattttcccccaatgtctctttgtagcagtttcatagtttgaggtcttaaagtctttaattcattttgatttgattttttatatggtgagagatggtagtctagtttcattcttctgcgtgtggatatccagttttcccagcaccatttattgaagatatttttttttcccaatgtatgttcctggcacctttgtcaaaaatgagttcactgtaggtgtgtggatttgtttctggtttccctgttctgttccacctgtctatgtgtttcttttttatgccagtaccatgctgttttggtcactatagctctgtagtataatttgaagtcaggtaatatggttcctcyagttttgatcttttttttttg

SEQ ID NO: 594591 - DNA, 580 bp, Homo sapiens
cttaaactcctaaaagtttccttttcctctattctgccataaatataatttgcctttctcaaaacaatacaaactccattttacctccagccttcccgcagcttgacgaatgttctaaaaaagccttcttaaactgtgagccaagtctcacagtagatattagagaaggtaagttggttggcatctgagtccttctttgctcattgataccatggtggtattgccatgtgtgtgttgtaagaatttgaatgaagcagyaactcctcaatttgaaatgataggggaatgaggttgtctatgtattaacattttccagcttcccattttaagaaacagacttaacttagtgtaaatgtttttggcaatcacagtaaatattccatttggagacctttccaaagtttatttcagatttctctgacctttgaatggggtatctaaatggattaaaccttcccttgtagatgtagattcttagttgtaaaagccactattatactactgaaacatggacaaaattttttggataaagggccttttttttttctttttctttttctttctttctttctttcttttt

SEQ ID NO: 594592 - DNA, 311 bp, Homo sapiens
tcaaggaggaaccccctagaagctgatgagccttgtaagttccagtagtttccaactcatctttaggtcatttcttcctcacaaatcattcctttctcatgcaaatatttctcctgtttccatcaatatacttggaaataacaaaccacttttcttttaaaatagtgaatccaaaatttgtatcgaatttcccccaattaattaaaakaaatttacttcaacaagcactctctattgctgtctgctgtgcatcgggtgttggggaaacattggcagagatacagaaaggggaaaatgtgacatggcagttt

SEQ ID NO: 594593 - DNA, 549 bp, Homo sapiens
ttataaacctgtaacacagataactatattaaaaataacttctgaaagactgatttcacaaatttaaggcctagaaaattttaaacatgtaaacacctgttctctaagttatagtaatataatgttaagatttttaaaatatatttgactttttaaaaatattgtgtttacaacaaaattctactcatagcaattcaaggaatataattagaggttttatgaaaatagataaatccttatttaatagaaagtattagcattgatatttttaatctacacaaatggaatttaaaaatttccaaaagtttctgttaaagatatacagttttgaagtgttaagcttgtctaaaagagttctaacttctkcaggaagaaaagtgcacttcatttaagcaagaaatttccattacttctagattaagaagccacacctcatacaactactgacaggaaaacattttaattcaaacctctaccactacccagcctgaagcaaagtttaaaaaaagaaagaaagaaagaaagacacaaaaatacaagcacaactca

SEQ ID NO: 594594 - DNA, 408 bp, Homo sapiens
aaggaatatgacatttaaaaattgccaagtttagcatcagaaatttctgggatagtatagaacaagtcctgaaggcactaagtgcccattactgacatttccatccaagaactcagtaagatcttcaatcccatcccacgtgaactaggccaagttgtccaagaacctcagaataagcaaagaccaccaagattatctgacccaattgtctccacttaacagatcagcaaatatagatccagagaggtaaagtaacctggtttggctcacacagctccttagcagctgtcttaaaactcagtccagtgctttcttctctacawgaagtccatcatgtacttttttttcccattaggactttaagaccaggacataattgtccaaataacgggggctaccatcagaatt

SEQ ID NO: 594595 - DNA, 589 bp, Homo sapiens
atgttctcactcataagtgggagctaagctataaggatgcaaaagtataagaaggacacaatggagtttggagactcagggggaaagtgtgggaagggagtgagggataaaagactacacattgggtacagtgtatactgctagtgtgatgggcccgccacaatttcacaagtcaccactcaagaacttacgtaatgaaataccacctattcccccaataacctatggaaataaaaaattttaaaaaattaactttattttttaacagaacataactcaaggtagttgtattttatttctttcccattgatttctgcccttaatrtaatgaacattttttatcttacttctcgggtcctttaatggtgttatttatgtacactttctttttccatctgggacatttttcatcatcgcatctattcaaattgcttatgtttctttttcttgagattatctgtaactcttaggttgagctttggttcttcatcttccgtgactaccatcttctttctgaggatatttccatctttttcattttactctgctttctggggaaactactcaggcatgtccttaaaattcccga

SEQ ID NO: 594596 - DNA, 525 bp, Homo sapiens
cagaatacatttcacagaaataaarctttcatttttgctgtgctcattttatgtttgtttaatatttaatgagattacttgcttatcataactagtaaaactgttataaagatgtgagaacaaatgcaatagacttttgattactatgcaactcaaaaggggcaattgaagtatgcagacattctgagagatgctgcctagccacagtgctcagtgggtcctggatacctgctggtctttttagcaggtgaatgaaaagcatctgttgttctggtgattcacatctaacaaaggtaacactgagcagtgtatgggagggacagataggcacacgtacagacacacaatgcataatggggtggtttgcaataaagatatgtactgtgagagaaaagcaattctgcccaagggtaggatgtaagttggagctacttctttaagaacagcaaagaaaagaaagaaaacagcaaataccaaagcagggatgtataaaagaatattacagagcttgtcagagagccaaat

SEQ ID NO: 594597 - DNA, 525 bp, Homo sapiens
cagaatacatttcacagaaataaagctttcatttttgctgtgctcattttatgtttgtttaatatttaatgagattacttgcttatcataactagtaaaactgttataaagatgtgagaacaaatgcaatagacttttgattactatgcaactcaaaaggggcaattgaagtatgcagacattctgagagatgctgcctagccacagtgctcagtgggtcctggatacctgctggtctttttagcaggtgaatgaaaagcatctgttgttctggtgattcacatctaacaaaggtaacactgagcagtgtatgggagggacagataggcacacrtacagacacacaatgcataatggggtggtttgcaataaagatatgtactgtgagagaaaagcaattctgcccaagggtaggatgtaagttggagctacttctttaagaacagcaaagaaaagaaagaaaacagcaaataccaaagcagggatgtataaaagaatattacagagcttgtcagagagccaaat

SEQ ID NO: 594598 - DNA, 549 bp, Homo sapiens
taaagttggataaaaccatgttttgtccaatacagttatttggcacccctctatgtggcgtgatgcccctacccagctttcttctttggcccccttctttcctctcccacctttgtcagctagctgtacctttacttttacttgatcaaggttgtatagttttaattatatgcactaatgtgtatttgtttttatatttaagtcaagttgagttgagttttctatcccttatgactgaaaccctcctaactccactgagggtctcctacatgctgaccttctggcttggaagagggatgctaccatctactttgtgtaaaccattctattttaaaaggatrtttttaacctacaacttctagttaattcaaatatatcttatgaaacaaaaaagttggataagatgaagttctgcaacagtgctaagacaatatgtcactcaggagatgacttttaaaaataactttaactttgaaaagtaaatgttgggccaagcacggtggcccacacctgtagtcccagctcattgggagaccaaggtgggaggat

SEQ ID NO: 594599 - DNA, 559 bp, Homo sapiens
tcttgggctctgaccctttgggatgtaaacatgtgtctctagggaaagatatgactagtggctccagctttacaactctaggaatgtctccatggagatggtctcatccccctcttccacttagcctccttaaaatgtaaccacattacctctgcagaggtcaatctctctggagttctcactatctatgcacccacaattcaacttctgttttcttttttttgagacagggtctcgctctgtaacccaggctagagtgcagtggcacagtcatggctccctgcagcctggacctcctgggctcaagcaatcttcacacctcagcttccagagtagctaggacttataggcgtgtgccacygtgcctggctaacttttttattttttgtagagataggggtttattatgctattgacctcctgccttggcctcccaaagtgctgcgattacaggtgtgaatcacaacactcagcctcataatttattttctgaggcttgttttttagcttaggttccacattctagtaaaaatgcctagaaagctctagctgtgtagaa

SEQ ID NO: 594600 - DNA, 513 bp, Homo sapiens
tccttaaaatgtaaccacattacctctgcagaggtcaatctctctggagttctcactatctatgcacccacaattcaacttctgttttcttttttttgagacagggtctcgctctgtaacccaggctagagtgcagtggcacagtcatggctccctgcagcctggacctcctgggctcaagcaatcttcacacctcagcttccagagtagctaggacttataggcgtgtgccactgtgcctggctaacttttttattttttgtagagataggggtttattatgctattgacctcctgccttggcctcccaaagtgctgcgattacaggtgtgaatcacaacactcagcctcataatttattttctgaggcttgttttttagcttaggttscacattctagtaaaaatgcctagaaagctctagctgtgtagaaacatataaatattttctctgcagtcccatactcttataattgggtatctctgaggaaaaactggaccggatgatcattat

SEQ ID NO: 594601 - DNA, 513 bp, Homo sapiens
tccttaaaatgtaaccacattacctctgcagaggtcaatctctctggagttctcactatctatgcacccacaattcaacttctgttttcttttttttgagacagggtctcgctctgtaacccaggctagagtgcagtggcacagtcatggctccctgcagcctggacctcctgggctcaagcaatcttcacacctcagcttccagagtagctaggacttataggcgtgtgccactgtgcctggctaacttttttattttttgtagagataggggtttattatgctattgacctcctgccttggcctcccaaagtgctgcgattacaggtgtgaatcacaacactcagcctcataatttattttctgaggcttgttttttagcttaggttccacattctagtaaaaatgcctagaaagctctarctgtgtagaaacatataaatattttctctgcagtcccatactcttataattgggtatctctgaggaaaaactggaccggatgatcattat

SEQ ID NO: 594602 - DNA, 542 bp, Homo sapiens
atttttcagtttcccatgargcttggctgtgcccctgctgaagttgtatcctgtatctctcattcctctgtgagtatctgtgattttaaaaccccatgaactgatgtaacccctgggtacttgctagtatccttaaagaactgaacagtgagtggtatgctttcatttctcggacctagagaacattcatttaaaaaacgaaatttttgctttaaaattacagacctatcagcttagcagacatgctttctaaaataaatgtcaatttccttctgaataaattgaactcttgggcccacaatagaagcagaaagggtttggcagcagttattccacgttgaccactcttatagtctatttcactttgtggagaaatccattaggaataacataaaatccttctttcctttcttatttgcttcctccctccctttcttcttctcctcctcgttccttccttttctttccttttcaccttcctttctccccaaaatcgagattggtagaaatgaactcttgatgaatctgaaaataatttttcc

SEQ ID NO: 594603 - DNA, 585 bp, Homo sapiens
gtttctcatgcctcagcctcccaagtagctgggattacaggccagtgccaccattcccagctaattttgtattttgttttagtagaaacaaggtttcaccatgttggccaggctggtctcaaactcctgacctcaagtgatccacccacctcagccttccaaagtgttgggattacaggtgtgagcctccacgcccagcctggttatacattctgcttcatttttaaaccgcattcttctggcagttccatggatttgaactctgtttggaagccatttcttaactgtagacttaattttaagactttgaaaaccatcaagtttctgtttaaacagaaagaattcctttctgtttaatagtactctcarctgaactctattctttttacattttactacaagcagcaagaagaaatcaggctgcaccttcaccactgtgtttagaagtctacttagccagatcaccctgttcacaaggaacacttcctactttctcgttagagaaggtgataatgttgctaagctttgtgtcactacataataagcacgctcccttccagtttccactcacaatctgtgcagtgc

SEQ ID NO: 594604 - DNA, 588 bp, Homo sapiens
gaatcaacatattgtagttatatattacaaggtttgtaaaattagctaatatctttttctactaacataaaattatatttgttgatagtattcattacccagtcagtattttgaaccacattccatgtgatgctgtgtttgggatgttttttccatttactccatagtaaatgaggaaccattggcttagcataatgataatatgatccagcaaggcaaggagcccagaactctgggcatcaggaacccatcacatgcatattgtgtagtatttcaatacaacagaataatttgctgtcttttttcctaaatcgaaatgaaaaggatagatgagaaatctgttcaaaatacataggtcaaaaatackttaagtacaacattattcaaaataattctgagatgtttgcccaactagtttaactttgaaatttatgtcagggtttttttttttaagtctttaatgttttacacatagattctaccttcagttaatacctgggcacttttttggctgcctatgcaatgactgactgaatgactttaaagggtctctatgttggtaggctgaaccttatatgagccattttt

SEQ ID NO: 594605 - DNA, 617 bp, Homo sapiens
cagctgtgcacccacatccctggtgcatagctctgagaaacaccaggcctgagaaacagctctgtaggctgctactcatagacaacaactgtgtgatcatgcttctggccacagtaacagccccatggccccaaacccagcaagccagacctcaggttggccaacccactgtgtgtatgtgcctgtctgtccttgacctgagaaacagcctggtgagcctacccctggcaaagctgcaccactgatgccacaaactctctaagcctaggccactgagaaacttgcaaacactaaagaaactacatggagactacactrttgcatccacttagaaccaaagccaatgcaacccactgaactgacatcccaagacccattcatataaataagtctttccctgtgacactactccataaaattggaggaggcattttttccattagatgcacagaactcaacataggaccacaggatacatgacacttccaaagaaaaacaataattctccagtaacaaacatcaataataagaaaacatagaaaatgtcagaaaaagaatttaaaataataatcttaagaaaactcttaagattaaactcttaagattaaaatctttta

SEQ ID NO: 594606 - DNA, 568 bp, Homo sapiens
attaactagaatggaaaaaactgcttttgtcagcattcagacaggtttagtcaggcagaaatgcctgggcactagagaatgggactccagtgggtcccataagaaagkgcagtagagcaacgaacaaagatataccatccagagtgctccatgcagcaggtgggtaactaggagggagtgtgtggctgtgaaaggcaagagagtatcagggttgatggtactgatatggctgagacttttcagggaactctgtgattccgtgttacatacttccagtcaagactaagattgctaaagtcaaacactgctgagtgggattgcaactcttatgcaaaatagtaaagaaggccaagtttaattcagttacgatgtgggcagagctaatgaagttacaggatctcagaatgagaagcacaaggcggtatataaagtatagaaacatagcaatggcaccattgacttccatatgaaggctcttaggggtctgagctcttagattcttctctagaggtattttagcttatggctgaactgtctgggccttcatcattctcatcattctcccatt

SEQ ID NO: 594607 - DNA, 603 bp, Homo sapiens
agtcacttcctgactactctgtagggtgaaacagtcaataagctctactggaaaccccatctcaactaaaaataaaaaaattcaccagacgtggtggtgcatgcctataatcccagctactcaggaggctgaggcaggggaattgcttgaactcaggaggtggatgttgcagtgagccaagatggtgccaccctgcactccagcctgggcgacagagcgagattctgtctcaaaataaatttaaaaatgctctttgcgaataagctaaagactaagatttatgctaataacaaaacatatgtgaacagtgagaaaataggagctggcgctttcccttctctcccaggaagttctaatttgaccagaagacaagataaaaatctaatcatatcagaaaaaaagctgcccaaatattttttaaattaccaagaragccatttgaaatatttagaaaaggatactcctctaagtttatattgttcattgagatgttagtaaattatatgaacctataatgatttataaacatttaaaatttaagcaaacagaatatgaagacaaagctttaaggtcatataatattcatactagtaatttatttaa

SEQ ID NO: 594608 - DNA, 627 bp, Homo sapiens
ctattgtaaatggaagcgatttctttttcagtttgttctctattgcagtatataaatgtttgttkatattgcatcctaaaactttactgaatttattggttctaatagttttttttctggttgaggttttaggcttttaatttttaaaatccataaaaaaatttttaaatagagcttggggtacaagtagtttttagttatgtagatgaattatatagtggtgaattctgagattttagtgcacctgtcacctgagtaatgtacattgtacccagtgtgtagttttatatcaagccccctcccatcatcccccttctgagtttctgaagtccgatatatcactctgtatgcctttgtgtacttatagcttagctcccacttatcagggagaatagacagaatttggctttaaattcctgagttacatcacttagaatagtggcctccagctccacccaagttgctgcaaaagacattgttttgtgttcctctttgtggctgagtggtattccatggtgtacacatatatgacattttccttatccattcgttggttgataggcacttaggttgattccatttctttgcaattgtgaattgggctaaaataaacatatgtgtgcatgt

SEQ ID NO: 594609 - DNA, 590 bp, Homo sapiens
gacttaactgaattcatttattaaatctagaaatcttttggcagagttcttaggattttctaggtatatgatcctatctttggtgaacagcaataatttgaatatctcttttccaatttggataccatttctttctcttgcctgattactctagctagtacttacattactatgtggaatagaagtggtgaaagtgaggacacttgtcttattccacttcttaggggaaatgctttcaacttttccctattcagtatgatgttgactatgggtttgtcatatatggcttctattagttcgaggtaagtcccttttatgcctayttggttgagggtttttttttttttttcagaaagggaagctggattttattgaatgcttcttgtgcatctgttgagataaatatatagtttttgtttttaattatatgtatgtgatgtattacatttattgacttgtatatagtaaatcatctgatatggtttggatccctgtctccatccaaatctcctgtggaaatttagtctccaagctggaggtagaacatggtgggatgggattcgatcatgggggccatttctcatgaatgg

SEQ ID NO: 594610 - DNA, 590 bp, Homo sapiens
gacttaactgaattcatttattaaatctagaaatcttttggcagagttcttaggattttctaggtatatgatcctatctttggtgaacagcaataatttgaatatctcttttccaatttggataccatttctttctcttgcctgattactctagctagtacttacattactatgtggaatagaagtggtgaaagtgaggacacttgtcttattccacttcttaggggaaatgctttcaacttttccctattcagtatgatgttgactatgggtttgtcatatatggcttctattagttcgaggtaagtcccttttatgcctacttggttgagggtttttttttttttttcaraaagggaagctggattttattgaatgcttcttgtgcatctgttgagataaatatatagtttttgtttttaattatatgtatgtgatgtattacatttattgacttgtatatagtaaatcatctgatatggtttggatccctgtctccatccaaatctcctgtggaaatttagtctccaagctggaggtagaacatggtgggatgggattcgatcatgggggccatttctcatgaatgg

SEQ ID NO: 594611 - DNA, 584 bp, Homo sapiens
atgtgggtttgtcacatatggcttttattgttttgagatatgtttcatctatacagagtttgttgagttttatcataaagagatgttgtattttgtcaaatgagttttcagcatctattcaaatgatcatatggtttgtgtgtttgattctgttgatgtgcagtgtgataattaaggaatcagagagactgaggggttgaggaggaattatttaattatttaggtgcaccgacccagtcagattaacatccaaatgastgagccctgaacaaagagtcaagctgccttttaagcattttgtggggtggggggagatctgtgcaggaggaagtgtattacagaagtgagaaacaaaggcagttattcagttaagacatgcattacattatttcttacttttcaaggaacaacatgttttacaacttgagattatctttctagtgactttgcagctgcacagctagagaaacagtcttcacaatgcctgggaaagggagagataaggctcactagccacagacagaaaaacaggcagttaattttaaaggactccagccctttctcttcctcaaggggaattgggt

SEQ ID NO: 594612 - DNA, 519 bp, Homo sapiens
ggctacaggaggaagtgggaggaagtgagaggaataattctggaaagccttcatatgctcacaacaacaacagcccttggatttgagagggcaacatttatttgccctcttgacatgaagtagtaacwtctggaggacttggggcttggagtaagaactcgcaaatggcaaagggagaatttcccctcctcccaaaggggtgttaattcaaaaaaaagcaagtaggtgggatccttaaagggccacagacagaagtacagaggtaggccctatgcaggcagataaactgcttgaaaagccactggaaaactcagccctgaggtatagcaggaacaaaaagtgtatggtaagtcttaaggagctggcacggccagagttccaattagtgcctttcctagaagtgtgccagcagacaggggaaggattggaggtcagccaagctggtagggtaaaaacaagtataaatcttaggggatagctgcaagaaagcctgtgtctttgctgccacacaagcccagc

SEQ ID NO: 594613 - DNA, 575 bp, Homo sapiens
cacgtgctcacttgaggcattctttccttaccagcctaatgttcttagaaggtcatatactagttaaactctgccattattcctcttaaggtgcaggcttgagtccacttgcccaactcctgagctcttagtgggaagttgctgatcaccagttttagktttttttatctgttgggagattgccttcccctggtaccagctgtgaccaattattattttagagaaacagcttaacaactgcctatcacctgatggtcacctgacattcttagtggggatacccctctcctgccctgctcatggtacttactgtaacaagtgcaagcacaagacaaaaaaatacaagaggatattttaataattcaatcaagatatattgatggttttgcccatgttagaagggttgtaaggcacagtaatagggtaactgggggtaaagatttttaagaaaaataattttctaagttagatcataaattcattagttgtattcaaggaaagtatttttaatgatttgatgttgattgtaaacagttagtttttagaatatgttgatattgaggttaaagatttag

SEQ ID NO: 594614 - DNA, 575 bp, Homo sapiens
cacgtgctcacttgaggcattctttccttaccagcctaatgttcttagaaggtcatatactagttaaactctgccattattcctcttaaggtgcaggcttgagtccacttgcccaactcctgagctcttagtgggaagttgctgatcaccagttttaggtttttttatctgttgggagattgccttcccctggtaccagctgtgaccaattattattttagagaaacagcttaacaactgcctatcacctgatggtcacctgacattcttagtggggatacccctctcctgccctgctcatggtacttactgtaacaagtgcaagcacaagacaaaaaaatacaagaggatattttaataattcaatcaagatatattgatggttttgcccatgttagaagggttgtaaggcacagtaatagggtaactgggkgtaaagatttttaagaaaaataattttctaagttagatcataaattcattagttgtattcaaggaaagtatttttaatgatttgatgttgattgtaaacagttagtttttagaatatgttgatattgaggttaaagatttag

SEQ ID NO: 594615 - DNA, 575 bp, Homo sapiens
cacgtgctcacttgaggcattctttccttaccagcctaatgttcttagaaggtcatatactagttaaactctgccattattcctcttaaggtgcaggcttgagtccacttgcccaactcctgagctcttagtgggaagttgctgatcaccagttttaggtttttttatctgttgggagattgccttcccctggtaccagctgtgaccaattattattttagagaaacagcttaacaactgcctatcacctgatggtcacctgacattcttagtggggatacccctctcctgccctgctcatggtacttactgtaacaagtgcaagcacaagacaaaaaaatacaagaggatattttaataattcaatcaagatatattgatggttttgcccatgttagaagggttgtaaggcacagtaatagggtaactgggggtaaagatttttaagaaaaataattttctaagttagatcataaattcattagttgtattcaaggaaagtatttttaatgatttgatgttgattgtaaacagttagtttttagaataygttgatattgaggttaaagatttag

SEQ ID NO: 594616 - DNA, 590 bp, Homo sapiens
agtcatactttataatgttaaaagccaccttctaaaatgcagatagctgttgagcctatcatttggcaaacaaataataaataaatatctatattaaacaaaaactagggaagatgcaataataattaagaacatgctgataacagaagacaacacttcattctcacatgagacaggcaagtgaacaaaactaatttgggatgtaaaatctttaaaagacataaagtatatgttttgaatatatatagaacactatgctctgatamtacagaatgtacctgcttccaagcactcatggaactttcatgaaaatggatcatgtactagacacaaggaaaatatgagttttcacagaacagaaatattatgaacaatattcaattatcacaataaaaagattataattaaaaagtaaactatcatatttaataatacaatattaataattgtttaataactctataattaatatataaaatacttacccatccatctatttatattgttctttcagtcaccttttgattgctttgaagctcatcttttagtaggtaccttggaaacaatagcttcctttataaatcaatttt

SEQ ID NO: 594617 - DNA, 485 bp, Homo sapiens
tgtggtggcatgcgcctgtagtcccagctactcaggagactaaggcaggagaattgcttgaacccgggaggcggaggttgtagtgagccaggattgcacactgcactccagcctgggtgacagagcaagccmccatgtcaaaaaaaaaaaaaaaaaaaaaaaaacataatcagcaagttcagccctttatcatgaaacttatgccaccatatctaccaattcacaaagttaatcatgttcagcatttcatcatcaaatagaaatttccagcaaggcccaaaggcacaagtaatttgtctcaaatccccagcatgcatattttttttctacattcctttctcaactaactccaatggcctcacaggatattaactgaaaaattttgtctgatttagagttagctttgtgtcatattctggagacactgtaaaccaatgtatatagccaggagaacactatttgcccttcagtggtactcctgaatg

SEQ ID NO: 594618 - DNA, 267 bp, Homo sapiens
ttacctgtaagtggcttctcagctctggactaggaacgaggatgcctcatagggtgggaaggctaagggattggcagcttgtaaggcctgggccccttagcctttcctctccccaccaggctggatgagaatgaggatatgcacagtctcctactgactgacagcagcactctactcgttggtgggctgcagaatcacatamtagagattgatcttaacactgtccaggagactcagaaggtacaagcttggggcaagaaagaccta

SEQ ID NO: 594619 - DNA, 600 bp, Homo sapiens
cttcgcttgtttttgctgcattttagagatcactttcctggacttgcactctgcctcctcttctctgggttgtaagctacctgaagacaggacgatatcttctatttctttttggccctcctagcactccacagcctttaatacagggctttgtacatgggtactcacctaattctggataaagtgcatccttgggcaggctttccctccatccacccaaacrcataagacatcctgtagtggagctaagggttatcctcttctcctctgcccctgtccttaatgccaatatctgagaagcagtgacccccagcccagctctccaatgccctccttctgctactctcctgctcttcctcctttcaggccttgttgtcaggacatgaaatcactccacgtcctgagtgacactcactctaggatctcgttgtattcaattgtctcctccaggttctgaaggttggggttgacactgcggattgcacgcatgtatgcctttagcagctggatgtctcgcttctgttgtggggaagaagaacaggaataatggttaaggcagacagcagaaaaaagacaaaagtttatccaagaatgagggca

SEQ ID NO: 594620 - DNA, 604 bp, Homo sapiens
taactgcctcctaagatatttaacttgggtaagataagacctggcaagagatgacattgtaatgagttttgaaaaaagcaaagtaggatattttttcatcatgtttttctagcacacaaaaggcatgatctagtgtgtatggggtaaaaactgaaatagtataggagattcactataatatacttcctttagtgctatcttctacttcatccatagctatatgaaactttgcaggatggccctggaagatctgaaagtataactgaagtctctaccagggtaccttggggaggtgacttggtttgtggttacatgtgataacttcactttagctccaatgcagattggagattatatgttttgatgtcatcttcaattttctgaagactgaggttccatagcccaygtggtaagagcaatccacacagattctacagaacgcagattcttccgtagagcagttggtggctcctgcattcacaactcatttacctttaagtgtatgatcttcatggtagggctgcccagctatttaaatattgaccaatacagagtctaattagtgagcagatgcacagatggtgctggtataaacacaatggtt

SEQ ID NO: 594621 - DNA, 604 bp, Homo sapiens
taactgcctcctaagatatttaacttgggtaagataagacctggcaagagatgacattgtaatgagttttgaaaaaagcaaagtaggatattttttcatcatgtttttctagcacacaaaaggcatgatctagtgtgtatggggtaaaaactgaaatagtataggagattcactataatatacttcctttagtgctatcttctacttcatccatagctatatgaaactttgcaggatggccctggaagatctgaaagtataactgaagtctctaccagggtaccttggggaggtgacttggtttgtggttacatgtgataacttcactttagctccaatgcagattggagattatatgttttgatgtcatcttcaattttctgaagactgaggttccatagcccatgtggtaagagcaatccacacagattctacagaacgcagattcttccgtagagcagttggtggctcctgcattcacaactcatttacctttaagtrtatgatcttcatggtagggctgcccagctatttaaatattgaccaatacagagtctaattagtgagcagatgcacagatggtgctggtataaacacaatggtt

SEQ ID NO: 594622 - DNA, 610 bp, Homo sapiens
  misc_feature 122, 123: n = A,T,C or G
gatattaaaaagacttcagaagcaatacagaaagttacgtggttataaaagtcttaattctgctaaagctcagtttccgtaaagacaacacaggaaattrtcttgatgaaacaaagtctttnntttttttttttttttttttttaaattttaggccagttaccagaaagaaaaagaaaaagctttgtacacccgtgattgcttctctttatggtaagcccatttagatgtccaaccctatgcaaagggtacttgaatttaatcagacacagaaagactgtgtctagggttatgcatagacactatgtcatagaggaaaagtaacaagaaaactagaccctgagcaggagaatacatggcttttaattaaacagatggggaagttttctcattacatagaacaattcaggtttatcaagaaaagccaagagtacatgatcaacttatactggaagaaaatactgcacttctaggcctttaatataaacatttcggcatgaggctgtgaaagtagagttgaaaccagagagaaagagttacaggagttgatgaaaaggcagaaggagaaagttatcacccagccaagtaaaaagatatatctttttaagggg

SEQ ID NO: 594623 - DNA, 412 bp, Homo sapiens
ctttactttctctttcttaagtacccagtcattttactttaggacacaaatgtacaacatgaggttctttgtcatatacaagtatactctctttttttaaaccttccttaccgaaaatacatcattatagtcataactttcttcacatctctctctctcctccttgctgctttatttctagtctgtgccttttaaaacgacctttaaataatttctgaattagacaaaattattatttttttgaaaaagaacacatctttatgccattcttaaagytttttctcatccaaaacacatatttagaaatgactcacacatttaatgaatatctatttaatttaacataatataacatatcttcaaagtttcatattacatgacgagttcatttatagatatttatactatttac

SEQ ID NO: 594624 - DNA, 606 bp, Homo sapiens
ttctgggtgatttcattaaccacttgcagtgactttcctgatctggagatgattttctaccagaatcggaagtactcattcctttggtatttatttagtgtcttccatatgccaggcatatgctcagtgcaagatagaaagctctttgtcttcaaggaagttagggtgtagagtgggagactgccattcaaactaacaattcccattcatgatgatgagttccactgaggtctgcacaaggtgctactagaaagatggggaagtaagccaacacagcctagtgggggcactggggaagscttctttgagtggaagatgatgcctgagtaggcataggaggaggaagaaaagtgttctaggcagaggaaacagcacttgggaaaacagagagtcaagaaaaagtaaaaggagttgaggatctccaagtattttgcaatggctagaggatcaaccccatgtgtgtgggctgaaaacaaggctaaagaggttggtagagcctccctcatgtgctgtgatcaaggagttaaactttatcccaaaggctgtggaaaatctctaatggagtgtaagtaggggaaaaacaaaatacagacatgtgtgttggaa

SEQ ID NO: 594625 - DNA, 478 bp, Homo sapiens
ttgaattcttatttagtaatatttagtaatataagtatagaacttcaatttttctactgttaacagctttagctgtttactatggwttattattaactgagtgcatttaatattattattttctagatattctgcaactttggagccaataacagaatcatgaactaaataaattgttagagaatgagttagcattttcaggtgattcattttgttactcatttctacttttattgcattataaccagacagcatggtcattactattattacaatttgttttttgaggtttattttgtgcccaatatatagccaagtttttgtaaatatttttacaagtatttgaaaacagttctatactctttttaaggatgtggaattataaaaatgtaatttaatgaattagattctagattctttatatcctcactaaatttttgagtatttaacctatttgaggttgagagaaataaatcaa

SEQ ID NO: 594626 - DNA, 478 bp, Homo sapiens
ttgaattcttatttagtaatatttagtaatataagtatagaacttcaatttttctactgttaacagctttagctgtttactatggtttattattaactgagtgcwtttaatattattattttctagatattctgcaactttggagccaataacagaatcatgaactaaataaattgttagagaatgagttagcattttcaggtgattcattttgttactcatttctacttttattgcattataaccagacagcatggtcattactattattacaatttgttttttgaggtttattttgtgcccaatatatagccaagtttttgtaaatatttttacaagtatttgaaaacagttctatactctttttaaggatgtggaattataaaaatgtaatttaatgaattagattctagattctttatatcctcactaaatttttgagtatttaacctatttgaggttgagagaaataaatcaa

SEQ ID NO: 594627 - DNA, 478 bp, Homo sapiens
ttgaattcttatttagtaatatttagtaatataagtatagaacttcaatttttctactgttaacagctttagctgtttactatggtttattattaactgagtgcatttaatattattattttstagatattctgcaactttggagccaataacagaatcatgaactaaataaattgttagagaatgagttagcattttcaggtgattcattttgttactcatttctacttttattgcattataaccagacagcatggtcattactattattacaatttgttttttgaggtttattttgtgcccaatatatagccaagtttttgtaaatatttttacaagtatttgaaaacagttctatactctttttaaggatgtggaattataaaaatgtaatttaatgaattagattctagattctttatatcctcactaaatttttgagtatttaacctatttgaggttgagagaaataaatcaa

SEQ ID NO: 594628 - DNA, 622 bp, Homo sapiens
attaactgggagctagacctctgggtactgacaccatgggctaaattaagtgaagagcagatgagggtcacactcaaaccattcccacccctgctgtctaggtgtcatctacatctcagctatagccagagaccaacttcttaatgttagctggtttgctctagctaaaactgattaactttattgagggctartttttctctctaagaaggtccttttatttacttatttatttttgagacggcatctcgctctgttgcccaggtgggagagcagtggagcaatctcagcccactgcaacctttgcctctggggttcaagcgattcttgttcctcagcctcctgagtagctgggattacaggcatgcaccaccatacccagctaatttttttctttttttttttttggtagagatggggttttaccatgttgtcctggctggtctcaaattcctggcctcaagtgatccgcctgcctcggcctcttaaagtgttgggattacaggcatcgtgagccatgacacctggccagatggtcctctctttgcccaactttgtgctatcaggaaggaggcctgaggagctatgaagcacggaccagcatctttctaaataaccagat

SEQ ID NO: 594629 - DNA, 622 bp, Homo sapiens
attaactgggagctagacctctgggtactgacaccatgggctaaattaagtgaagagcagatgagggtcacactcaaaccattcccacccctgctgtctaggtgtcatctacatctcagctatagccagagaccaacttcttaatgttagctggtttgctctagctaaaactgattaactttattgagggctagtttttctctctaagaaggtccttttatttacttatttatttttgagacggcrtctcgctctgttgcccaggtgggagagcagtggagcaatctcagcccactgcaacctttgcctctggggttcaagcgattcttgttcctcagcctcctgagtagctgggattacaggcatgcaccaccatacccagctaatttttttctttttttttttttggtagagatggggttttaccatgttgtcctggctggtctcaaattcctggcctcaagtgatccgcctgcctcggcctcttaaagtgttgggattacaggcatcgtgagccatgacacctggccagatggtcctctctttgcccaactttgtgctatcaggaaggaggcctgaggagctatgaagcacggaccagcatctttctaaataaccagat

SEQ ID NO: 594630 - DNA, 622 bp, Homo sapiens
attaactgggagctagacctctgggtactgacaccatgggctaaattaagtgaagagcagatgagggtcacactcaaaccattcccacccctgctgtctaggtgtcatctacatctcagctatagccagagaccaacttcttaatgttagctggtttgctctagctaaaactgattaactttattgagggctagtttttctctctaagaaggtccttttatttacttatttatttttgagacggcatctcgctctgttgcccaggtgggagagcagtggagcaatctcagcccactgcaacctttgcctctggggttcaagcgattcttgttcctcagcctcctgagtagctgggattacaggcatgcaccaccatacmcagctaatttttttctttttttttttttggtagagatggggttttaccatgttgtcctggctggtctcaaattcctggcctcaagtgatccgcctgcctcggcctcttaaagtgttgggattacaggcatcgtgagccatgacacctggccagatggtcctctctttgcccaactttgtgctatcaggaaggaggcctgaggagctatgaagcacggaccagcatctttctaaataaccagat

SEQ ID NO: 594631 - DNA, 622 bp, Homo sapiens
attaactgggagctagacctctgggtactgacaccatgggctaaattaagtgaagagcagatgagggtcacactcaaaccattcccacccctgctgtctaggtgtcatctacatctcagctatagccagagaccaacttcttaatgttagctggtttgctctagctaaaactgattaactttattgagggctagtttttctctctaagaaggtccttttatttacttatttatttttgagacggcatctcgctctgttgcccaggtgggagagcagtggagcaatctcagcccactgcaacctttgcctctggggttcaagcgattcttgttcctcagcctcctgagtagctgggattacaggcatgcaccaccatacccagctaatttttttctttttttttttttrgtagagatggggttttaccatgttgtcctggctggtctcaaattcctggcctcaagtgatccgcctgcctcggcctcttaaagtgttgggattacaggcatcgtgagccatgacacctggccagatggtcctctctttgcccaactttgtgctatcaggaaggaggcctgaggagctatgaagcacggaccagcatctttctaaataaccagat

SEQ ID NO: 594632 - DNA, 589 bp, Homo sapiens
tgctgcttttgaacaagctaaagaaatgtttttcccatgaatctctgggcatcctgggtatatctgtctgttctagccctgacttcctcaccgtacatggggtgcttcactcacttaggcctcccatcccctacctacatcatcctccctccccagtctgaacactcccgcactctgcccagctgtgccaggaagaatggccactcagggacaaggcagcaggaccactgttgttctttccttctttcaaacacgtaggyacttggtgtgggcactcttctaggtgctggagagagagaaagtaatgtgtagaaaagcaaatactgcatgatctcacttatatgtagaatctaaataagtcaaatccatagaagcagagggtagaatggtggttaccaggagtgtgagtgaagaaatggggagatgtaggtcaaagggtacaaagttacaaagttacagtcatatagggtgaataagcctagagatctaatgcacagcctgatgactatagttaatactgtattgtatactggaaatttacaaaaagtagatattatgtgttctcactgtagagtcctaagtagagaaa

SEQ ID NO: 594633 - DNA, 566 bp, Homo sapiens
acctcttcttttccaatctgtatgctttttcttctctcccttctttctctttcctcttctgttatttcttcttctctgtaccttaatgttctggctagggcatctagtataacattgaatagaactggtgacagcagacacctctgtctccctctagatgttaggaggaaacattcagtctttcactatgaagtagaatgctagctatatgtttttatagacactctttatcagaaaatttctttctatttctgttttgctgagagcttttcatcacaaataaatgttgrtctatttcaaatgctttgccacatctattaggatggtcacatgacctatttttatttgtctgttaatatggcaaattatattgactgacttttgatacaacttggcattactaggataaattccacttggtcatgatgtatttttgaaaatatattactggattcaatttgccaatattctcttaagaatatttgcatctatgtttatgatttttcattttcatttctgtatttttaatttttttgtgatgtcttcatctggtttatgttaggaaa

SEQ ID NO: 594634 - DNA, 310 bp, Homo sapiens
ccccttcactctctctccggctctgccatggtaagatgtgactgcttccccttcaccgtctgccataattgtaagtttcctggggcctcacagccatgcttcctgtacagcctgcggaacagtgagtcaattaaacctgttttcttcataagttacccagtctcaggtagttctttatagcagtgtgagaacggactaatagacacacctacccgaatttattacacagatgtcatgggagcctcccaggaagratgtttgtctctgaccagtaactaatctggagtcacctgagggaaggagtaatccc

SEQ ID NO: 594635 - DNA, 532 bp, Homo sapiens
atgccatgcccctctgacacttctggtcatgaccttcaggataaataagtgaatttaatcaattaacatttgggcatctactaagtgtcaggcattctatgatacatgtttttcttgaacagacctatgacaaatgtattatcttctttgtagaaatataaggtggggcatggctgagcaaggctgaccagggactgggtcagaattctaatccagatctgtatgctgccaaagcacctccagatcctcatacttgtaaaaactgcaggagatttggcttggttccacaactctgagattaaagagaaggaacattttggggcacctgggaagtattttgcattccwttaaggctctaacacctggattaagggaattctgaaaccagtaaatttgggggagggctttagtctaattagcttgaagagtcaaaaaaaaaaaaaaaaaaaaaaagagaaagcttttgggctatttaagaccgatttgcaatcccatcaagtggatgcaatcgtgtatgtaacctgaacatttc

SEQ ID NO: 594636 - DNA, 529 bp, Homo sapiens
cattcctgtttctccacgttctctccagcatctgttgtttcgtgactaaatgatcaccattcttactggtgtgagatggtatctcattgtggttttgatttgcagaaaactaattttctaattctaattcccaggatgccaccctagaccattcaaagggagggcagctaggagagttgcgctactatgggggctcatttttctctgctgatctggacctagttttttatgtcagctccctgttttatcccgtcagtataggtagattctctagtgctaggagccacctctctaaggtgggtatagaggctgtagattctctcccagatcttggtgtataatgaatgggtcagagagactggctgacrtccttaggccctcaaatgaaggattttgattattgcagtttactgaaagttaagaccctggacttgaggtaatgcttcctggtatttatccacagaggtgcccacaaatccacctttgcaacaggcttccatcagagctaagaataatttcctcgtggttt

SEQ ID NO: 594637 - DNA, 537 bp, Homo sapiens
ggcactacatgaccatgagttcagaatttcctatgatgtataaggtcctggtgaatcaccaactcataaaatcaggtgtacccagcagcatcctgttgtaagctggaagcggtacatctaggatttagaacaagcaagaccaggggacacaagaagccttcatgagcaaatagcccagactcagcacagttgtaccagccgcrctttcctcagtgtaaacttatggtatttaatgtattgcatcatccagaagcatctggcctagtagagtgttggaacagttgctgaagtgttggagcaatactctgaggatgtggtgccattctccaggatgcagtacatacacattattagaggcttctatatggtgctgtgttaccaaaagaaagaatgcataggaccaggagctaagggatgggagcaaaaattgccccatttaccaccattccaagtgacacatgagggggctttttgcttcttgtccctgaaactccaggatctgaaacattagagaaggaactcttgttttcaaaaaag

SEQ ID NO: 594638 - DNA, 514 bp, Homo sapiens
aatacgggcaggtaatccacttgggtgcctcttggttctcccttgcccagttgtgtctataaacagacaagtgcagctaacctsatctgagaaagatactgtgacatggggcccacatgccacatctactcataggaatgagggtttgggtcacaccagcaggtaagacacaaagaccagcaatgttggtagttgagggtaaagggagtttaaaatgcacagtggaggaggaagtaattatcagctgtggttctgtgtctgactgcagcaataaggctgtggtttgtctcattaacatcccttttagtttctccttgggtaaagaggtctacaataaccctggaggaacttcctctcaaacttgtttggagaaatggaaccatgcaacacaagggctgaaaagtggcagatatagaaacgagccagttctatttctcttcaagaaagggcgcacatcccagctgggggaaatgtggttctctgaagtgtccagctgttgactatttccagttca

SEQ ID NO: 594639 - DNA, 514 bp, Homo sapiens
aatacgggcaggtaatccacttgggtgcctcttggttctcccttgcccagttgtgtctataaacagacaagtgcagctaacctcatctgagaaagatactgtgacatggggcccacatgccacatctactcataggaatgagggtttgggtcacaccagcaggtaagacacaaagaccagcaatgttggtagttgagggtaaagggagtttaaaatgcacagtggaggaggaagtaattatcagctgtggttctgtgtctgactgcagcaataaggctgtggtttgtctcattaacatcccttttagtttctccttgggtaaagaggtctacaakaaccctggaggaacttcctctcaaacttgtttggagaaatggaaccatgcaacacaagggctgaaaagtggcagatatagaaacgagccagttctatttctcttcaagaaagggcgcacatcccagctgggggaaatgtggttctctgaagtgtccagctgttgactatttccagttca

SEQ ID NO: 594640 - DNA, 555 bp, Homo sapiens
  misc_feature 507: n = A,T,C or G
tgatgtgctcttgaaagcaccacttcctggctggaggccaaccaacacaaaaccagcataacttaacaaaaatacaaccacagaccctcatagagtccacttcagtcccctgctacctccactggagcaggtgctggtatccacggctgagggacctgaagacagatyacatcacaggactctttgtagacattccccagtaccagcctggagcccagtagctccacttggtggctagatccagaagataaataacaatcactgcagtttggctctcagatagccccatccctagaagaaagggggagagcaaccacatcaagggaacaccttgtgggacaaaagaatctaaacagcagcccttgagtctacccaaatgagaaggaacaagaaaaataattctgataacatggcaaaacaaagttctttagcactcccaaaagatcacactagctaaccagcaatggatacaaacccagacaaaaatctctggaatgccagagaaanaattcagaaagtcggctattaagctgatcaaggagccatcagagaaag

SEQ ID NO: 594641 - DNA, 598 bp, Homo sapiens
atgaggcttttgaattaacccaatcccacaaagacaaaaaagaaagaataataataataaaaaagaacaaagcctccaagaactttggaattacgttaaacaatcaaacctgagaataattggtgttcctgagggagaagagaaatctaaaatttagaaaacatatttgagggaataatcgaggaaaacttccccagccttgctagagatctgtaaatctgtattagtccattctcatgctgctataaagaactgctcgacactgggtaatttataaggaaaagaggtttaatggattcacagttccatagggctggagaggcctcagggaacttacaatcatgatggaaggggaagcaagcatatccttcttcacatggtggcaggaaggagaagtatgagagccaagtgaagggggaagacccttataaaaccatcagatctcatragaacttactatcatgagaatagcttgggggaaactgcccccatgcttcaattaccttccaacagatccctcccatgacatggggattatgggaactacaattcacaatgagatatgggtgagaacatagccaaactatatcattttgcc

SEQ ID NO: 594642 - DNA, 600 bp, Homo sapiens
cccaaatgtactattagacctaagaaatgagataaatgataccacaataatagtgggggactttaatactccactgacagcactaacaggtcatcaagacagaaagtcaaaaaagaaacgatggacttaaacaataccytagaacaaatggacttaacagatatttacagaacattctccccaacaaatgcagaatatacattatattcatcagtacatgaaacactctctaagatagaccatatgataggccacaaaacaagtctcagtaaatttaagaaaatcaaaattatatcaagtactctgtcagactacaatggaataaaattggaaatcatcttcaaaagaaccctcaaaaccatgcaaacacatggaaattaaatgacctcctgaatgatcattgggtcaacaatgaaatcaagatggaaattaaaaagttatttgagctgaatgacacaacctatcaaaacctccatgatacagcacaaatggtgctaaaaggaaaggttataccttaaatgcctacatcaaagagtctgaaagagcacaaatatacaatctaaagtaacaccttaaggagctagagaaacaagaacaaac

SEQ ID NO: 594643 - DNA, 575 bp, Homo sapiens
gctaaggacatgaatagacaattctcaaaagaagacatataaatgtccaacaagcatatggaaaaatgctcaacattgctaattatcaggaaaatgcaaatcaaaaccataatgtgataccaccttactcctgcaagaatggccataattaaaaaattaaaagataatagatgttggcatggatgtaatgaaaaggaaacatttttacactgttggtgggaatgtaaactagtacaaccactatggaaaggagtgtggagattccataaagaactaaacaagtagatccaccatttgatccatcaatcccactgctaggtatctacccagaggaaaagaagtcattatacaaaaaagataattgcacacacatgtttatagcagcacaatttgcaattgcaagwgacagaaccagcccaaatgcccatcaatcagtggataaagacaacatggtacatatataccatggaatactactcagccatgaaaaggaactaaataatggcatttgcagcaacctcaatggaattggagactaacattctaagtgaagttactgaggaatggaaaaacca

SEQ ID NO: 594644 - DNA, 609 bp, Homo sapiens
ttgaaacagtatttctgagaattaccattgcttttagagtagcagagctgaagttcttaaaattttttctccaaggattaaaaatacctggtgttaaaggaaacccatgagagtgattgtttttttgtaggtccttaaagatgaggctatttaggtggtgaatcctttactaaagggaaacctaagttagccagaatgttggcaagaaactctaccrcacatgctgagccccagggacctcatcatgcctagagttcaatatatgcaaagcaagtctgttgtccacttgggtcgacaatgatgagaggcttagtgatactgagggtggagaaagcaggttttgttccctcttgacagattatattccaagcaatctggtaacaggaggaggaagacaggtctagaataaaaatagagccctttaattttgaaaatgatgagagcaaatatagcaagagcaagagccagtcttggaggcaggaagtctgtgacatgaacactgctgaaatagaccaggaatattgattacaggaaaatgtggagttatgtggaagaaactttccttccactccatatcatttacttgtaaactatcaatgcttatcccag

SEQ ID NO: 594645 - DNA, 438 bp, Homo sapiens
tttttatagaatataaagtttgaagggaatagaaactgtagcaaaacgatacaagtctaggcactctgttcaacgcttacctcctatactaaatagttgatggtctctttggattttggaagcactctgttcaacttgttttatcatgatttctctatctctaccaaggcccagcagcataccaagaactatttttcaagtgataagtagttttctgctgcagaaggtgtggctgagctcagaaatactagggatctgtacattgcctttccaatttgggcttgccaaagactttagacatccaagatatcttgctgtggttatctttagtaacattagcaccttagtcatacgacytgagtggtaaggcaacttgcaccacagcctgcatcccacacaaaattgtcagtctccaagtcacctgatgcatggggcagg

SEQ ID NO: 594646 - DNA, 521 bp, Homo sapiens
tacctgtaatcccagcactttgggaggccaagcctgctggatcatgaggtcagggagatagagaccatcctagctaacatgttgaaatcctgtatctactaaaaatacaaaaaattagccgggcatggtggcaccacctgtagtcccagctacttgggaggttgaggcaggagaatcccttgaacccgggaagcagaggttgcagtgagccgagatcacgccactgcactccagcctgggtgacagaacgaaactctgtctcaaaaaaacaaacatctatggtagaggatattcccagtaatcaggtgaataaattgacgtagtttgtgaatatctttcaacttctttctccaacmaccctagtgcttaatgggcctatgtacaaagtggccatggcggcagggatatggtggcaggatgctatgcatgggctgaataacatggactttccctcaccaaggctgacatggataccactgttgttgaggctaatctatcaacatcagagatcaatgctgagc

SEQ ID NO: 594647 - DNA, 519 bp, Homo sapiens
gaattttataaaagtaaaacaaacacagaggttgcttatttctgaaaggaaatctgtctcactgaatttctttcaagaaaacataattgcccaaaatgatataaatcactattgctatctctaacaaattaacttgaaatgctggcaatgccaaggarcaacattaagttttctcttgtttactttgtcctaatcaccataaaaatccttagtgaaacaattattcttaaaacaatcacgacaatatatctctataaaggagaaaatcgatttaacaacaaaactagatttatcactattgatcaagaggtgttcaatgtaattttagtgaattatgcctagctctctttactcacagaaatttttcagtgacgcttgaaaggcagattgcagatgactgcataatcttttgcatgctatttacttgctatcttaatcactactcttataaaatatatgggacactgaaccaaatatttattttctatgatgtgaagcagcattactattgcatgcggc

SEQ ID NO: 594648 - DNA, 646 bp, Homo sapiens
ctattattaatttctctatacaaggcaatatgtctccttcaagtttatatagtattgacattgctacacttctttagttgcatgcaatgttatgatcattatatgatctctgcatactatggcctcatgtcaatttgcgctagacagctgttcactttgaagcaaaagctaagagattcacaatgttctgagcattggactagctattttatacatattgtctcagttcattctcttaacagacatattgttattaactataattaaatatttacatattgttattcatatgataaataaaataataagaaaattgagccatcgctacttagtgatgaaacaagagtaggtaccatatctatataatatttaataagcaaagtcaaagtcagggtacttagccatcaagccacagtttcccaaatttctttccttcttataccaccgaaattatttttgccttatcaagaaaacaaactaatgctataatattacttgtattgttcttagccastagttcaacttttcccttaaaatacttattttaaaaaggaaactatatcataattgaaaatcacttaatacatgaaaagtaacctaaaatatatatgcaactataaaaattttaaaagaaatattgattact

SEQ ID NO: 594649 - DNA, 564 bp, Homo sapiens
tctttacttctagcttatggttggagtggtatcttcataatggagatataacttgtattttttaaaaaagacttaaaacttttcaattacttctgtatgccaaatctgtacatagcactttacaatcattgtctcatttaatccttatatgatgctcgagatagatatcatttgcactccagcagtaaagaaacaggcttagaaaagtcatccagctaataagtaagacgctatttttaggttcaagtcattgtgtcctccccatagtcattatgttatgctggatttgtttacctttgccttggcatctttcaataaagaaatgaaaagcagtggacagagagggaaaatgttggtagaactgtgctcacacagctggctattgttctatctttctaaataacgtattttgctattgtcttgtgtcyctaagaagagcatgtaatatggtatggagggtagaaaaatatttactgatagaggggtaacaaataggtatctggtaatttcagaagttggatctggtagacagcaagtggagtttggggtgcattgagtaaaagc

SEQ ID NO: 594650 - DNA, 525 bp, Homo sapiens
taataagcccctggctgtccttaaattccacttttttatctccaactatgcttaataaaatacacaaggcaaaaaaagcctatctttatttaaataaaaaatacttcgtttttatgtcttaatctttatcagtaaatcacacagttgcaaatgaaatttagaaatagttaacaaaatgtgatcgtctggttctgagctgtgttgatatttaggataacataacatttcctatcaamgtgatattcaaatagaaaaatctcatcacattaaagtattatttacatattcatatactccttccttcaggcaaagactccagcctttctttacagatggatttagcaatgaaacataaaaaacaaacacagaggaaagaactgaagtatcacataggaactagtaacatgtattacctctcttcacttcccaaaaagtcttacctattgcatcttcataaacgttcttggaacctcataactcagaataattatgaaatagagcaatagtagtaaaactagcacatct

SEQ ID NO: 594651 - DNA, 525 bp, Homo sapiens
taataagcccctggctgtccttaaattccacttttttatctccaactatgcttaataaaatacacaaggcaaaaaaagcctatctttatttaaataaaaaatacttcgtttttatgtcttaatctttatcagtaaatcacacagttgcaaatgaaatttagaaatagttaacaaaatgtgatcgtctggttctgagctgtgttgatatttaggataacataacatttcctatcaaagtgatattcaaatagaaaaatctcatcacattaaagtattatttacatattcatatactccttccttcaggcaaagactccagcctttctttacagatggatttagcaatgaaacataaaaaacaaacacagaggaaagaactgaagtatcacataggaactagtaacatgtattacctctcttcacttcccaaaaagtcttacctattgcatcttcataaamgttcttggaacctcataactcagaataattatgaaatagagcaatagtagtaaaactagcacatct

SEQ ID NO: 594652 - DNA, 576 bp, Homo sapiens
catatgttaaaattaccacagcaattaatgcatacttaagagaagatactttggtgctatgcaaatattccrtttctccttaaagtttcatccactaattttagcatttatcagtgcctgcagcaattattactgtggcatactaatggtgattctctatttcattcactctttctatatttcttatttggattttttctgtaaggaaaatttgtgccttctccaccatttatttatttacttatttatttacagcagcatggactcttgcataattatattttaaaaaatgttttttctccttttctttttctaaattgaaatagggtctcactgtgttgcccagtctggtcttgagctcctgggttcaagtgatcctcccaactcagtctcccaagctgctgaaattataggtgtatgccactgcgcctagctgaatatttatattttgggttgtaaccaatactacagttacttattttgttgttcaaattattccagcttttgccactgaaatggctttcaggtttgctcctatgtccttttaatatgtccctttatttttagtttttgacc

SEQ ID NO: 594653 - DNA, 597 bp, Homo sapiens
tgagtttggccaatttttcccttccacattctgctatgtgaagatacagcattcctcccctctgaaccatacagccatcaagatatcatcttggaagcagagagcagacctcatcaaacaccaaacctgtccgtgccttgattgtggactttccagcctccagaactctaagaaaattaatttcttttcttgatatattattcattcttgaatattttgttatagcagcataaatggactaagacagcgtacttaaaatagaaattatttggaagtttgcatgtctgaaaatgtctttattttacatctttagaatgtgaattgttgactttgtggggagttctctgcttttcttaatcttaagatcagtcctgtaaaggtttggccagctcctgtcctatcgccatgttttgattcattggctcttactttttactatcaaaccctaaagagtcagttttaaggaaaacaaatttggaagatcagatctgccttcatattttaaattaagatagtgatgtgttcttttccctcaacaaaaaaaaacctttataaaaattttcacyagagttttataccccagtattgctttttata

SEQ ID NO: 594654 - DNA, 576 bp, Homo sapiens
tataatatcaacaaatatttattaaataactacaataaactcaggaactaaggaaaatgtgaaagaagtataagatgttttctaagttaaaggatcttaccatttccttgaagatcaygtgcatggaattttagaaattcacatacaatattatacacaaagtcacttttaagatataggcattaggggttaccaggctcaaagaaggtagaaacacaaataataaacaacaaccttttcctagtttagccaaccttcactgaaacagttctagttctagtggtcttaatatcttgtactcaacggctcgacttcaagggctaaatgcatgtaatctagttttaagattaaaatgtaatatatacatatgtatattgatattcttacagctgaaggattttttttaatttagtagaaacaggtgttttaaaaccacgcatatagagatcaattccagtgaccttcactagctaaaaactaatttcaaacataagacttgtgacttggtacatcttacaaaggttctgctttgatgcttacagtctaggagcttgagtgtcctctgcagaaagagag

SEQ ID NO: 594655 - DNA, 664 bp, Homo sapiens
ctgtgtatctagttatgaggaactggaaaagacagaggacgggaaatgagacaggctctgaaatagttagctcagacatcattttacccagatgattctccttaacctcctatattatttgcttctagagcagtctgtgtatattttttattatactgttcaccacattgtagtgacattamatgtttatacacatttctaccaccagaattgtattgttcagttatcatttattatttatttttgtatctccagcacttaccatagagcctatcatatagttggtgccaaataagtgcagcataatctgaaattgatacgaagaatatccagtatacttatatgatataaagcagccaaaaagtgcacgtatcattatttactttgttcttgtttcttacattccatcttgttattaatagagggccactaattataaattcttttacagatatagatattattgaaacttggttgaccattgaacaacgtgaaggttaagaatgccaatccttgcacagatgaacacatgagtataactttgctcccccaaaacttaactactaatagcctaccattgaccagaagccttatcaatagcataaacagtcaattaacacatatttcatgtattatatactatattcttacaataaagtaaacc

SEQ ID NO: 594656 - DNA, 529 bp, Homo sapiens
attatatactacaatgtaatactaatagaaataaagtgcacaataaatgtaatgcacttgaatcatcctgaaaccatcccccctccctggtccatggaaaaattgtcttccacaaaaatggtccctggtgccaaaaagcttggggacagctgcattacaacaaacatgtacacacactctacttaactactctaaactagtcacaaatactaaacgtcatcctaaatcagtgattcttaaactttttggtatcaggactgctttatacttttaactagcattaaagaatccaaagaatttttgttygtatggattatgcctattaatggataccatattggaaattaaacccataaacttcttaaaacacaagtctatacagcatacattctgttagtgttcagagtgattatgtaattgtaagtcaaatagcttctggaaaactgcatgacactcaagagagaatgaaagtaagaaagcaactaacatcctggaatcattcattataaaagtttgaacttttgtctca

SEQ ID NO: 594657 - DNA, 565 bp, Homo sapiens
aggtgccaagccaatcttggagccctcactgtgaaccagggattagggcaattgctagtgctgaaatggttgccgtgatcacagtctctgacaacagtctgcttagacgactggataggcccactgaagaaagacaggcacacacaaagccagaattaaaagactggagtgaatacctaacttgttaatgtgcagacattagcatatgtccacaagcatcaagaacaattagggaattatgacctcaccttatagacaaaacaagtcaccagtgatggattctaaagagatgaagatgtgtgatctgttagaaaagaaattggaaatagcttggttaaaaatgctcagtgaacatcaagaaaacacaaagaaacaattcagaaatttatcagagaaattttaaagaaatattaaaataatttttttaaaaaataatataattatcatrttacataatataataatccaccttgctcaggaggcatgaaagatttgaagtgaggagagaaggtggcaatagtcatctagaagggtgagtgagtgaaagggttatcgaaatgtagaa

SEQ ID NO: 594658 - DNA, 573 bp, Homo sapiens
tgtatggttttggtatcaatttttattgcagtgtggtccaagagcatgcttggtatgattttgttttttttgaatttgttgagaattgctttatggctgagcatgtattcaatcttaaagtatgtgccrtgtacagatgtgactaatgtatattctgttgtttgatggagtgttttgtagaagtctgttaggtccattcggtcaagtatcaactttaggtctcatatatctttgttagggctgggtacagtgactcatgcctataatccctccactttgggaggctgaggcaggcagatcacttgagcccatgagtttcagatcagcctggccaaaatggcaaagccccatctctatgaaaaaatacaaaaattagccatacatggtggcatgtgactgtagtcccagccactcagtaggctgaggtgggagagttgcttgagcctgacaggtggaggtttcagtgagccaagatcgtaccactgcacttcagcttgggcagcagacagagactctgtattaatgtatttatattatatactatatattatatattatatatatataatatat

SEQ ID NO: 594659 - DNA, 573 bp, Homo sapiens
tgtatggttttggtatcaatttttattgcagtgtggtccaagagcatgcttggtatgattttgttttttttgaatttgttgagaattgctttatggctgagcatgtattcaatcttaaagtatgtgccatgtacagatgtgactaatgtatattctgttgtttgatggagtgttttgtagaagtctgttaggtccattcggtcaagtatcaactttaggtctcatatatctttgttagggctgggtacagtgactcatgcctataatccctccactttgggaggctgaggcaggcagatcacttgagcccatgagtttcagatcagcctggccaaaatggcaaagcmccatctctatgaaaaaatacaaaaattagccatacatggtggcatgtgactgtagtcccagccactcagtaggctgaggtgggagagttgcttgagcctgacaggtggaggtttcagtgagccaagatcgtaccactgcacttcagcttgggcagcagacagagactctgtattaatgtatttatattatatactatatattatatattatatatatataatatat

SEQ ID NO: 594660 - DNA, 487 bp, Homo sapiens
ggatcacttgagaccaggagttgaagactagtttggccaatataatgaaaccccatctctactaaaaatgcaaaacaaaataaaacaaaacaaaccaaccaacaaacaaacaaaaaactagcctggtgtggtggcaggtgcatgtaatcccagctacttgggaggctgaggcaggaagatcacttgaacccatgagttggaagttgcaatgagccgagatcatgacactgcactcgagcctgagtgacagagcgagaatcagtytaaataaataaataaaacagaatctgctcaaacctaaaaagagaaaaataattgttaaatatgatactcttttacttcaaaagtgtagtttccattattaataaacatctgaaattagacttggccgaagctttagttacaaaagcacatagatacttcaggaaaaaaaaaaaaaagatttagcagaaacagaataaaacattgatgtcactgtaaatgtgat

SEQ ID NO: 594661 - DNA, 470 bp, Homo sapiens
gtctcacctaaaggtatctgtatccaagatgctgaggtcacctgtatggctaaagtttgtctaaggcacaggtgcttgcagccttgcctgaataaaaactgtcactttcctaggacaaagttaatatgctccagtgacccatcaaagtcaaaatcccacctggccaatttactaaagcctgaggcctaatgctacccacccagggtgcatgagctaaaaaaaataataataataaattgtaaaaagtagccatatggccagctatagaaagttmccacctaccaaagtaaaaaaaaaaaaaaaaaaaaaaaaaaaaaacatgactcccacttctattcctacttggtgaaacaaaaccccgaggccattcttttggatcacttagggtcttgcttcaacaagatgcttcaatctccacagttccctttcttaccaaattctgctccttatctattgccaagttggctagt

SEQ ID NO: 594662 - DNA, 478 bp, Homo sapiens
tgtcaagggaggaacttggtgggaggtgattagattatgagggtggtttcccccatgctgttcttgtgacagtgagtgagcgctcaaaaaatctgatggttttaaagtgtggcacttgccctttgctcgctctctcttctgtcaccatgtaagacttgccatgcttccccttcaacttctaccatgattgtaagttttctgagacctccccagccatgtggaactgtgactcaattaaacctctttcctttatcaattaccaagtcttagatggtatctttatagcagtgtaaaatgggctaatacagtgcccttataaaatagacccatargaactcgttcacccctcccaccacattaggacatagcaagaaggtgacataaatgaaacaggttctcaccagacaccagatctgccagcaacttgatcttgtacttcccagcctccgtaaatgtgaaaaataaatttctgttgttt

SEQ ID NO: 594663 - DNA, 489 bp, Homo sapiens
aatgattccatatcttggctattgtgattaatgctgcagtgaacatgggagtccagatacctcttccacatactgatttcatttcctttggatatatacccagtagtagaactgctgaatcacataatagttccatttttaatttttttgaggaatgtacatgatgttttccataacagctatactaatttactttccctccaacagtgtacaagggtttccttttctccataccctcaccaacacttgctctttttcatctttttgataatacccatgctaacagaagtgaggcaatatctcattgtgattttaatttacttttccctgatgattagtaatgctgagcattttttcataaacytgatggctacttgtatgtcttttttacagaaaggcttattctgtttctttacccatttttttaattgggttatttgttttcttgctagtgggttgtttgaattccctatctatcttggatattaa

SEQ ID NO: 594664 - DNA, 474 bp, Homo sapiens
atatcctatcaattctctcagttaaaaaaaatctttattttacccttcctattgaacattttatttctttttttcaaaaagtattactttcttgtggtaagaagacttaaaatgagatataccgtcttaaaaaatgttaagtatacattattatgttaggtatrggtacaatgttgtacagtagatctctagagcttattctgcttgcttaactgaaaatttatgcctgttgattagtaactccccatttcctggagacaggatagtctgttcaataaagtatgttaggaaaactggatatccacatgcagaataataaaattagtcccctatctcacaccatatacaaaaatcaactcaaaatgaattaaagacttaaacacaagacctgaaactgtataactactagaagaaaacataggggggtgggcacagtggctcatgcctgtaattccaacacctgtgaaagccaag

SEQ ID NO: 594665 - DNA, 494 bp, Homo sapiens
ccataattaatagaatgtgctaggaatgtaatagtktatatagtttagatgtgtatgttaacaaaacatagtaattctgttaggattggcagtagcccctttatactgaaacaatctaaaaaacccagtggaattaaggccaaattattcaccgtgctgcattatgaaaagtaagcttacatcatgcatatatcaatgtggaatgtatttcgatatatatggaggtaccatatgtgaaggttactttaaaaatagaaaagcctgaaaaaaaaaacataaaaaaacaggttttcactttgttcacttaaaatcttgttccaagacatccgtgtgtaggcttctttaagattcttaagcaaatatcttggtagactcaccatcccactcaattgtttctccaagttccaggcattgaaatacaagttctgctagacagtagaggagtaaatgatataaatcaggaaataagttcctaggttacacttagcaagtca

SEQ ID NO: 594666 - DNA, 500 bp, Homo sapiens
ggggctattcgtcctatcctgtattatttttcaattttacagttttcttgcctgtagctaaaaatcaacattattctctcagaaagccattccaacaaaaccaaacaaaattatcactattttgtttaaaattgccttaaaacaatagtcacttgggaaagcatggtatctcaatagtatttaatcttcctattagagagatggttcatttcttcctgtttgtctggtgctgctgctctctgtttcatcccatgatgcacctctccatgctctgggcactcttccctcactcaggagtccagagtggagagtgagttctaaacccaataccaccacctgctcgttgtgtgaccttggacaagatgctggrtctctccaaatctgtatgttatctgtaagatggagttattacagtagctactgttgtgatgatgagatcattttaaagatgaaataggaatttatgctaaaagcagtttatgtggaattaaactagcact

SEQ ID NO: 594667 - DNA, 575 bp, Homo sapiens
attttttaagcaccagcaatatgatagatggtgtccttgccaccaatgatataacatagtctgtgccgtttatttttcgtagactagtarggaaaataattatataaacaaaatagattaagaaagtatcacatgtgctctaagagtagcttctacctgagatagccagggcacaaggaggaagtcagtcagtctaccagtggagcaggggagacacaagaaaagattctactataagctgcaactcagggcaagtgttgaaagacaagcagatgttctttaggtggagagggaatagaagagcaatctgaaaagaaaagctataggagtaatcacacagagatgtttttctaggaactgtaagtgggtaagaatggtgaaaaggatgggagtgcaggctagaggtgattgggattaggaagacataccttagagaagcactactccaagtgtcatccaagggggaacagcacgggtgtcaccagggaaagtgttggatgtacagaatctcagtcccacccactcccctatatcagaatctctgccttcaccacatccctggggcgttcacagga

SEQ ID NO: 594668 - DNA, 622 bp, Homo sapiens
tgccgtgtctctgatatatatacatttaagtacaccttttacttaatctttatgtcctctttgtcaggtatctgtgtggataagtgcctttggtagtatatggcattttgttcaatttgtttgctaatgggcaaataaatagaaagcagctactctggttccctcagaaccagaactgcaatgttgaaagagatgtgtcagtttgtggaattcatcccatttctcatttatagatacgtagacaagccatgtacattcagacttgtgctggttgcacacagatagacgtggtcacagagctgtaattctgtggttaagatctaattctagagacctggaatcagctggactccatttattgacactcagaatttcaaagaacatttcatatgtgactgaactatgaggctttctgtgtccccacagcactgaaagaagcaaagttctgctgagtaggctgcaaatgaaagtgagcctggtctccatgtacaragagaagcaaagcagctctttttttgcctttttatttgcaaagagatattttaagagtccgtgtatgtttgatgaagatgtgtgtgattgataaactttgagaaataaaatagacaagaaaatagagtaa

SEQ ID NO: 594669 - DNA, 610 bp, Homo sapiens
gcatagagcgaggtttactgtatcataccccatgcttagtaaagcactttgacaaattaaattagtcattagtayagcctattggtgacatcattgccatcttacagattgacaaactgagggctagaaaggaaatgatttccttaatggaataaagctattaaatggtagaacagtgcctttgacccaaggtgtttgggtcctggtctatttccccttcaaaatgctattataaaataaactcttgtatagtaaaatcataaatgtaaaatattttattatggattcctcatggaacattaaaatatagtcattgtattcctatatgaaataatatattcactgtataaacagatatatttcatgcttagtactcctagtacttcttctttttgtctcccatttatatgtatcaatgtttattgcacaacgattataaacataggaacttcccagcttggttgtacactagaatcactagagaaacctttatacaaatacagggtatcatctggcatccacggataaacatataatgtcattgctaatggtgatgccatagggttaaaagtatagtctctacctttaaatattctctccttttaataaa

SEQ ID NO: 594670 - DNA, 354 bp, Homo sapiens
agtgcatagagcgaggtttactgtatcataccccatgcttagtaaagcactttgacaaattaaattagtcattagtacagcctattggtgacatcattgccatcttacagattgacaaactgagggctagaaaggaaatgatttccttaatggaataaagctattaaatggtagaacagtgcctttgacccaaggtgtttgggtcctggtctatttccccttcaaaatgctattataaaataaactcttgtatagtaaaatcataaatgyaaaatattttattatggattcctcatggaacattaaaatatagtcattgtattcctatatgaaataatatattcactgtataaa

SEQ ID NO: 594671 - DNA, 501 bp, Homo sapiens
ttattttgttgtgcagaagctttttagtttaagttctatttatctttgtttttgttgcatttgcttttgggttcttgggtcattaagtctttgcctaagccagtatctagaagggtttttctgacgttatcttccagaatttttatgatttcatgccttagatttaagtctgatccatcttgagtcaatttttgtataagctgagagatgaaaatccagtatcattctctacatgtggcttgccaattatcccatcatttgtcgaatagggtgtcctttccccactctgcgtttttgtttgctttatcaaagatcagttggctgtaagtatttggttttatttctggaatcgctactctgttcccttagtctaggtgcctatttttataccagtatcatgctgttttggtgaccayggcattatagtatagtttgaagtcaggtaatatgatgcctccagatttattatttttgcttagtcttgctttggctatgaaaact

SEQ ID NO: 594672 - DNA, 513 bp, Homo sapiens
gtaaaacatttatataagtaattgaattttcaggttctcagcatatcttaaatggctataaacacattcagatatatgagagaagtaagccaaatacaaagaagagctaaaacaaaaaggttaattacccagatttttcaatacgctttttttttgctgtgctcattatacttaggaaaaagtagtaaccagtcaaaatgaaccagctgtacgaattaggttggtaaaaaacaacatctacatcttttggatctgtcctgtagttattatatataataaataaccttaatttgttgttttacagatttacaatgcacttacaaaggtccagatgaatattcgacaatatccacacttcakaaatgaaagaatagagtttcggagctgtgaaatgaatagtcctagcttctcagcttaccgtgggtccactgggtccagatatggactgtggtcctctcactcaatagcacatgctcctccgattaccagaaacaaaaataagcaaacaaataa

SEQ ID NO: 594673 - DNA, 441 bp, Homo sapiens
gaaatggatgaactcataaaaacacacaacctatgaatactgaacaagaaagaaatagaaaatccaaacatctgtaactagttaagacattgaatcagtaataaaagaaaataaattaaaaaatctcagcaaagaaaagccragaacaagatggcttcactgaagaattctaccaaacattaaataaaatgaaaattcttcccaaattctttcaaaaactttaaaaggaggaaacacttccaaactcttttaggaagccagtattaccctgataccaaggctagacaaagacattacaagaaaagaatataccaggtcattatcacttgactaatatcaatccaaaaatcctcaacaaaatgctagcaaactgaatttaacaacatattaaaaggatcatacaccatggccaagggaaatttatctctgggatacaaggtg

SEQ ID NO: 594674 - DNA, 561 bp, Homo sapiens
tccctcagagatcccctgttccacagacaccctgcctaatcttgctcagggcagctgaataggactgacaggacatcagggcacctgccctttagctgctcctgacaccgcattccataccatggccaaaaaaggaccagatcctgtttgtaatttcttccagtttttaagtgataattttgagaccagtgcaaagttcttgacccttttcccattttcagcaataaagagattaaaaagaaaattagcacaacattctctcagctttgaccaattcccctgaagtcagggaaaggacatcataacaggaataacaaagactgggaatttcctatgggactagagatgcacagacagcaaaaggtggggcaggggccataagcagaaaaagcctccacttcaatccacaaatgtggggttaggccacrttaacaagactgaagatcacatgagtctttgaggatcaccctggtaattctgacgcaaagtaagaaaaagactacagatcattgggaaaatctaagtgggtctgatatttcacaaaattcaaagcactcaaat

SEQ ID NO: 594675 - DNA, 581 bp, Homo sapiens
aatctaagtgggtctgatatttcacaaaattcaaagcactcaaataattttgytgtgtactgagttgattcaattggcaattatttccaacatacataatttccggttgcgtcatttatttgagaagtgcaaagtgacataatacttaaagagtgttttaattcagcttgttttataaggccattgatttggggatgagattcaagaaatatcatggtacaaaagttctgaccaacaaaaattaaataactttaaaatttgtaaaacaattttttaaaattatgttaaaaagtagctgccaaaaaaagctcaaataaattttgccaaatagattagttcatttaatctattgccaagagctagatcaaaaagaggacttaaatttttttctagaaatacaaataatataaagtgccatttttctattatgtcagaattatatacaaattcaagacagcagaaacaaagtactcaagtccatttctgtgtgcatgtctgagatactcttccatgacttagttctcaaaaagtcacatcatttttattgatatgctaattaaataatgattatgccatatatt

SEQ ID NO: 594676 - DNA, 598 bp, Homo sapiens
acacaaaatttgtgaccaatgtgaatttgtttagtaaatgtagccatatatatcttgcgttrtaccattgaatattctaatagttcaatataccattggaatataccagcggaaaatatcattacaaatagtttgacatactgtatttcttcaattttaagaataatttggtaccacattttaatttctttgaaactgggatgtgtcttactatcaaataaacatccagtggccaggtgatagtgatgatatagttggcattgcctatttttgaacatgggcataaatgaattgttatcatttctactaaattctatgaaatttagtcctgttgtgtcaaagccatatgccaagaaacatagttgaaggcaggagaaattaccagatatgacagattaggtgaaagaaattctaaagcaaagagaggttgatataaccaattcatgtatcatgcaggactatggttaaggcatgaaactaccatttgtgagaaactttctcctggccattaatagagaagctgcatagcttgtagtgacatacaattcagttgaacaagaaaactatgtgtttagtcaaatgggatagtgccagcatc

SEQ ID NO: 594677 - DNA, 598 bp, Homo sapiens
acacaaaatttgtgaccaatgtgaatttgtttagtaaatgtagccatatatatcttgcgttgtaccattgaatattctaatagttcaatataccattggaatataccagcggaaaatatcattacaaatagtttgacatactgtatttcttcaattttaagaataatttggtaccacattttaatttctttgaaactgggatgtgtcttactatcaaataaacatccagtggccaggtgatagtgatgatatagttggcattgcctatttttgaacatgggcataaatgaattgttatcatttctactaaattctatgaaatttagtcctgttgtgtcaaagccatatgccaagaaacatagttgaaggcaggagaaattaccagataygacagattaggtgaaagaaattctaaagcaaagagaggttgatataaccaattcatgtatcatgcaggactatggttaaggcatgaaactaccatttgtgagaaactttctcctggccattaatagagaagctgcatagcttgtagtgacatacaattcagttgaacaagaaaactatgtgtttagtcaaatgggatagtgccagcatc

SEQ ID NO: 594678 - DNA, 561 bp, Homo sapiens
atttgaaaatcagttgccaggatcacaaaagacataaatattttgtcatcttttttgttgcttgtttttgtcaccgtggcctttggttgtgttttattcccgttgtatgcccattcatccttgagtgcatgtaacagattggcagctgaaaacttaaggttagggtggacactgtgtggtattgctcccctatattgtcccattagctgcacttattaaaatattgycaaatatgacataaagaaacagggaaaactgaagaggggtattttggagtgtgtgcttccttccacagaaacaacacaggtttcagcaataaggcagattctttttggcagccacattttttcttggttaatcagagcactggaaccagtctatataaatggcacatatgcaaaacacaagcaagcctgttttattttagagcccgtggtcttaaagaaaataaattacataacattttatgtgttttttccaactctgcaagtatagcaaagttcaatttaacagtgatggtgaatcacgagttgtaaaatgagctgacctgctagttatttg

SEQ ID NO: 594679 - DNA, 609 bp, Homo sapiens
tgcccagtgctgaatgtgggatgttgaagtctctagctattatggtactatggtgtatctctttctttacctttaataatatttgctttatatatctatgtgttccagtgttgagttcatatatatttaatattattatatcctcttgctgaattgacctcattatcattatatagtgactttctttgtgtcttcttgcagttttttctggaaatccattgtgtctgatataagtatagcaactcctgtttttttttgttttggtttccattgacgtggagtatctttctccatcctttgtttttagcctatgtgtgtctttataggtaaagtgtgtttcttgtaggcaacagatcaatcagtcttgttttttcatccattctgccagtctgtgtcttttgattrgagagtttagtccatttacattcaatgttattattggtaagtatggacttactcctgcccttttgttatttgttttctggttgttttgtggtcttctattccttctttccttcctttttgtcttcctctagtgaagattatttcatctgatttagttttttgctttttattttttgtgtttaaggttatcatgaggcttgcaaa

SEQ ID NO: 594680 - DNA, 609 bp, Homo sapiens
tgcccagtgctgaatgtgggatgttgaagtctctagctattatggtactatggtgtatctctttctttacctttaataatatttgctttatatatctatgtgttccagtgttgagttcatatatatttaatattattatatcctcttgctgaattgacctcattatcattatatagtgactttctttgtgtcttcttgcagttttttctggaaatccattgtgtctgatataagtatagcaactcctgtttttttttgttttggtttccattgacgtggagtatctttctccatcctttgtttttagcctatgtgtgtctttataggtaaagtgtgtttcttgtaggcaacagatcaatcagtcttgttttttcatccattctgccagtctgtgtcttttgattagagagtttagtccatttacattcaatgttattattggtaagtatggacttactcctgcccttttgttatttgttttctggttgttttgtggtcttctattccttctttccttcctttttgtcttcctctagtgaagattatttcmtctgatttagttttttgctttttattttttgtgtttaaggttatcatgaggcttgcaaa

SEQ ID NO: 594681 - DNA, 568 bp, Homo sapiens
tatgaatgctagcattcctcatggtcattcctcaggctcactgcccttctcattccagtctccctaagtaacctcatccactcacccagcttcaactattgtccatatgctgatgattcccaaatccatgtctccagttcaggtctcctctctgagcttctgatttgtttatttagccaacttggacgttctataggaatctcaatgacaacacaacccaaatggaacttatccactctccctatgtttctatcgtagatgaaggaagagcatctacctygctgcccaagccacagacaatattccttgacttctgtcctgaaatgtgctcacccaatcagtttccaagtctgcctccccagtatacaggtagacttctcaccaccttaccatcatgtcaataggggccactgccatcccttgcctaatcaactatcactggcctcagaactggccccatcaccactatcatcttcataatacatgaatttagcctctacatcatcttacgatcaggcccccaacagcctagcatgtataacaaggccccacacagctggttccctag

SEQ ID NO: 594682 - DNA, 579 bp, Homo sapiens
aacctttaacatcaatattatttttttatcatcatctccatgatacaagtgaggaacaaaggcttagaaggctaatttgtccaaggtcatacagcaggtaagaggtagagttaggatttgaacctgacagtctaactccagacttaatgcttctaactcttaagctttgcaatcatagaaaggttagtgaattttggagaaagctagtttttctaggtgtatggaaggatgatggtcagggtattaccgtggccacaaaggggatgaagatcatcaagatacttgctaacttacttaggtagaggagtragaatcctcaactgctatgattctctatgccaacagctagaccatgggaagaatatacccaacctagacctacagaaatgaagcattaagagatggggagaaaggccgggcatggtggctcacgcctgtaaccccaacactttgggaggccaaggcgagtggatcacgaggtcaagagatcgagaccatcttggccaacatggtgaaatcccgtctctattaaaaatagaaaaattagctgggcataatggcgtgcacctgtaatcccag

SEQ ID NO: 594683 - DNA, 579 bp, Homo sapiens
aacctttaacatcaatattatttttttatcatcatctccatgatacaagtgaggaacaaaggcttagaaggctaatttgtccaaggtcatacagcaggtaagaggtagagttaggatttgaacctgacagtctaactccagacttaatgcttctaactcttaagctttgcaatcatagaaaggttagtgaattttggagaaagctagtttttctaggtgtatggaaggatgatggtcagggtattaccgtggccacaaaggggatgaagatcatcaagatacttgctaacttacttaggtagaggagtgagaatcctcaactgctatgattctctatgccaacagctagaccatgggaagaatatacccaacctagacctacagaaatgaagcattaagagatggggagaaaggccgggcatggtggctcacrcctgtaaccccaacactttgggaggccaaggcgagtggatcacgaggtcaagagatcgagaccatcttggccaacatggtgaaatcccgtctctattaaaaatagaaaaattagctgggcataatggcgtgcacctgtaatcccag

SEQ ID NO: 594684 - DNA, 542 bp, Homo sapiens
ttctctgctcttctgagttgcaccacataattggttggggtccacatgaccagcaacaacagagaagcactgagcagaagtgaaatgtgtgatgcaggcaggaagcaaggtgctgttgagttgtgtctgcatggaattggtcagagttcattcagagtctgtaataattaatcttacctacttgacctgttgacataagaattaaatgttactgcacgtaatgtacacaggacactgcagaacagctagttatccttagcattcagtagatattaactattgctgctgttgttactgctgctattgctattgctactactactactattacygccattagtattataggtgttagaaaatagtgatgataccataagggtatataggatgggttagaataggggagaaatagaggtggggagaccaggtaaagcctggagcacacacctgagtgtattgaatgaattaatcagaaagctattgaaataagttcaggtaagcaaataattaaagcaggttggtatattttttaaaatcccatg

SEQ ID NO: 594685 - DNA, 565 bp, Homo sapiens
aagcatattgaacatacctcagaattgtcccactggacaatgagaaggttaggattttacctaccaattcacactcttctctgaatgaggattgactctatccctggtagttaattcactcatgctttgtcatgagtctctgtgatggcgcaagctttcacagtgtagagaaaaccctcaggcagataaatgagtagaagcaggaactcaagaggggaagctaccagtgtgccagaaaccatctaccacagtgacaggtgaactcagagctggatcaagaggatatggagtggacaccaaaagcatctgccacactgcttatcaacatctgttgtttttatctggccattatctctcacccacatctttgggtcatggcatctccctttcatttggtgaactgttagtcctctactccatgcatttcatgtgtgtctgccaatcaagaactgcttgattctgtcatactgccatagaattttatatgtggacactggaagagagaatatgtctcttttctcttagtgaactgactagaataatayaaacctggagctgtctacag

SEQ ID NO: 594686 - DNA, 601 bp, Homo sapiens
acttattacttgctgtttattttatgtttattttagactatggaaatgatgttagacaaaaagcaaattcagtttgagaaataaaggggcagagtacaaaagagagaaatygtaaagctgggcatccgggggagacatcacatgtcagtaggttccgtgatgccccacaagccacaaaaccagctagtttttattagtgattttcgaaagggaaggagtgcacaaatagggtgtgggtcacagagatcatgtgcttcacaaggtaatagaatatcacaaggcaaatggaggcagggcgagatcacaggaccacaggatgagggtgaaattaaaattgctaatgaagtttctacacgcgttgtcagtgataacatcttatcaggagacagggtttgagagcagacatccggtctgacaaaaatttattaggtgggaatttcctcgtcctaataagtctgggagtgctatgggagactggggcttatttcatccctacagctggaccataaaagacagccgcaccgaaggggggcattttagaggcccaccctcagggacgcattctctttctcagggatgttccttgctgagaaaaagaatt

SEQ ID NO: 594687 - DNA, 533 bp, Homo sapiens
gcatatgcatcacatcaaaactctcagtaacctaaaaaggacaaaaagaaaagatgtggcaggaaatctaatgcttaactcttttgctgcataactgaaatctttaagaacattacttttttctactgctttccttcagaacttccctcctctcttcaactctaactacccaagtggggggaataatcagcaatttttatgaacaatttattatcgttgtcaattgaatggagggagatcagaatagtagagaaaactctgaatcttagcttttagctcaatcwactcaagaatcccctctaagcctcaggaaaaccacttaattgccagtaaaaagcttagaaaactgcgggtttagagtgaggaccacctctgtttcctgcaacaattaaaaacaacgaaacactaaacaaggacatcaataacaagctataatttcgtaagagagaaaattctctacacactagatttttctacttaaacaccctcaccctaaaagtaatgctcttaaacatttctcctctgggaaatag

SEQ ID NO: 594688 - DNA, 590 bp, Homo sapiens
atctataggaatgttaaaaggactcaagatttttgaaaatacaattttaaaggtttttcttttacacatctccagggtttggtacattaattccttgcacttttttttttaacactagcttgaaatktaaccgtagaaaaagaagagggaagcatttcatttccttggaaagttaatgaacatatgaaaaggtaaaaagagttaccacaatgcccgccctccctctccaacagtagaaatagcctacaatatgcagcttccacactgagttacaggtacagcccatgtcaggcttaaacactttgatttaggactagctgcaggtgtaggaacagaggtcaaagatctaaccattacggtttatagaacctttaatacaagatgaatgggatgccatcacattttcttagactttcaaaatctgaactttaccctctagtcttatgacacagaatggtaaattcaattttttaaaaaacatacaggctgaaagcagtatatacaggagacccattcacagtaaatcatgacttgcatgcggagggcacttacactatgcctaggacagttagagattgaacataaaaata

SEQ ID NO: 594689 - DNA, 590 bp, Homo sapiens
atctataggaatgttaaaaggactcaagatttttgaaaatacaattttaaaggtttttcttttacacatctccagggtttggtacattaattccttgcacttttttttttaacactagcttgaaatttaaccgtagaaaaagaagagggaagcatttcatttccttggaaagttaatgaacatatgaaaaggtaaaaagagttaccacaatgcccgccctccctctccaacagtagaaatagcctacaatatgcagcttccacactgagttacaggtacagcccatgtcaggcttaaacactttgatttaggactagctgcaggtgtaggaacagaggtcaaagatctaaccattacggtttatagaacctttaatacaagatgaatgggatgccatcacattttcttagactttcaaaatctgaactttaccctctagtcttatgacacagaatggtaaattcaattttttaaaaaacatacaggctraaagcagtatatacaggagacccattcacagtaaatcatgacttgcatgcggagggcacttacactatgcctaggacagttagagattgaacataaaaata

SEQ ID NO: 594690 - DNA, 540 bp, Homo sapiens
gccttctagagcacacataatccggggtttccttctactcccactggcatctccttctcagcattcttggccagtcctcccccacccccaacttctcaatatcttagtgttggaaggtstcagggcttggtgctcagctttaacttctctatctctagtctttctccaataatctctttcagcaccattgcttgaaattccatctacatgctaaccactcccaaatatgtctccagccttcaaatggcccaaatccaaacctgcttgcctgcctgttcaatagtgcctcttatgtctcatagccatctcaaaagactatgtgggacaagggacaaataactactgcaaaactcaacagcattagaaaaggcaaaactatagaaataataaaaaagatcactggttgtcaggggcttaaggagagggagggatgaacaggtggaacacagaggatatttagagcagtgaaactattctgtatgatactaataatgatgaacacatgccattatacatttatccatcccatagagtgtagaa

SEQ ID NO: 594691 - DNA, 540 bp, Homo sapiens
gccttctagagcacacataatccggggtttccttctactcccactggcatctccttctcagcattcttggccagtcctcccccacccccaacttctcaatatcttagtgttggaaggtctcagggcttggtgctcagctttawcttctctatctctagtctttctccaataatctctttcagcaccattgcttgaaattccatctacatgctaaccactcccaaatatgtctccagccttcaaatggcccaaatccaaacctgcttgcctgcctgttcaatagtgcctcttatgtctcatagccatctcaaaagactatgtgggacaagggacaaataactactgcaaaactcaacagcattagaaaaggcaaaactatagaaataataaaaaagatcactggttgtcaggggcttaaggagagggagggatgaacaggtggaacacagaggatatttagagcagtgaaactattctgtatgatactaataatgatgaacacatgccattatacatttatccatcccatagagtgtagaa

SEQ ID NO: 594692 - DNA, 587 bp, Homo sapiens
tattcctcctgtaccttagggtagaatgaaaagaaataaaacatagctagaactggcaggaagctgactayttctggctttgcatttactatctgttctcattattcccagaagttatgttccatgaagttgctgtgaacattgaattactggaatactgaactagtggaaacacagtgtgggttcctacaagcctctggtcacaataatttcatcaactgatcaatacataactttgttttctgagtgtttcagtttaaaaacaccttatttaatgtatacagtgttgattcactaacaatgaactcacgccaatggcactatcactgcagtcacaaaactatgacatattgttgatttgttaatattgaactcacgccaacagcagtacagcactagaactctaacttacaatagcactatgagcttaccttaaacacacattttctctgtaagacaccacagccttcttgtaaacactaaacagttttgcacgatgctttgggatcactttaaacagcaaaatgatcaacaaaaagcacaaaaatacaaaaaactgtggcacttaatcgaccatcagaaggaca

SEQ ID NO: 594693 - DNA, 560 bp, Homo sapiens
tcatgccaggaaagtctggaataaaatagataaaggcaggcaagtttctccagtttgaacacctgagtttccaaatattggggtcttcaaagagtccggaaaaatatgctttattcaacagcatgcagagaaaacgtatcttagttctaaataattatactgttttccccattctaagttggaaaaggtactccataagtaacagaaaatcacttagtgtctctctctctgaaatattaataaaatgatatcctgatctctaaatttattaaaacagtggtaaaataatattctggacaaataaaattatattacaatcacaaaagcagctttgtgaaagtaaactgggtattggccaggaagactgaaaaaagaaaaaggattaaaaaataagtcaaggttcaaaacaggaggcatacagtgacccctaggaatggcataagcataagtgaggtaaaccaaactcctcccatatttaatatttttaaaacctgaaaaacacagattctcaaacgacyatatgagatcctccaaaaatcaaagataaaataattaaatct

SEQ ID NO: 594694 - DNA, 538 bp, Homo sapiens
cccctgttttattctgggctcatatttcttactgcttgtttctcatttccttgtgtttccttttctaactacattatgtttattgcagatgctgaaactacagataagtacacagacagaaattaaaataactcataattctatcattaaagataattatcctttatgttttgataaattacctttcaaataattaaaatctagaacaatatgaaatcccactctttagacctgctttaaaatctgaatatattaaagtccatattattaaatattcctttaaagcattttattggttaaataatcgtacattatataggtatacatagcttattaaactaaamccatatttctattacagtccttttagaattttccttcagttttcctggcctcttagagtgatgatctttacatgcctactaaccatgaactacattatacttttgttatttctcctaagactttgttcactgagggcagtctatttaaggatacatacatactctattgaaaaggctacaacataatgcttggt

SEQ ID NO: 594695 - DNA, 581 bp, Homo sapiens
gtgggtttgagttggttttactatcactttcaaccacaaatgcttgactgatataacacatatatatatttaataaatattatgtcaaagtcttatatgtagataatatataagggcaaatggtgttagtaactaagaaagtacatatatatttacaagtaggtcaacttattttctagaatgtaaactactttttacaaatttatcctttgaagagagggaatatttcctgccatgtttacatccaagcatccaattatgttaattcatgattactgtatttctcagattttagtcgatcattggcatatgtgggttttaaacataaggggatcagataaagtatttttaaatttatattttcattattggtagatatatttgggtgtgacaatctagtctttatggtcatgtagacttactggacatagtagattagtagattagatccttggccaaggaaattytacaaatagtttcctaagctataaactttgcctatgcaattcacaactatctaatgatatgtaaatgatgtgttaatactgacagataattacttgcacttaaagtaacaattt

SEQ ID NO: 594696 - DNA, 457 bp, Homo sapiens
aagagaagcaagcactttctcaaaacccagaggcagtgtggtagggctagggggcctggggagctgctggaagaaacaagcaagatgacagattactacacccaataccaggtctcatacatgtccatttcatactggtttcatcccaaacatgaaaatatacataaccaaaggttagatgctttaagattttaatatatattcttgkgctctgtgaattatacccagggattctgccatgagcaagtggtagatctgctggcaaagactctctccttgacttaactacagtcaagctcctctgagccctctgctcgactaggcctgaccttgggcttccctctctgtccttgtggaattcagtttgcacaagaatcctcctaagtcagtttagtgaaaaccctccacccttggtatcttgccacccttgatatcttacaaccctggcctgccttca

SEQ ID NO: 594697 - DNA, 519 bp, Homo sapiens
tgccaggttgaacacataagaaagagaaatatcagaggaagctctctttattctagcagagatgtttatgagaagagacttaaaagcacagagaaaagggctggtttgtaagagaagggaaaaggatgtgcccgtatgaatacaggaaaggcagtgacggtgggggccaacttaggtaagtttgaggtcatgagatcaggaagttgtgggagttcaaacctcagggcctcatttttctgtagtataagacaacattatctgccaagttatggagtgggcagtggctttgaggcatgaggcaaagattttagtcttatttagtttatttgttcttgcacgtaaacatacagtgacctcatttaaattcactcattaattctaatagtttgagaattattttagatttgatagatacacattcatggaacytacaagtaatgacagttttatttcttcctttataaacgttgtgcctcttatttattttccttgccttgtggcattggttgcagctagtct

SEQ ID NO: 594698 - DNA, 459 bp, Homo sapiens
attttctggagtgcaattaccgatgaggttgttaaatatcaagggctgggaaccttttcctaagctgtgggctaaagttctgcttatttttcccctttgtagtattgactatgtcctcatgtcagagtataagcacgattatatgggtggcctttaattcctacgacggttggtaccttatgtgccacctccmttaactggcaggtgggggcagccttcaaaaggcatggtgagtgaggtgtggttgtacctggcctagcatcatttcaaatcaccattattgacacatgcaataggtggattacccggggggttaatggataaagggactccttgtagactctcatatccaggtgctcctcaacttacaatggagttacatcctgataaacccatcctaagtggaaaatatggtttaggggaaaatacatttaatttacctaacctaccaaacagcat

SEQ ID NO: 594699 - DNA, 621 bp, Homo sapiens
  misc_feature 481: n = A,T,C or G
ctagcaggtattaatcttctccttgtcccagtgtcttaggttgggcttccccataagcagggccctgagaaaaagatttggatacaagtagtgtatttgggaggtgagcccaggaagcaccagtatgggagtgaggaagtggaagttgaaggcacttcagttgaaggcaggcagttgaaggtatgttaatgagcccaagatatatcacattctgccggttgytgtgggcacctgtggttcagccccacaggggacctttgggagaccttgtgaaacacacctcagagaggtcctcccccggggtgaggaatttgggctattttcccacagaccctttgtgattcattgagggctgctccccaggccagttaactgccagcacttcccagggaggtgctcctgcagcacacttctgcagccagagaaatccttcaggtgactttggtagttattaagctttcagccagttcaaagaatgggnaatgggaggggcatgttgggttggcactgagagcgcctgctactctcagtttccccaccttatgaatagagtggatgtgagcatcacacaaaaggaccatgataaatgtataagaactttgaaagtgacatgtgagatac

SEQ ID NO: 594700 - DNA, 565 bp, Homo sapiens
tgccttactcaaatggtacttcttgtatgaagtgttcccggattctgcattatgtcactaattcatgtatttaacaaatacttatttcacagctaccacatttcaggctgtattataggactcagtgctattgtctgttcctgattatgcgttgtatccatccttgtaggtaaatgtgttcatcacaaaccattataataaggaatttacatgtctgtctgcccattccactattgtggagatcagagattgtctcttattcatatttgtattttcagtgcttgaaagcttccctggcatttaattagtattcartgaatattgcctatgtcattattcatttcttataattattacggatacatagtgggtgtacatacttatggggtacatgatatattttgatacaggcataaaatgcataataatcacatctggtaaatggggtattcatcaactcaagtatttatcctttctttgtgttacaaacgatccaggttttttaagttattttaaaatggacaataaatcattattgactgtactcaccctgctgtgctatcaa

SEQ ID NO: 594701 - DNA, 566 bp, Homo sapiens
cctagggtatgtggcagaagaaatttccaagcaacagtgttcataaagtagggtggctgctcctaatagcctacgctcagacaaagaaaggacttaaaattggaatttatatttaaaagggaagcagagaataaaagtttgaaaatttgggtgcctagctgtgtggcaaacaaagaagaagctttctggggagagaaattcaagcaggcttcagagcaccacttgctagaaaattttgcatagctaaaaaggagttaagtactcttatctaaaacaatggggaaaaggccaggaaggcatttccaagactttgtggcaacctccccccccacagccccaggggcctggaaaggaagaatggcttcttggggcaggcccaaggccctgctacctttgttcagccytgggagtctgctacttgcatcccgccattctaactccagccttggctcaaaggggaccaggtacagctcaggctgccactttggagaatgtaagccataagccttgctgatttccacatggtgtttagcctgtaggcatgcagaatgcaagaatgaagaaca

SEQ ID NO: 594702 - DNA, 627 bp, Homo sapiens
agatgggtgaaccaaaatctcataaatcaccactaaaacttactcatgtaaccaaataccccttgttccccaaaaacctatggaaataaaaactaaaaaaaamcaaaacaaaacatttttttagaagttggttttttaaaatgttaaaacaatttgacaaacctttagcaagatgaactaagaaaaaaagacagaatttctaaataaaatcagagatgaaaaaggaaacattaaaattgatatcacagaaattcaaaggatcattagtggctactttgagcaactatatgccaataaattgggaaagctagcagtaatggataaattcctaaacacatacaacctatcaagattgaaccatgaaaaaatccaaaacctgaacagatgaataacaagtaatgagatagaagccataattgaaagtatcgcttctcagccttttggctaagaccaagtatagaagccataataaaaagtctcccagcaaaaaaaagacaagaacccaatggcttcactgcagaattttgctgattatttaaataggaactaataccaatcctattcaaactattctgaaacatagaggactggggaatacttccaaactcatcctacgaggccaatatg

SEQ ID NO: 594703 - DNA, 627 bp, Homo sapiens
agatgggtgaaccaaaatctcataaatcaccactaaaacttactcatgtaaccaaataccccttgttccccaaaaacctatggaaataaaaactaaaaaaaaacaaaacaaaacatttttttagaagttggttttttaaaatgttaaaacaatttgacaaacctttagcaagatgaactaagaaaaaaagacagaatttctaaataaaatcagagatgaaaaaggaracattaaaattgatatcacagaaattcaaaggatcattagtggctactttgagcaactatatgccaataaattgggaaagctagcagtaatggataaattcctaaacacatacaacctatcaagattgaaccatgaaaaaatccaaaacctgaacagatgaataacaagtaatgagatagaagccataattgaaagtatcgcttctcagccttttggctaagaccaagtatagaagccataataaaaagtctcccagcaaaaaaaagacaagaacccaatggcttcactgcagaattttgctgattatttaaataggaactaataccaatcctattcaaactattctgaaacatagaggactggggaatacttccaaactcatcctacgaggccaatatg

SEQ ID NO: 594704 - DNA, 627 bp, Homo sapiens
agatgggtgaaccaaaatctcataaatcaccactaaaacttactcatgtaaccaaataccccttgttccccaaaaacctatggaaataaaaactaaaaaaaaacaaaacaaaacatttttttagaagttggttttttaaaatgttaaaacaatttgacaaacctttagcaagatgaactaagaaaaaaagacagaatttctaaataaaatcagagatgaaaaaggaaacattaaaattgataycacagaaattcaaaggatcattagtggctactttgagcaactatatgccaataaattgggaaagctagcagtaatggataaattcctaaacacatacaacctatcaagattgaaccatgaaaaaatccaaaacctgaacagatgaataacaagtaatgagatagaagccataattgaaagtatcgcttctcagccttttggctaagaccaagtatagaagccataataaaaagtctcccagcaaaaaaaagacaagaacccaatggcttcactgcagaattttgctgattatttaaataggaactaataccaatcctattcaaactattctgaaacatagaggactggggaatacttccaaactcatcctacgaggccaatatg

SEQ ID NO: 594705 - DNA, 540 bp, Homo sapiens
aaactgcaagaagagaatgaagataaatagttaaagggttaaaatgaaaaaaaaatcaacctaaaatgcaatagccagcaaaattatgcttcaaagtgaaggagatataaagactttctcagacagaaactgaaygagttcatcgccagcagtgttgtcccgcaaaaagtgttataagaagttgtttaagaaaaaggaaaattatataggtcagaaactcagatctatataaagaagagtattagagaaggaataaatgaagctgaactaaaatatttttatttttcttactcttaattgatctgagacataacttcatttaaatcaataatagtaacaatatattggatgattataacatggataagtgaaatgaatggcagccatgtcacaaggcatgtgagggaggaattgtgaataccctgttataactgcaccacatataaagcagtattgtttaaaggtgaacttaaattaggtataaatgtgtattgtaagtgctagggaaaccactaaaaatttttttaaagaagtaaaatt

SEQ ID NO: 594706 - DNA, 576 bp, Homo sapiens
caaaatacataaggcaagaactgatagaactgaaaggagaaatagacaaatccactattatagtggagacttcaacattcctctgtcagtaatggattaaacaaaaacaggcagaaaataattaaggatatagataatcaggacagagtaagggacagcatgtctactactctgggaaaatacataatccgactctaataagggtacctcttacgcaatgtaggggttaaataggagaagccaaacactggagatagggagatgccttctgtgcacccaaggagctgttaaagtytgcaggcagaaggcttggaatacaatagctgcagaaagagaagaaaggacatagatcagaccaccattttccaaaatgtgttctaggaaagctccctttagtgctgttaaaaaaaaaaaaaaaaaaaaaaaaaaaaggacctgtgtggccaaataactttggcaaacaatagatgtggtaccaccatctcagatcctcatactgcatgcacgttatcatagtaaaagctctaaaaagttcctctgtaaagaaacctatttaactctgcccagtttggcatt

SEQ ID NO: 594707 - DNA, 598 bp, Homo sapiens
agaaggaatgaactgtactagaaagaaggaaaggaaagataaaacccagtgaaagcaattgaccttaaaaagagagagagccatgggccttgattttcacaggagggcgagaaggggagtaggtttaggtatttatatggtggcagcaagttggtaattcccatctggctggggtttgctctggaagatagaaaacaaggtcagcagctgaaaatgagtcttgtcaagtgctaaagaaagaacattctaatatctgtgagcttggtgaccaactgacaagggaatgagaagaggctaggtcctaatgtggaagcaatctcttttacagaatttgagtatgaaagcaaagggacagtctctccttcccttttatctcaagatgagcaaaagtatagagaagaaatttaagtggaagtttgttgagagagttcacatagggtatatttaaatttcagaagaagaatatggattataaagtaagaaagaattattaactccgagaattatttggcatttgaatagctcatcagaggrgactggaatgacctagaatggcttaaatagaggttgggatggtgtgacctccgaggatcacata

SEQ ID NO: 594708 - DNA, 547 bp, Homo sapiens
ctatgttccaggttcttctattacattatgtctcagctttctatgagctatgttatttacaaggtaaaagaataacacctaagttcatccattkcttaagtgaacccaaacgtagtttgagatctgtaggccggtttaaattgagtctggtaaagctacttcagcctggaaaaggagagaagaaatgatagactgagaatttttaaatatttaaatattctcattccaatgtgctagccattttacaaatgcatatattaatatctgcctgtgtattcccttgagagctgggctggaaaagcgttgctatactttctggtttggttttgtttttaaactgccacagtatctttacttttacaaacataaaagtatatatacttattttaacaatgatcctttcccacatgttctgtttcctcttgtttgtttgcttttttgtttgcttgttttgctttttttctcgagtcagaattagctagtacttttgcttaatcacttctcagtatttaacaaggtttcaggacatgcaaggggaagctgttta

SEQ ID NO: 594709 - DNA, 582 bp, Homo sapiens
gctccctgtcatctccagaataaaaacccagctctttatttgaacttataagttcctttttaacctagttcctgtatacttttccaaactattgcctatccatcctgagctattcatatttcygaaaacaagctaagccctttatcccatccttataatttcgaatgttattcccgctgcctggaatattctttctctccataggtgggttagctaactcttttacttaacagctttactgaaatatagtttacataccagcacatttattaggcttaactaactgctaacctttgagactccatttggatgtcatctcctgtgtttggttgggttccactaaagacagatcctgaaataaatatgtggaagcaagaggtttatttcagagaagattcccagaaagcagagtaacggaatggagaaaggagacagagaagagagaaaagtttataaagggtgtgttaatgagcatgagtgtgttattgctgtggacaatgagggctccactccattggaattcttggagagcctgtgagaaacacatctctgagttgtcccactgcaaggcaaagaagcctg

SEQ ID NO: 594710 - DNA, 623 bp, Homo sapiens
actagtgtttttttttttttaaattaggggtgagctcaggaaagatgattgcatttaagcagggaagtaaaggcagtgagaacagaagttttttaagtgtctggaagaagaatgtcccaggcagaatcaagagcaagacgagcactgcaatgtgagaatagcgagatgggagtccagagaagagaggtcagcaaggagaatgtttcatgtcaggcgccaaagtcaatgctctgagcatgatgaggaactctaggggaatttaaagcrgggaagtgacgtgttttcataggttcattgttttgtttatctctaagtcatgtggtcagcaaaacccagaaccaggactaaaattgaagccttctgactcctgatacagtgctcctcccattcaggtccatggttggtcattctctagacctgaatgtccttggcatgctgtttttcctgttcctggcatggttatttgtggtctgctaatcaaatcttgtaacagctgttgcctgttcccaagcccaaacatttggttccttgggactttcctttgccatttgtccagccaatcagctttaacattctcctgtttctgtgagcatcgggtcctcttagagctatccaacaaaact

SEQ ID NO: 594711 - DNA, 623 bp, Homo sapiens
actagtgtttttttttttttaaattaggggtgagctcaggaaagatgattgcatttaagcagggaagtaaaggcagtgagaacagaagttttttaagtgtctggaagaagaatgtcccaggcagaatcaagagcaagacgagcactgcaatgtgagaatagcgagatgggagtccagagaagagaggtcagcaaggagaatgtttcatgtcaggcgccaaagtcaatgctctgagcatgatgaggaactctaggggaatttaaagcagggaagtgacgtgttttcataggttcattgttttgtttatctctaagtcatgtggtcagcaaaacccagaaccaggactaaaattgaagccttctgactcctgatacagtgctcctcccattcaggtccatggttggtcattctctagacctgaatgtccttggcatsctgtttttcctgttcctggcatggttatttgtggtctgctaatcaaatcttgtaacagctgttgcctgttcccaagcccaaacatttggttccttgggactttcctttgccatttgtccagccaatcagctttaacattctcctgtttctgtgagcatcgggtcctcttagagctatccaacaaaact

SEQ ID NO: 594712 - DNA, 457 bp, Homo sapiens
ggcctgagattcctgccaggcctagcagctgtgccaaccgtgaactccctctggatagggtttagagttgccaagtctcacatcccagttagagaggaagaaaataacaggggcttgagtgcccagtgatgagtgccaggccagtgttaagccagactggagtcaccctgggataagaaatctgttctctgaagacaagcttgatttcagacttctgtattttctacatggtttctgccttcccttaggtctggtaaacttgttttccagaaacgccatgcttgttagctcagaaactaaatagagacgggggaaattgggccaccccatgccaatctagaccctcatccttacawctcagtctaggaatagaagtcaacccatcctagcctgggatactggtaggaatgggacagttagtcaggtaaatacctaggaggtaaccaagaacacgagt

SEQ ID NO: 594713 - DNA, 448 bp, Homo sapiens
ggcaggcagaagactggacactcaccatggaggcagctctgtcatttgtcctgggcaatatccctttttttcatgaaggatctggagtagaagctacactccatttcctgggtctgtttggactcttagatagtgccaagctcaggaaatggtgtcgttaattttttattgacagtggacttggttatcttgcaggagattaatggacttagagtctggtccaagcctatgagggtttctcgtaatggtttgcttccagcctttctgccctgactggatgtgatgagcattcacacagtgtcagccaatgtaatatttatttgcctcctccctgaatsttctaaatgaaaagccaacatcaaatgcaaaggaaaaggcgcaagaaaaggatttggctctgggttctccctctttctggatatggcactgggagtctaattactaaccc

SEQ ID NO: 594714 - DNA, 434 bp, Homo sapiens
ccagcactttgggaggccgatgcgggtggatcacttgaggtcaggagtttgagaccagcctggccaacatggtgaaaccccatctgtactaaaaatataaaaattagccaggcgtgttggcaggtacctgtaatcccagctactcaggaggctgaggcaggagaatcgcttcaaccagggaggcggaggctgcagtgagctgagactgtaccactgcacactagcccrggtgacagagtgagactccatctcaaaactaaataaataaattaattaattaatgtagatttttaaaaagaaagtattgctatggactatgaattagatgccctaaaagcttttccaagaagcacaactaaagacaggaattgctttttatcacctttggttcgtgaatcctagtatttctttctatgtgggccgcgtacagcctg

SEQ ID NO: 594715 - DNA, 406 bp, Homo sapiens
ggctggtctcgaattcctggccctcagcctcccaaagtgctgggattatacatagacatgagccactgtactcagcctgaatcttttgtttttgatctaagaccattagctctttacatgtagtggatccttcattaaatgtcatagaaattcagtgaagattaattctcagttgtaatgttttgtctcctgagttttagcttttagagtaattgcaacactgaaaggtactttataaaatacactaacgcatcattttactatggaatcgagggcatggatgaacgctgagaaaaacattgactgaaaggaacakccttcgacctttctataggcagcatctattttatttaaaaatatttcctttaatattaaaaggaaaattacgtattatatttagttagca

SEQ ID NO: 594716 - DNA, 612 bp, Homo sapiens
cacgccccaccaccccccactgcagaaggggtgcccgccggccttcccctcacaccgtgcccccagggaacctccggagccggtcagaccctgcccatcccactgggagcttgggatcaygtctcacaggacaagccaagaccccacagcccagcgggggatgagtctgaagctgattcccggacagcccagcaaggctgggagggagccagggaggggccatgtgcgtgggggaggtggtgattttttagagccttcccccactgttccccttagaaaccgggtgagtgagcctgcacgccagctcccctcccctgcccactcctgctcagagcccagcagcctggcctgccgcagggcccagagcccggacacctcctcttcccaccgatcttccattttcagagggagccgctctccctcctctcaggcctgctccatctgtgacatttcccttccctggacgaagtggggttttcacccttgtgagcagagtctccttcagggctcctccgtgagagaaatatggggctggacagggtccccttccctccctcctcactcaccctaagaacctccagggacccagaggccacgcaggcacggagccag

SEQ ID NO: 594717 - DNA, 612 bp, Homo sapiens
cacgccccaccaccccccactgcagaaggggtgcccgccggccttcccctcacaccgtgcccccagggaacctccggagccggtcagaccctgcccatcccactgggagcttgggatcatgtctcacaggacaagccaagaccccacagcccagcgggggatgagtctgaagctgattcccggacagcccagcaaggctgggagggagccrgggaggggccatgtgcgtgggggaggtggtgattttttagagccttcccccactgttccccttagaaaccgggtgagtgagcctgcacgccagctcccctcccctgcccactcctgctcagagcccagcagcctggcctgccgcagggcccagagcccggacacctcctcttcccaccgatcttccattttcagagggagccgctctccctcctctcaggcctgctccatctgtgacatttcccttccctggacgaagtggggttttcacccttgtgagcagagtctccttcagggctcctccgtgagagaaatatggggctggacagggtccccttccctccctcctcactcaccctaagaacctccagggacccagaggccacgcaggcacggagccag

SEQ ID NO: 594718 - DNA, 627 bp, Homo sapiens
atacctagcaaaccctagaaaacactatgcataccaagaaaaaggaaaaatcgatttggtagctcttttgtaatgcacactggcgaagttaaattcccagaatataagtatcctgaaaatctaaccggaaagtgtgaaaaatagaaagcatcaatgcaaggagaaaaattgatttttttgtcttatttwcacacttagacagtaagcatttttaattgaaattttcttaagataattatagctctacatgcaattttaagaaataattctgagacatccctcccatatgttttcccaatggtaacatcatataaaacttttagtaaatatctcatccaagataatgatactgatgcaacttgcaaatcttattcaggtttccccaatttttcttgaactcatttaagttctatacagtgttattgcctttgtaggtttaggtatccaacagcacagtggagataagaaacagtcccagcattacaggcatccttcatactccatcttataaccacacaaacattcccatttcccctgttcatggcccatgggaaccactaatctacatatctaaaattttgccatttcaataatgttatataagtaaaatatgctatgtaagtaatt

SEQ ID NO: 594719 - DNA, 627 bp, Homo sapiens
atacctagcaaaccctagaaaacactatgcataccaagaaaaaggaaaaatcgatttggtagctcttttgtaatgcacactggcgaagttaaattcccagaatataagtatcctgaaaatctaaccggaaagtgtgaaaaatagaaagcatcaatgcaaggagaaaaattgatttttttgtcttatttayacacttagacagtaagcatttttaattgaaattttcttaagataattatagctctacatgcaattttaagaaataattctgagacatccctcccatatgttttcccaatggtaacatcatataaaacttttagtaaatatctcatccaagataatgatactgatgcaacttgcaaatcttattcaggtttccccaatttttcttgaactcatttaagttctatacagtgttattgcctttgtaggtttaggtatccaacagcacagtggagataagaaacagtcccagcattacaggcatccttcatactccatcttataaccacacaaacattcccatttcccctgttcatggcccatgggaaccactaatctacatatctaaaattttgccatttcaataatgttatataagtaaaatatgctatgtaagtaatt

SEQ ID NO: 594720 - DNA, 503 bp, Homo sapiens
tacttctacatacaaagtggttagtttatttcttcctctgatgatctcttcggggttctgtagtttttatcatgataatttatctcaaatctgtctacatccttcatccactctaccaactcccacattaagccataatctctcacgtggacaactgatttctctgtgtctccttacaaccaagatgttcttttaaatatttacatatatacatacatacatacatatatatacacacacatatatatacatatatatatataattcagattatttattttagctgaaaacaagttaaaagcattcagcttctcataaggtaaaatccaaacctgctgacatggagtgatgyatcctcagcccccctctctagctctgtcttgctcccttctctctgtccatcactgcagtcttcttagttcttccaacagcacaatctaaattctgtcttctgagccttcaaatgcagagccctccacctaaacacacctggctgtgctttc

SEQ ID NO: 594721 - DNA, 514 bp, Homo sapiens
tctgcaagaagaaaaatatggctctttttgcctgaccccacaggcagtcagaccttatggttgccttcccttgttctctaaaaatcgctgttattctgttctttttcaaggtgcactgatttcatattgttcaaacacacatgttttacaatcaatttgtacagttaacacaattatagtggtcctgaggtgacatacatcttcagcttatgcagataacaggattaagaaattaaagtargacaggcgtaagaaattataagagtattatttgggaagtggtaaatgtccatggaatcttcacaatttatgttcctctgctgcggctccagccagtccctccattcggggtccctgacttcccacaatagggaaggagaaggggtgagagagagaaagcagatatccgtataaagagaccatataagcttaaatgattcagaaatggacaatcagagagagagagagagagaaagagagagagagaacagctgggaaataaactgaggaaaag

SEQ ID NO: 594722 - DNA, 543 bp, Homo sapiens
aaaagaatgcagagccactgaattctttggttaagctttcagacagataatgttggtccgaatcctggttctatcttctatgtatttgatcttgggaaaaattacttaaatttccccaagcccagtttcctcatttgtaaaatgggaatgacaatgctgaggcgcggagctaccctttctagagatctgttctaatgacagtccatgaagcagaactgacactcatccaagaaatctttgaaagtgttttggagaacatctaggcttttagaggttcccaggccaattggtttttgtctttgctttaatttcttcttgtatttgacccatgtgcaaattttatggggcagtatatggtcctcaccatacactggttttacaggcagtattgaatggagtcatagakaagaaagatttggaggaagacaatgaagttaagttaaatttttccctctctattttattcttctctctttcatgtcttctgataataaactgttgtcaggtggaaatctacagagaggctgagcactgataaataaa

SEQ ID NO: 594723 - DNA, 438 bp, Homo sapiens
tgaaatttttctttcaaagttgtagccaggtgtgtgttttcaatttgatagaatattacctaatttcctataatgcttccatgatataacttcctagctagttatgtcaaattatggtgacttttctttaacagcaatgtaccagatacagaaatttccatttatgcctggacgcacagatagtattattgttmgcctctcttgatattagtgatggccatttgactgagttctggctaatgaaaagtggttggaagtgacacgtgtcacttagacttgacacacaaaaacttcttcatcatacaaagctctgtctctttccccatctgttatgtgggaattaacatccattcatgtactaaagacagctcctaggtcctggatgctacaagagcagaactttcctacaaaagcaaacacaaagacatcaccaaatgg

SEQ ID NO: 594724 - DNA, 538 bp, Homo sapiens
gtcttatttaaaataaaaaacattgttaaatcaggagggaatataattgcaactctattcatcatgagtcagaagtttcctatgacaatcacattactgttacttctaagtaagatatacatatccatggatacatctctgtggaagaggtcaagtcagggtgcctctctttgtctctctgttttacttcccacaggaaatggagttattcattcttccattcattaatatttttgattcctcccatgtgtaagccactgtgctagctttgtgaggaaatatttgaagactaagcttgagcatagtaatgaaatttgtttcaactcaatacatcaagtagtaggyacactttcttgttaccgaactatgtgctagccctgaaataagatacgtgcatgacatatcggattttgtcacaaagatcacagtctcttagagaaaataatacaggagtcaaatatcaacagctgactatagtgctctgctagtgatataaattaaatgcactaaaaagggagctattaattctttctagaag

SEQ ID NO: 594725 - DNA, 538 bp, Homo sapiens
ggagcttggagctccatgatttctattttgtaaaataacwattttggaggagatatttaagtggtaaaatattgacttgtttactgaaaaaaaaaaaagaaagaggtagcaatagttaggaaaaagaatactgttccacacgttccaaaatcaatatccaatacagcctcagtggaaaaaccgaagatttccatcttctggggcacttttctctaccactttgggtgtaaattgccttgttatcaagaagggaaaagtcagcaatgtgtagagagagagaaagatgcgtcacatctgcacaataaattattaaaaagaaagataaattaacatgtttttcaggcgttactacaacatttataaattgttttcattcccaaagaacaggactatcacccagtccttacattttgaaaactatatttagatatatttctcaaaattttaagagattttggccttgcctttcaggttatgcacggaaatcattgccaaaatcccatttgctctggttatttccttgaacaaattaccatat

SEQ ID NO: 594726 - DNA, 538 bp, Homo sapiens
ggagcttggagctccatgatttctattttgtaaaataactattttggaggagatatttaagtggtaaaatattgacttgtttactgaaaaaaaaaaaagaaagmggtagcaatagttaggaaaaagaatactgttccacacgttccaaaatcaatatccaatacagcctcagtggaaaaaccgaagatttccatcttctggggcacttttctctaccactttgggtgtaaattgccttgttatcaagaagggaaaagtcagcaatgtgtagagagagagaaagatgcgtcacatctgcacaataaattattaaaaagaaagataaattaacatgtttttcaggcgttactacaacatttataaattgttttcattcccaaagaacaggactatcacccagtccttacattttgaaaactatatttagatatatttctcaaaattttaagagattttggccttgcctttcaggttatgcacggaaatcattgccaaaatcccatttgctctggttatttccttgaacaaattaccatat

SEQ ID NO: 594727 - DNA, 515 bp, Homo sapiens
  misc_feature 103: n = A,T,C or G
aatacattgtattgctttgaaccattcaagtgccattgtagacatggtttaagtgtacagaaaaagctaagatgcataccatgaggcagaatgaaaagtattntgcaggctaacttcagcataaagagtttgggagtatgtattttgagtgaagaaagttttacctagacccactggattattatctttctggtatgactataataattttcttttaaaaattcagagaccaggatttcactcaacaaagcatgttttatgctaattaaaagtggccaagaagtcatgaattccctrtgatctttatggagagaaatcaatacctgtatctatttctataaaactccagggttttcctggtggatattagaacccagaaaggtaggctttcatgttgtgtttcctgtaataatgagcaatctagggtcaaatagaagcctcatgcagagtacagaataaaagagtcactatgaacaattgaaaaataaatgcagaatcagatatttgtaatgctg

SEQ ID NO: 594728 - DNA, 583 bp, Homo sapiens
gtagctaatgtgatctcagcatcgaataaatagagaccaggtgggaagttttgcagtaattgaggagaatgatgttgctggacaattcaaggtggtaatacagtaggtggtgagatgtggttggattatggatatagtttgaatttattaatcatatttctgcttcagagccttcacgatctctttcatgtaatgttttccctccagatactgccaaagcccaacttcctcacattcttagtaacccctctctaggcctccttataaaacatttcattttaccccaacgttttccattccctttccctgatttatgtatttctctcatccctagtgcctctttaacattctgtttattttacctgcctataccatgttggttgtactcccactagagtgcaatctccatgagacagaaataccactttccccttagttctctaccccatccccatgcatataatagtgcctggcatgtaacayagccagtgttcaatacatatttgtgaaatgactggatgaattgattaatttcaaagtagttgaatgaaggaatagcatctagaaataatatacatactaa

SEQ ID NO: 594729 - DNA, 591 bp, Homo sapiens
ggctgtgtagtatgaaaaatgctgattttctctaaatcaaggtttcttaaatgtggcattattaacatattaggctgcataattttttatttttgctatcggaggactttcctgtgtattgtagaatgtctaatggcattctttgcctctgttcacaagatgtcattagtaccacctttccattgtgacagaaaaatatgactctaacatagccaaatgttttcttggaaggtggtgcaggtcccgggtgaggtggacagtaaaatcacattgggtcaataagtaaggctgtaaacatttttggctatatatatatatatatatwttttttttttatcttttggttaaggctttgcaaaaattatgttaatacaaaaatctggctttggtgaaatcttgtaattaaccaaaagtcaatgccagtcataaaaatataatttttctctaattcaagtgaaaatacagggcaagaaactcattcagataaaaatgaaaacaaaattttatgtcaggccagcctccaaaaattgaatgcctgtgggctaagccttctaataacttgggctttttgaattggaaaaaaaaaaaaaa

SEQ ID NO: 594730 - DNA, 623 bp, Homo sapiens
caccacaccagctaattttttgtatttttagtagagaccaggtttcaccatgttggcgaggctagtctcaaactcctggcttcaagtgagccacttgcctcggcctcccaaagtgctgggattacaggcatgagccaccatgcccagctcaaagttattttaaaactacaggttggggcaccccttctttgtctgggaaacaaaatgtgatgcctgcaattacagcttacataaagtgaaatttaaaaggcaagaacagtcacagtccccaagccaagtctgtgctgggctgcccactggtttcatgactacatagatgtgaacatcacagcaataggaatcccaagctatggctataagactgtaaggacttggttttggaccagggagctcaagagacctgttagagggatgaatgttgtagggttcaagggatgtttccrttgaagaagaaacttaaagcccaaattccaaaactcattcagaaaaaataacaacataaaaaaattgaaaaatgacaattaggtgatcaactcactccaatatggaaatgattaaatagtctgcaaaaaaacaaacaaacaacaacaacaacaacaacaaaactccacaaactttaaact

SEQ ID NO: 594731 - DNA, 536 bp, Homo sapiens
agatcactgacatgccctgtagacgttttcccattgcattagggctattaacatttggcttctcattacttatgcaaatttctgcagccagcttgaatttctccccagaaatcgggttgttctcttctacttcatggtcaggcagcaaattttccaaatttctttttgagacagagtctcactccrtcacccaggctggagtgcagtggcatgatctcagctcactgcaacctctgcctcctgagttcaagcgactcttgtgcctcagcctcctgagtagctgggaatacaggtgggcaccaccaagcccaactaaaaatgtttgtatttttagtagagacgggtttcaccatgctagccaggctggtctccaactcctgacttccagtgatctgcccgcctggggcctcccaaataaagtgctgggattacagccaattttccaaatttttatgctcagcttcccttttaaacgtaaattcccatttcaaatcatccctttgtgaatgctcataactatgcactttcagaaaaac

SEQ ID NO: 594732 - DNA, 540 bp, Homo sapiens
agatcactgacatgccctgtagacgttttcccattgcattagggctattaacatttggcttctcattacttatgcaaatttctgcagccagcttgaatttctccccagaaatcgggttgttctcttctacttcatggtcaggcagcaaattttccaaatttctttttgagacagagtctcactccatcacccaggctggagtscagtggcatgatctcagctcactgcaacctctgcctcctgagttcaagcgactcttgtgcctcagcctcctgagtagctgggaatacaggtgggcaccaccaagcccaactaaaaatgtttgtatttttagtagagacgggtttcaccatgctagccaggctggtctccaactcctgacttccagtgatctgcccgcctggggcctcccaaataaagtgctgggattacagccaattttccaaatttttatgctcagcttcccttttaaacgtaaattcccatttcaaatcatccctttgtgaatgctcataactatgcactttcagaaaaacccat

SEQ ID NO: 594733 - DNA, 590 bp, Homo sapiens
atgttctcacttgaatatcttgtggcagaattaatgcttgtggaacctgacattttttaagccgtataatgcatatgcagtataaaggataccaataaggcaagatwgatttgaatgctatatttctgttgaagaaatccggttggtttatgttataatcaaagcccagagattgaattataacaccagtcatcaagtctcccttaatcaattaaattcactatgtttagggaagatttataagcaaaaacaagcatttctgaattgtttctgtgtgggattttcttctgcattttttgttcttttaaactagagactagtaaatcccatacagtactatggcaagaatttactacattatgatgagaaagaactgagaacatttttgtctgaatgatgaaggagtaggcaatatgtaatttatagcaaaataaaactgatactgcattatgctataaaaccatcaattggattatcacggaataagctgtgcaatatttacttgcatgtaactgaaatgttgaacaagaaagatgtacagaatgcaatcagaaaacaactttatttcactcctcattgcttgttcatgt

SEQ ID NO: 594734 - DNA, 590 bp, Homo sapiens
atgttctcacttgaatatcttgtggcagaattaatgcttgtggaacctgacattttttaagccgtataatgcatatgcagtataaaggataccaataaggcaagattgatttgaatgctatatttctgttgaagaaatccggttggtttatgttataatcaaagcccagagattgaattataacaccagtcatcaagtctcccttaatcaattaaattcactatgtttagggaagatttataagcaaaaacaagcatttctgaattgtttctgtgtgggattttcttctgcwttttttgttcttttaaactagagactagtaaatcccatacagtactatggcaagaatttactacattatgatgagaaagaactgagaacatttttgtctgaatgatgaaggagtaggcaatatgtaatttatagcaaaataaaactgatactgcattatgctataaaaccatcaattggattatcacggaataagctgtgcaatatttacttgcatgtaactgaaatgttgaacaagaaagatgtacagaatgcaatcagaaaacaactttatttcactcctcattgcttgttcatgt

SEQ ID NO: 594735 - DNA, 547 bp, Homo sapiens
aggtaggttcaggaagcagtttggaggactaatctacccagaagatcctagggggatgaggcttgaacacacacacacacacacacacacacacacacactcactcactcacaaacatacacacaccatcctggggcagcagtcctcaagacattcttaacacaaaaaataaatagaaactggggccaggtgcaggggctttcacctgtaatcccagcactttgggagaccaaggcgggcagatcatgaggtgaggagatcgagaccatcctggctaacatggtgaaacsccgtctctactaaaaatacaaaaatattagccaggcgtggtggcgggcccctgtagtcccagctactcgggaggctgaggcaggagaatggtgtgaacccgggaggtggagcttgcagtgagccgagatcacaccactgcactccagcctgggcaacagagcgagactccatctcaagaaaataataataataaaataaataaatataaactgcttgggactttgtacctctttccttgcaaccagagtataagaaa

SEQ ID NO: 594736 - DNA, 539 bp, Homo sapiens
attctttggctataaattcccacttgcccgtgctgtattgggagttgagtccaatctytctcccagagtgcaaagccccgttgcagtagtccctgcacctgttgagatggtctggaatacagtctgccttactgtgctttagccaagtcattgaacaggttttctttaacagtattacctctgtcaagcccacagttggaactccaaacatagtatatcattatacaagtaagaaagcttttaaataaagctaatttaataacatataactcacaatcagcattttaaaaaataaaatggaaataatcacctcagaggcaatgggtacttaatgcagaacccaaaaatagaattagcattaaaccaaaaatgggtccatgcttccatcctacagcaatttgacctgaaaataacattcatactcccacaactacaagatgtgagtttcagacaatgaaaatatttcaacagtacaacgtagagtagattccacaatataaaaatgtctgtgccaagttctggcttaacaaaatacggaa

SEQ ID NO: 594737 - DNA, 515 bp, Homo sapiens
attccttgcattacaataaggataatattggaatttgaatgattgtgctgcaatgaagaatgcatgagttaatagatttaaaatgcttaagatagagctttgcatagatgaagagctagttagtattattattactaaacatatgtttgctatgactatttctactttgtgagatacactaggtaagaaagcaattagtagtaaacaaagttgtataaaaattccaatctgccagcttcatctttccctgtaggakacagaaagtcacaagagaatgtcactcccacccaaataataaaaatattctaacctacaaaatcacagtttatggaagcccattggaaagctgaattaaaaaaaattcaaaaaaatgccaaacccctactgagaaagaaggaagccatctctgcttttctcctcgacagagcacctgaaaggggtagaaaattctgtaaatgctgataaaaagcaaccaaatacatttcaaaaagtgaaagtctgaatgcatattggag

SEQ ID NO: 594738 - DNA, 656 bp, Homo sapiens
aaagcatttcctgtaagaactcgaacaagacaaggacgcccactttcaccattcctattcaacacaggactggaagtcctagctacagcaaccagtcaagggaaagaatgaaaggcacccaatttggaaaaaaaagaggaagtaaaattatctctgttcatgaatagtattaatataatcttacaccagaaacccctaaagatttctctgaaagactcttacgtttggtaaatgattcagtaaagtttcaggatgcaaaatcaattcacaaaaatgagcagcatttctatacagcaacaacaatcaagctaggaatcaagccaagaactgaatctcactaaaaataactacagataaaataaaataagataaaataaaatagaatacctagggatagatttaatcaaggaggtaaaagatatctacaaggagaacgaaaacactgatgcaagaaattgtagacgactgaaacaaatggaaaaacattctacactcatgaattggaagagtcaatattattaaaacaaccatgcttcccaaagcaatgtacagattcaatgctattcctataaaattatcaatgtcatatttcacagaattagaaaaaagaatcctcaaatgtatatggaacyaaaaaagagcctgaatagccaaag

SEQ ID NO: 594739 - DNA, 539 bp, Homo sapiens
tgaaccactcctttgggcaagcatggattttggatgaactgtgtatgcactcggtggtcataaaaaaacattagagtctttcctcattaccttaagtttgtttgaccatatgatttgatgttctttgaccttgaaagtgatcgagatactgaatttactaataatttactattagaaatatggtagggataggtaacgtataatcttgttatagataatgtaactaatatgtaacatgtagtagctacagataagctttaaaytttcaaacctttgttctggctgtaaaatgtcagttggatccattttggtgctttttattactgcatcaaaaccatgctgtgaatttgtagctgccataaatgcttaatgtaagagctcattgtgcaataaagtgtcagaacactgtttttaaacacgtttttaaagcaacattttacagcttacattttttttcccactgcgtcctataaaaagtacagattttcaatgtcacattcataaggagagcataatcattcctgggaaagccaagtacg

SEQ ID NO: 594740 - DNA, 566 bp, Homo sapiens
gaggctgggaagtccaaaatcaaggtgccagcaggttagggcccaatctctcttcttctaccatagcaccttgaacactgcctcctgtgttcaagaggaatggaggaaggaatgctatgtcctcacctggcagaagggtagaagatagagaacatgctcctkcaaaccctttttatggtggcattaatccactcataagggcagatccctcatgacctaaacacctccatgtaggccccacctcccaacaatgttgcattggggattaagtttccaatacatgaattttcagagacacatgcaaaccataccacccatgtaatgtttggacaatcttcttgggccaccaattttgagacaagtccaccaaggattggggaatacattaataagaaaagcaaagcaggccaatgggcctggagagcaaaagttggggtttgaattcaggactgggccagatctgtgatctaatgagaagacaatctgtagtcataaaggcacaagtaggatatgcctatagaacagagagcttaatatgattgtgcatgcaagatggagtgaggtat

SEQ ID NO: 594741 - DNA, 621 bp, Homo sapiens
ttaataagaaaagcaaagcaggccaatgggcctggagagcaaaagttggggtttgaattcaggactgggccagatctgtgatctaatgagaagacaatctgtagtcataaaggcacaagtaggatatgcctatagaacagagagcttaatatgattgtgcatgcaagatggagtgaggtatatattgggaaaggcagcctcattcacataattttttgaccccttctcagatgcattaagaatgggccttggccaggcatagtggctcacaccagtggatcccagcactttgtgaggctgaggcagaaggatcctgggaggagtttgaggtgagcctgggcaacatagtgaaaccctgtctcatatttttttaaaaaagtaaaaattaaaataaaaaaatgaatgggtcttaatctggagygcttccttatcgagagatagagttctcatggtctgtgctaggcttaaattaaaccttgtattgaaatacctttccctattccagattcaatgtgtactcctttgttctgcttaagtgtgtacattatatggcaccttgccaataccattactatatctgtccccttttgggagggcaggtcctgctgcagcagtacaagg

SEQ ID NO: 594742 - DNA, 598 bp, Homo sapiens
gaataggcatctctcaaaagaaaacatataaatggcaaacaggtgtatgaaatgagkctcaacatcattgatcattagggaaatgcaagtcagaactacaatgagatatcatcttactccagttaaaatggcttttatccaagtcaggcaataacaaatgaaagcgaggatgtggagaagggggagccctcatacactgttggtgggaatgtaaattagtacacactatagagaacagcttagaagttcctcaaaaaactaaaaatagagctaccttatgatccagcaattccactactagatatataccgaaaagataggaaatcagtatatcaaaaatatatctgcaagtctgtgtttattgcagcactattcacgcagccaagatttggaagcaacatatgcatccatcaacagatgaatggataaagaaaacgtgatgcatatacacaatggggtacaattcagccataaaaaagaatgagatcctgtcatttgcaacaacatagatggaactggaggtgaaataagccaaacacagaaagacaaagtttgcatgttctcacttatttgtggaagctaaaaattaaaacaattt

SEQ ID NO: 594743 - DNA, 552 bp, Homo sapiens
tggagtgcagtggcgctttcttggctcactacaagctccacctcctgggttcacaccattctcctgcctcagcctaccgagtagctgggactacaggcacccaccaccatgcctggctaatgttttgtattttttttagaagagacggggtttcacccttttagccaggatggtcttgatctcctgacctcatgatctgcccgccttggcctcccaaagtgctgggattacaggcgtgagccaccaygcccagcctgctgacttacccttgtcattctgacaggggtaagatgttatctcactgtggttttaatttgcatttctctgatgattagtgatgttgaacatttttttcttatgcttattggccagttttgtgccttcttttgaaaggcataaaatattcgtgtccctttcccactttttaatggaattacttgattgtttgttgttgttattgagttgtttgagttccttgtaaagtctggatattagtcccctgtgagatgcatagtttgcaaatgttttttttcattcagtgggctgtctgtt

SEQ ID NO: 594744 - DNA, 567 bp, Homo sapiens
aggcagtttagctatgaattctaagctcttaaacattatgtaatataatctttatccatgtcatattcctgcttagaaacctccaatgactccctatttggtttttaattcaaaatgcaaacttttcaccttggtatttagaggcctccctggtgtccttatttctagctgcatttctcactactcattagttataaagagtggtctttggaataagagacacatgtttttataacccaggtctccgattaaatagctgtaaaaaatatttggcaagattatttacctttccaagtatctaaaarttgaggaaaataaaacacctccacaggtaaataaaataatgcatgtaaatactcaatacaggccctgacatatggagacactcaatattacttaaaaaataattggttatcctctgcttaacctaatctgccatacactttcctatctctttgcctttgtgtgtgtttcctctccaccttgaatcttctccttgtatctctggctgccaaaatctaatccgtcgttcaagcctctttcaagggcaacctctctaggaagctt

SEQ ID NO: 594745 - DNA, 549 bp, Homo sapiens
acaaaagttaatttgctattattatatgttacatttttctaataaaaatttgtgtaaaagattttgtgaaaaatttttgtaaaatttttttctttcttgttatatcagtacctaaataacatccttggtttgctgcctagcccagaaagcttaaaatatgtgctatatagccctttatacaaaaagttcgctgacccctctartagatgttacacatacactaaatcagctttttcttattgtttccctgagagagatacaatattatcccaatttttagataaggaaatgaggatcaattgaaaaatacaatgagtgaaatgaaaaatgcaatagagagtatcaacaccagaaatgatcaattagaagaatctgtaaacctgaagacagattatttgaaaatatatagaggagaaaaaagaaaaaggaaagtttacgggaattatagaacagcttcaacagagcaaatgtacatggtataggaattaagaagagagagactaaaggatagaaagcttatttaaagaaataataacagaaaatattcca

SEQ ID NO: 594746 - DNA, 554 bp, Homo sapiens
gacttaaatattcttatagcaatatttgctttatgaacctgagtgctccagtgttgggtgcatatatatttaaagtggagatatcttcttgctggattgattcctttatcattatgtartaaccttttttttcctttttttactgttcttgacttaaattctgtcttatctgttacaagtattgctactcctgcttgcttttggtttctgcatgtgtggagtatctttttccatccctttacttctagtctatatgcattttactggtaaaatgagtttcctgtaagcagcatatagttggatcaggttttataatccatccagcaattctataccttttaattggagcacacaatctgtttacatgcaaggctattattgatatatgagtctttgcttctgtcatattgttttctgcttgttttatatattctttgttcctttcaatttcacattgattgttgttctgatagatttctgtagtggcaccatttgcatcctttctcttcttcctttgtgtgattactttaccagtgagcttttttttttctttt

SEQ ID NO: 594747 - DNA, 554 bp, Homo sapiens
gacttaaatattcttatagcaatatttgctttatgaacctgagtgctccagtgttgggtgcatatatatttaaagtggagatatcttcttgctggattgattcctttatcattatgtagtaaccttttttttcctttttttactgttcttgacttaaattctgtcttatctgttacaagtattgctactcctgcttgcttttggtttctgcatgtgtggagtatctttttccatccctttacttctagtctatatgcattttactggtaaaatgagtttcctgtaagcagcatatagttggatcaggttttataatccatccagcaattctataccttttaattggagcacacaatctgtttacatgcaaggctattattgatatatgagtctttgcttctgtcatattgttttctgcttgttttatatattctttgttcctttcaatttcacattgattgttgttctgatagatttctgtagtggcaccrtttgcatcctttctcttcttcctttgtgtgattactttaccagtgagcttttttttttctttt

SEQ ID NO: 594748 - DNA, 542 bp, Homo sapiens
tcatccctgggcacagacagaggccatgccaccagttgggtcacagtcaccactcacagcctcttacaggcagccctctagcctgtctacctcagcctccagtggcaacagaattgggtgtgtgcagtgggaagagggttcttgttctccatgcatgagcctgagcacagaagccactcaatggtcagaaaatctcataattatggatttcattctctgcttaaaaaaccaagtacaaartttgtgccactgctagaatgaggtcacttctcacagccccaaacagggaggtcacaggctctggaaagtgcatactttggtttcctttgttctggaagatacctttttgttatactttatgatcctttccccagggattaatactgcctgtgggtagggtaatactccctgcatcagctctgggtccagccaatgctgtgttgctgcagccctctgagtagacacaggaaagtcagcaggagctcctggaatgtgcaaatatgcaagctgtggttcccaggactgaatgtagtcttatgatg

SEQ ID NO: 594749 - DNA, 542 bp, Homo sapiens
tcatccctgggcacagacagaggccatgccaccagttgggtcacagtcaccactcacagcctcttacaggcagccctctagcctgtctacctcagcctccagtggcaacagaattgggtgtgtgcagtgggaagagggttcttgttctccatgcatgagcctgagcacagaagccactcaatggtcagaaaatctcataattatggatttcattctctgcttaaaaaaccaagtacaaaatttgtgccactgctagaatgaggtcacttctcacagccccaaacagggaggtcacaggctctggaaagtgcatactttggtttcctttgttctggaagatacctttttgttatactttatgatcctttccccagggattaatactgcctgtgggtagggtaatactccctgcatcagctctgggtmcagccaatgctgtgttgctgcagccctctgagtagacacaggaaagtcagcaggagctcctggaatgtgcaaatatgcaagctgtggttcccaggactgaatgtagtcttatgatg

SEQ ID NO: 594750 - DNA, 607 bp, Homo sapiens
ctccttcctccctggggtttgcagcatactaatgagttgtggccctccaggggattccaaaagagatatacaaatggggagaaaagaaagtcaagagctctttcttgttctaatacagaacagtcctcccctgacacccagtagccaggtatccatcaggttccttcctagcagtgagaaggtgagtgtggatatctctaaactgactcctaacttacacttctgtctgttttcctgcttcagtggtcaraatatgaatcagctgggaagtttatcagtttaacccagtggttctcaaacttggttaccattagaatcacccaaaaacattaaaaatgcctgctgttaaagacttactccaaatcaaccaaatcagaatctttggataagcaacataaatcaatattttttaaatgcttaagtgattccaatgtacagacagtttaatgaccatggatctggcttgttcatgacattgctgaggttaattcctcccacatggtggcatttcattactggcatgccaaggtttggatgaaatttcaataagtagttgaagaagtttaacctttacaactgctatcatcaccacccacaaccaccccca

SEQ ID NO: 594751 - DNA, 476 bp, Homo sapiens
tctgccctccactggcctctgtgcaagatcttcttacctcaagggctacagaacctttgtcctcttccctctgttctacccatagccttcttctgttctgagcctgtgtctgacccgtgcaggatctcactttaccaacacctttatctatcatttgttattaatgttagaacttaggttacctatgactgctctaccaaacttttctctccagttttctgaatcctacgcacattttcatctatgtatgtgaaccaaactagcatctctaatcctgcacaaatcacctcgycccttccttgaaaacatctcttctccctgccatttcttataatgtcatcagtactgaactctaaaatgctcaggtttatattttagtttcttaaaatcttttttattcccatccctagtgcctcaatcttttctcccatctgtctgaaatttatcatttttttcctctggattcatcctggcct

SEQ ID NO: 594752 - DNA, 573 bp, Homo sapiens
aagcagaagcaagaacttcagagctcaaaggcaagactttctaattaacccaattcatcaaagacaaagaaaaaagaattttaaaaaatgaacaaagcctccaagaagtttgggattatgttaagcatcyaaacctaagactaattggttttcctgaggaagaagggaaatctacaagtgtggaaaacatatatgagggaataatcaagaaaaacttccctggccttgctagagatctagacattcaaatacaagaagctcaaagaacacctgggaaattcattgaaaaaagatcatcacctacgttttaaggaaccctcaaaaccatgcaaataagcacatagttatcaggttatctaaagtaaagacaagggaaagaatcttaagagctatgaggcaaaagcatcaggtaacctataaaggaaaagctatcagaataacagcagatttctcagaagaaatcctgaaagctagaagggatcagggttctatttttaacctccttaaacaaagcaattatcagccaagaattttgtatccagcaaatctaagcttcatgaatgaaggaaagat

SEQ ID NO: 594753 - DNA, 584 bp, Homo sapiens
attatataatgacaaaaggactagcccaacaagaaaatatcacaatcctaaacatatatgcacctaacaatggagctcctaaatttataaaacaattactactacacctaaaaaatgagacagatagcaacacaatgatagtggaggactttaatactccactgtctgcactagtcaggtcaycaagacagaaagtcaacaaagaaacaatggacttaaactataccctagaacaaatggactcaacagatgattacagaacattcatgtgctacagaatatacattctattcattagcacatggaacattctccaagatagaccatatgataggacacaaaacaagtctgagtaaatttaagaaaatcacaattatattaagtactctctcagaccacagttgaataaaatgggaaatcaactccaacaggaaccctcaaaaccatgcaaatacatagaaattaaataacctactcctgaatgatcattgggtcaacaatgaaatcaagattaacattcaaaaattctttgaactgaatgataatagtgacacaacctgtcaaaacctctgggatacagcaaa

SEQ ID NO: 594754 - DNA, 504 bp, Homo sapiens
gttagctgacaacatgcctacataggaataagactgttttccagctttccctacagctacatgtggccgaagagttatagtaagaagagatgtccacaatgtcagggatatgaatttgcaaggagggacatccctgattcttccctttctttcttccttttactttatacagagctgatggctagagatggctagagatgaagcagycatcttgagccacgaggaaatcttagcaatggagacctgtgaagcggagcaataacacagaatgagccaaatgaatgctttttctactctggctgcctgacttcagactttaaacattaacatccttactatttggggctttctgtcactgtacatgaatctgaacagactaatattccctgtgacatattaaatatagcattaatttatgtacttagaggttattgtctatctctgcccagtagcatgtaaactttctgaggtaaaaccttttcttctgtttacttctgtatcctt

SEQ ID NO: 594755 - DNA, 621 bp, Homo sapiens
ttagatgcgaagtcagagaggaaggcactcgttacatcatggagagcctcatggacaagctgaagagtttgatattgagtcagagtctttcagacatgaagctgacatggcctccggagttctgagacagttctgttggcctttcctggaggtgacgttgacccaaccactttaatttggatctatgaatggtggagtcatttaagaaagtgacacatccagccacagagagcagtgtttatggagtgatgtgtattaacatgaatcaagcttcttttttattgtgaagctgtcatgtccctatacgatctcgtctttaaactcagaagtgtattgaggctgttttcaaagaggttttcttctccargaggaatgtgagtgccagctgccaaacactgttttgttgttgttgttatttgtcaaaggctctctttatgttaataccttgggtctgtaatcctcacagccattctgatttgcatatgcaatgattggaaaatgatccaaatcaaacttaactgaagttgaaataataaaggtgcttgcagtgaagggacatggttgtgaggtaagccccatggtctcagctctgctagttaataagctgagtgacaaagaaaa

SEQ ID NO: 594756 - DNA, 572 bp, Homo sapiens
cattcaaatataattttgagcacagggttsagaaggaccagattaaatccaatcatttgttactaagcatcaaggaaaattatatgtaaacattgtcttgaaaaaaaatggcttgtttttctttagaaatcgaggaaataggtttttgctttttgttaagacaggacttcacctagtaaatataaagtggaggaaaaaatctattttcaaagatacccacagttgtcataattggaaatatcactagtttctttgctggccaaggagtacttccattcatgaatgtaaatgccttatcttccagaaggctggatagataggcctggagatgacacaaagaaagcagcagttacacagagctactcttaggagtcctggattttcaagccctgccaggactatacctgtgaattaggaatgtccccttagaattaaagagactaggtgggagattcttcagctttgagagaatgaggactgggatagaggaaagatgccttgatccatcagtaggaatagagaagtggtgaacccaacagtgagttgttatttaaggaaaaaagtcaacacta

SEQ ID NO: 594757 - DNA, 572 bp, Homo sapiens
cattcaaatataattttgagcacagggttcrgaaggaccagattaaatccaatcatttgttactaagcatcaaggaaaattatatgtaaacattgtcttgaaaaaaaatggcttgtttttctttagaaatcgaggaaataggtttttgctttttgttaagacaggacttcacctagtaaatataaagtggaggaaaaaatctattttcaaagatacccacagttgtcataattggaaatatcactagtttctttgctggccaaggagtacttccattcatgaatgtaaatgccttatcttccagaaggctggatagataggcctggagatgacacaaagaaagcagcagttacacagagctactcttaggagtcctggattttcaagccctgccaggactatacctgtgaattaggaatgtccccttagaattaaagagactaggtgggagattcttcagctttgagagaatgaggactgggatagaggaaagatgccttgatccatcagtaggaatagagaagtggtgaacccaacagtgagttgttatttaaggaaaaaagtcaacacta

SEQ ID NO: 594758 - DNA, 595 bp, Homo sapiens
tagaaatgttgaacatttcttcatgtatctgttagctattcagatgtcttatttttagaaatgtgtttcttgcccattwcttaattagattattggttttctttctgagaaagtttgtttgaatttcttatatattttggatattaatagcttatcagatatatggcttacaaatattttctcccaatccatagattgtctcttcactgctgttttctttgatgtgcagtagctttttattttgatataatcccgtttgtctttgtttctattgcttgagtttttggagtcaagtctaaaaaatcattgcccagaccaaagtcatgtagttttttctcctatgtttttttttcctacgaatgttatagatttgggtcttatgtttcaatctgtaatctattttgaattgagttttggatatcgcataagataagtgtccaatttcattcttttgcaggctgtcttttctgaaagctttctgaataagtgtagaacatgaaaacaggccccgtctcataagcagcccccagtgtttgaggagcaaagtgccctgtcttctggttggaaagcttccttcctctgtgagccggggttc

SEQ ID NO: 594759 - DNA, 595 bp, Homo sapiens
tagaaatgttgaacatttcttcatgtatctgttagctattcagatgtcttatttttagaaatgtgtttcttgcccattacttaattagattattggttttctttctgagaaagtttgtttgaatttcttatatattttggatattaatagcttatcagatatatggcttacaaatattttctcccaatccatagattgtctcttcactgctgttttctttgatrtgcagtagctttttattttgatataatcccgtttgtctttgtttctattgcttgagtttttggagtcaagtctaaaaaatcattgcccagaccaaagtcatgtagttttttctcctatgtttttttttcctacgaatgttatagatttgggtcttatgtttcaatctgtaatctattttgaattgagttttggatatcgcataagataagtgtccaatttcattcttttgcaggctgtcttttctgaaagctttctgaataagtgtagaacatgaaaacaggccccgtctcataagcagcccccagtgtttgaggagcaaagtgccctgtcttctggttggaaagcttccttcctctgtgagccggggttc

SEQ ID NO: 594760 - DNA, 651 bp, Homo sapiens
aaacagctagtcagcatgcatcatgataaaagccacttgaagctcacttttctgtcccacccaggactaaaaaatgtcttgcctttccaagtggtgctgaagcgtaaagcatacagttatgactttcactgctaggttgagataactgaaatgcaagtgcatggaaaccrtaaaatggatgtgagcattttctaataatatcaatatgattgacagtgattttgattaaggagatgttggttagcatctcacagagatagattagaagatttatatagatgagctcacttcttctaggtcagtcagaatgagctctggtttagataataagctcttgccttgctgaaaggctttattatcatatgacctccttttgtatgcaaatctgcacaaggctgtacccacttagtgcttccatctggattataagaagacaccatggaaaatgggtcctgttcacttaaactgagttgtcaggttggtcttcgtagatccttatttgcccccaaaattcacataaagaaatttagctattcacagagcagcaggtatttaagccaataaaatagagcatgggaaatcacagtacagtttgacttaacatgtctttaaaatgctatttgagtactgacctctactgtggtttagcac

SEQ ID NO: 594761 - DNA, 651 bp, Homo sapiens
aaacagctagtcagcatgcatcatgataaaagccacttgaagctcacttttctgtcccacccaggactaaaaaatgtcttgcctttccaagtggtgctgaagcgtaaagcatacagttatgactttcactgctaggttgagataactgaaatgcaagtgcatggaaaccgtaaaatggatgtgagcattttctaataatatcaatatgattgacagtgattttgattaaggagatgttggttascatctcacagagatagattagaagatttatatagatgagctcacttcttctaggtcagtcagaatgagctctggtttagataataagctcttgccttgctgaaaggctttattatcatatgacctccttttgtatgcaaatctgcacaaggctgtacccacttagtgcttccatctggattataagaagacaccatggaaaatgggtcctgttcacttaaactgagttgtcaggttggtcttcgtagatccttatttgcccccaaaattcacataaagaaatttagctattcacagagcagcaggtatttaagccaataaaatagagcatgggaaatcacagtacagtttgacttaacatgtctttaaaatgctatttgagtactgacctctactgtggtttagcac

SEQ ID NO: 594762 - DNA, 489 bp, Homo sapiens
acataaatattctgatgtgttgactacaatcaaactaataaacatattgatgacatcacataattgccattttttcccctgtatgtgatgagaacacttaatatctaccctcttagcaaatttcaaatatgtaatacagcatcgttatctacagtccctctcttagttcactgtgctgctataacagactggataatttataaagaacagagaacakaaattcaggttttggagtctgggaagtccaagatcaaggcactgccaggtccaggtgtctgctgagggtgccaaccctgcttcctgaaacctgtgccctccagaggggaggaataggtgtcatcacaaggcaaaagtcagaagggcaaaaagaggtgaatgtccttcatcaggtccttttataaggtcacttaatcttataaactcattcacctcccaaaggtcacacctctcaatactgtttcattagggattgagttttaacatgaattc

SEQ ID NO: 594763 - DNA, 631 bp, Homo sapiens
tttcctttcttgtgcagaaactcttttcgtttgaaatagtcccactttatgtttgcttctattttatgtgcttttggtgtcatatccaaaaaagaaacaagcaaaacattgccaagaccaatgtcaaggagctcttctttttttttttctacaagtttcatggtttctcatcttatgtttaaatctttaatacatgttcagttgatttttgtgtatggtgtaagataaggaccgagttttaattttttgtatgtagrtattcagttttcccaaagccatatattgaagagactgtccttttcccagttttaatttcagtgtatttgtcaaagattaattgactatatgtgtgtgggtttatttctgtactgtctattcttttctatgaatctatacatctgtttttatacaagtaccatactttttaaattataatagcatagtagtatattttgaaaataggaaatgtgaggcctccagcaccattcttcttgcttactttctttagctatttgtggtcttttgggttttttaaatataaatttcagtattttggttttctatttcagtgaaaaaatgacaatggaattgtaggaatagcactgagtctgtagatcgctttgggtaatat

SEQ ID NO: 594764 - DNA, 540 bp, Homo sapiens
tggaacaaatttaattttgctgttttccaagcatggcagccaaggcgtttcctgagcctgagsgccgtggtcaggaagaacttctccttgtgaggtcaacgccactctccaataggccgttctgattagcaagtcatttcttaaatgtcatctccagctggtgtctaggtcaaggtgaacccattagtcctgccacattcctttcactcctgtctcctcccttagtgaggcctgcctgggtgtttgcctctgctttaatacatctttcagcccctcagcatccccagtgctacctggagatacagacttcagattttgcactttcctctgcacccttattgcaatccttttcattctgttttcttttctcagctctgaccacactattctctcctgattccctgctgcttatatggagtctgattcctcagtagttcccaaatgtttggccagctcaggggctgagaaatgacctggaaaaggtactgagctcctagttttgaagcatgtgctgcagttctcatttcaaatcaaacaggg

SEQ ID NO: 594765 - DNA, 670 bp, Homo sapiens
aaggaaaattatatgtaaacattgtcttgaaaaaaagtttgggtcagacactacaagatagaatggggccacacaacacagctgaccatgctctcggggcacagcatgtctgaatgatgatctggcgggattctaccctcttctctgggatttctggaacaaatttaattttgctgttttccaagcatggcagccaaggcgtttcctgagcctgagcsccgtggtcaggaagaacttctccttgtgaggtcaacgccactctccaataggccgttctgattagcaagtcatttcttaaatgtcatctccagctggtgtctaggtcaaggtgaacccattagtcctgccacattcctttcactcctgtctcctcccttagtgaggcctgcctgggtgtttgcctctgctttaatacatctttcagcccctcagcatccccagtgctacctggagatacagacttcagattttgcactttcctctgcacccttattgcaatccttttcattctgttttcttttctcagctctgaccacactattctctcctgattccctgctgcttatatggagtctgattcctcagtagttcccaaatgtttggccagctcaggggctgagaaatgacctggaaaaggtactgagctcctagttttgaagcatgtgctgca

SEQ ID NO: 594766 - DNA, 534 bp, Homo sapiens
tggggtactcaagcatagactgaatgatttagactgttgggaagcatgtttccatgggtcccttgtgttcctacgtgtcttgccatgaattccaagaatataaggccctaactgctctttaactgggccatttctcaaagttatgctagtagcaaacaaccatggaagaagcgacacctcctcccaaacsaagggctggcttccttatcagatgttataaggtagtaatttcaccagatttggcattcctctcctctgtgtgcaggcatccattagtccaatagaaactggggtttagggaaccaatgagaaaccatgctgacactctggctactgttcttgctgtgagcaataaagtctttcatctccgacccagaagtctcatttcttctgtcaacatccataaaactgtatcaagctaaatttgttagcttgcaaaagggcaaaatgtgagatctttggcagctcttgacatcttattcacagtatattttacttaaacataaagacaaaacaagtctaaacattaaagcc

SEQ ID NO: 594767 - DNA, 620 bp, Homo sapiens
tattttctattctctgtagctcttcttcctactatcgtaactctcaactttttgtcttggcaagttgtcaaggctgcagcatgatagactaggtcccagaggaagtgaagacaaggaagtgaagtaaggaatttaagrctaagatttgttttatgaatttgatcaacacagttgagaagcaggcataagaataaataattatttgacttaaaactagcagtctcatatctggaacactaaagtcctgctaaggtagtggcaagattaacaaaaggctctaaaaattggagacaagttttctgatgaaaatcttatgttgtgatatttacttaaaatatgaaaggctgtggcatttttatttggtcagcatagtgttaaaattttggatttggattggcgttggttccagtttgtcacagttgccaccattgcttgttgccttattgatggacaccatcaaacatttacttggactattacatctgaaattattgaaatttgtggctcctgaacaccataaatgttaatctcattagccatgatttactgtgtctctcttattcgccgagtattaagttaggggctttacattctagatcttatttgataattataatgac

SEQ ID NO: 594768 - DNA, 620 bp, Homo sapiens
tattttctattctctgtagctcttcttcctactatcgtaactctcaactttttgtcttggcaagttgtcaaggctgcagcatgatagactaggtcccagaggaagtgaagacaaggaagtgaagtaaggaatttaagactaagatttgttttatgaatttgatcaacacagttgagaagcaggcataagaataaataattatttgacttaaaactagcagtctcatatctggaacactaaagtcctgctaaggtagtggcaagattaacaaaaggctctaaaaattggagacaagttttctgatgaaaatcttatgttgtgatatttacttaaaatatgaaaggctgtggcatttttatttggtcagcatagtgttaaaattttggatttggattggcgttggttccagtttgtcacagttgccaccattgcttgttgccttattgatggacaccatcaaacatttacttggaytattacatctgaaattattgaaatttgtggctcctgaacaccataaatgttaatctcattagccatgatttactgtgtctctcttattcgccgagtattaagttaggggctttacattctagatcttatttgataattataatgac

SEQ ID NO: 594769 - DNA, 620 bp, Homo sapiens
tattttctattctctgtagctcttcttcctactatcgtaactctcaactttttgtcttggcaagttgtcaaggctgcagcatgatagactaggtcccagaggaagtgaagacaaggaagtgaagtaaggaatttaagactaagatttgttttatgaatttgatcaacacagttgagaagcaggcataagaataaataattatttgacttaaaactagcagtctcatatctggaacactaaagtcctgctaaggtagtggcaagattaacaaaaggctctaaaaattggagacaagttttctgatgaaaatcttatgttgtgatatttacttaaaatatgaaaggctgtggcatttttatttggtcagcatagtgttaaaattttggatttggattggcgttggttccagtttgtcacagttgccaccattgcttgttgccttattgatggacaccatcaaacatttacttggactattacatctgaaattattgaaatttgtggctcctgaacaccataaatgttaatctcattagccatgatttactgtgtctctcttattcgccgagtattaagttaggggctttacattctwgatcttatttgataattataatgac

SEQ ID NO: 594770 - DNA, 517 bp, Homo sapiens
  misc_feature 1, 2, 3, 4, 5, 6: n = A,T,C or G
nnnnnngacgctgaaggttaagttgatcacaaatgaccaacgatttattcaaccatgcctctgtaaaagctctgtaaaatcccccaaaactgtgttcagggagtttctggatacctgaaccttgatagttcctggagggtggttcccagagagggatggaagctccataccccttcccacatgctttcccttatacatcttttcatttctatcttttgtaatagtctttgtaataaactggtaaatgcaaataagtgtttccctgagttctgtgagccattctagcaaattaatcaaacccaagaagagggtcataggatccctggccratcccaaaaggtcagaagctcaggtaaaacaacctgaggcttgtgactggcatctgaaagggagcggtcttggggactgagccctcaacttgtgggatctgattatgtctgcaggcagatagggtcagaatagaactgaactagagaacattcagctggtgtctgctgcagaaatgattgcttgattg

SEQ ID NO: 594771 - DNA, 656 bp, Homo sapiens
tttccaaatcttgcgctatgatcgtgtgttagattatcagacaattaaataataaacgggatataaactcttaagacaaaagcctttctcttcacatttcaaactagcattttttgagtttgctccattttaatatatgcaactgggataaactgttttttccttaggttttcccgttttttaagtgaccstatcatagaattcatgtgaacaataactatgaagtgctatgacaccatcaaaattctaagtattatgtatataatacttaaaaatttatgtataaattactgtgcttcatataaaccaatgcactaccaatatatacaaaaagacatggaactcatttattgcttttaaatgtttcatcttcctttagactaatatgaatcacaaattagagtagtttgaatcataacctcaccaactagcaactagttgacaatttaattttctccatttaaaattaaatgacaatttaacaatactaacctaggaaaacaatgaaagaaagtcctctctaattttacatcaaagtgatttttattcttgcagacaccagtttaaaaaaatggtctaactgtgcctctatgtttgtatgtatcaattatctgtctgcatgtacacatgcttgcatgtacatatacacaaaaatg

SEQ ID NO: 594772 - DNA, 656 bp, Homo sapiens
tttccaaatcttgcgctatgatcgtgtgttagattatcagacaattaaataataaacgggatataaactcttaagacaaaagcctttctcttcacatttcaaactagcattttttgagtttgctccattttaatatatgcaactgggataaactgttttttccttaggttttcccgttttttaagtgaccgyatcatagaattcatgtgaacaataactatgaagtgctatgacaccatcaaaattctaagtattatgtatataatacttaaaaatttatgtataaattactgtgcttcatataaaccaatgcactaccaatatatacaaaaagacatggaactcatttattgcttttaaatgtttcatcttcctttagactaatatgaatcacaaattagagtagtttgaatcataacctcaccaactagcaactagttgacaatttaattttctccatttaaaattaaatgacaatttaacaatactaacctaggaaaacaatgaaagaaagtcctctctaattttacatcaaagtgatttttattcttgcagacaccagtttaaaaaaatggtctaactgtgcctctatgtttgtatgtatcaattatctgtctgcatgtacacatgcttgcatgtacatatacacaaaaatg

SEQ ID NO: 594773 - DNA, 656 bp, Homo sapiens
tttccaaatcttgcgctatgatcgtgtgttagattatcagacaattaaataataaacgggatataaactcttaagacaaaagcctttctcttcacatttcaaactagcattttttgagtttgctccattttaatatatgcaactgggataaactgttttttccttaggttttcccgttttttaagtgaccgtatcatagaattcatgtgaacaataactatgaagtgctatgacaccatcaaaattctaagtattatgtatataatacttaaaaatttatgtataaattactgtgcttcatataaaccaatgcactaccaatatatacaaraagacatggaactcatttattgcttttaaatgtttcatcttcctttagactaatatgaatcacaaattagagtagtttgaatcataacctcaccaactagcaactagttgacaatttaattttctccatttaaaattaaatgacaatttaacaatactaacctaggaaaacaatgaaagaaagtcctctctaattttacatcaaagtgatttttattcttgcagacaccagtttaaaaaaatggtctaactgtgcctctatgtttgtatgtatcaattatctgtctgcatgtacacatgcttgcatgtacatatacacaaaaatg

SEQ ID NO: 594774 - DNA, 584 bp, Homo sapiens
ataactatgaagtgctatgacaccatcaaaattctaagtattatgtatataatacttaaaaatttatgtataaattactgtgcttcatataaaccaatgcactaccaatatatacaaaaagacatggaactcatttattgcttttaaatgtttcatcttcctttagactaatatgaatcacaaattagagtagtttgaatcataacctcaccaactagcaactagttgacaatttaattttctccatttaaaattaaatgacaatttaacaatactaacctaggaaaacaatgaaagaaagtcctctctaattttacatcaaagtgatttttattcttgcagacaccagtttaaaaaaatggtctaactgtgcctctatgtwtgtatgtatcaattatctgtctgcatgtacacatgcttgcatgtacatatacacaaaaatgctcatatacagtgtatatttttttcattcatttcattcagtttttaaatttacatcatcatatcaaaatgttttcagaactgctgcacagtcttcacattaatgcctaccttgtattccactggttttctatgccagcatg

SEQ ID NO: 594775 - DNA, 571 bp, Homo sapiens
aatatatgagatgacatattgagaattactgagaaaatggccttaactttctgggtatttttttttttatttgagaactcattgtttttgaagtgacgattggaaataaaaacccctcgtttttctctacaatacacaaaagtacacatgaacacttttccagcaagaaaatagttttaaaatcaatttgatttaatggtttatattttataatttgttggyatgtttattacccacgagcagttctttgaatggtctctacatgttatttacccttttttctctattatatttttattattttgttttaaactaacatatattagttctttatagtaagtatatcaacctctacccagtaggtctattggaatttttttctttcttttttttttgagatggagtcttactcttctcacccaggctggagtgcagtggcaaaatctcggctcactgcaacctccgcctcccgggttcaagtgattctcctgcctcagcctcttgagtagctgggattacaggtgccccccaccacacctggctaaatttttgtacttttagaagagacagg

SEQ ID NO: 594776 - DNA, 571 bp, Homo sapiens
aatatatgagatgacatattgagaattactgagaaaatggccttaactttctgggtatttttttttttatttgagaactcattgtttttgaagtgacgattggaaataaaaacccctcgtttttctctacaatacacaaaagtacacatgaacacttttccagcaagaaaatagttttaaaatcaatttgatttaatggtttatattttataatttgttggcatgtttattacccacgagcagttctttgaatggtctctacatrttatttacccttttttctctattatatttttattattttgttttaaactaacatatattagttctttatagtaagtatatcaacctctacccagtaggtctattggaatttttttctttcttttttttttgagatggagtcttactcttctcacccaggctggagtgcagtggcaaaatctcggctcactgcaacctccgcctcccgggttcaagtgattctcctgcctcagcctcttgagtagctgggattacaggtgccccccaccacacctggctaaatttttgtacttttagaagagacagg

SEQ ID NO: 594777 - DNA, 571 bp, Homo sapiens
aatatatgagatgacatattgagaattactgagaaaatggccttaactttctgggtatttttttttttatttgagaactcattgtttttgaagtgacgattggaaataaaaacccctcgtttttctctacaatacacaaaagtacacatgaacacttttccagcaagaaaatagttttaaaatcaatttgatttaatggtttatattttataatttgttggcatgtttattacccacgagcagttctttgaatggtctctacatgttatttacccttttttctctattatatttttattattttgttttaaactaacatatattagttctttatagtaagtatatcaacctctacccagtaggtctattggaatttttttctttcttttttttttgagatggagtcttactcttctcacccaggctggagtgcagtggcaaaatctcggctcactgcaacctccgcctcccgggttcaagtgattctcctgcctcagcctcttgagtagctgggattrcaggtgccccccaccacacctggctaaatttttgtacttttagaagagacagg

SEQ ID NO: 594778 - DNA, 542 bp, Homo sapiens
caggaaagcacattgcttccttatgcagttcaaatgttttatctgacaatatttcagatatcctttcaaggccacattaaatcctatttatagtagtaggaatgcatgtgtgtgcatgcatgtgtataaaccacattatatatctacatgtctacacatgccccatgctactgactttcgacctcacctgacaaagatcagagtacagcagcataagcaacaagatccagcaaaggacacacagacatctgtactgaattttcctatcttcctgctcccagagttcttggcatttagttgtaaaaataatgttatggtattaaccaaatttaccttagctgcttcaaagtaacagagaaattcagcartttcaaagtgaaaatatgttctcactcataggttggaattgaacaatgagaacacttggacacaggaaggggaacatcacacaccggggcctgttgtggggtggttggagaggggagggatagcattcagagatatatctaatgtaaacgatgagttaatgggtgcagcacacc

SEQ ID NO: 594779 - DNA, 542 bp, Homo sapiens
caggaaagcacattgcttccttatgcagttcaaatgttttatctgacaatatttcagatatcctttcaaggccacattaaatcctatttatagtagtaggaatgcatgtgtgtgcatgcatgtgtataaaccacattatatatctacatgtctacacatgccccatgctactgactttcgacctcacctgacaaagatcagagtacagcagcataagcaacaagatccagcaaaggacacacagacatctgtactgaattttcctatcttcctgctcccagagttcttggcatttagttgtaaaaataatgttatggtattaaccaaatttaccttagctgcttcaaagtaacagagaaattcagcaatttcaaagtgaaaatatgttctcactcataggtkggaattgaacaatgagaacacttggacacaggaaggggaacatcacacaccggggcctgttgtggggtggttggagaggggagggatagcattcagagatatatctaatgtaaacgatgagttaatgggtgcagcacacc

SEQ ID NO: 594780 - DNA, 538 bp, Homo sapiens
tcctgctcagtggctaagaggagrcaggtgtatgaagtaggaggatgtcagcaaatgggcacaaggatgggtagagggcgttgcacacagggcattgtcttaccagaggcaaacactctgggctgtggagtgatctcattttgcagaagtccaagatccatgagaaaggagtgccctcttctcctttcagtcttagtacagccctagtatgagatgtatgaagtcatagtggaaagccagaggtcctgagaggagctgcaactctgcaggccagcatcactcaggtgctttctcatgcttctctaaatacatccctaccccacctcagtgcctgttctcacttgaacaccttgcttggaccactccccatcactgattacacaatactcccacccacagacaccgaggatgattcttcctttttccttgagacttctctggctttttcattgcttggcattttcttccctttgcttgtgtttttttctttatagcaataatcttttcctcttctttggcataagtttgcatcctgcct

SEQ ID NO: 594781 - DNA, 620 bp, Homo sapiens
aataccccacgaacacaagtgatccaaagcaaaaacagacaaatgggatcacatcaagttaaaaaacttctgcactggaaaagaaataaccaacaaagtgaagagacagcccaaagcatgggagaaaatatttgcaaactatccatctgaaaagggattagtaaccagaatacataacaagttcaaacagatatacaggaaaaatctaataatttgatttaaaaatgggcaaaaaatctgaatagacattttgcaaaagaaggcatacaaatgacaaacaggtatacgaaaaagttcccaacatcactcatcatcagagaaatgcaaaccaaaactacaaaaagatatctcaccccagttaaaatggcttttatccaaaagacaggcaacaagcaacaaatgctagagaggatgcagagaaaagkgaaccctcatacactgttagtaggaatgtaaattggtagtcactatggagaaaagtttggaagttcctcaaaactaaaaatagagctaccaaaggacctagcaatctcactcctaggtatatacccaaaagaaaggaaatcagcatgtaaaagggatatctgcactcccacatttatcacagcactgttcacaat

SEQ ID NO: 594782 - DNA, 611 bp, Homo sapiens
agtactctaggtaggtaacaattgtattgtgatagaatcttgagacaatgatgttggtaaaaggtccaaggctcctaagtaaaaggggcatagtttcaacaccagaattgagtagaagaatctcactgaagtctttacgacattacttcacaagttttcagaaatgacgtttcaaaatgtacatgttgagtacatttgaataatttttctttgtttgattgttattatcatttatattccggcttttctttccaggaattggcccacagcaatgtatgaatgtacaaaattagttttctcatttagtgttctcattatggctacatctgttatggtttccagactctgtttatttgtcattggtaaaaatgcacatctgtsgttttgtccaatatccattatgatagcaagatacttaagatgtctccaattcaagtactcactttcgggttcattactcctataaaatgtatatctttagaagtattaatgcccagatgtctgtaagcatctaccaaaaggaaaaacttgtcttatcatcaatatatgtggaaagtttacgttgttttaattaattcattatgagatatcagtgaaatatgtaagagtaa

SEQ ID NO: 594783 - DNA, 611 bp, Homo sapiens
agtactctaggtaggtaacaattgtattgtgatagaatcttgagacaatgatgttggtaaaaggtccaaggctcctaagtaaaaggggcatagtttcaacaccagaattgagtagaagaatctcactgaagtctttacgacattacttcacaagttttcagaaatgacgtttcaaaatgtacatgttgagtacatttgaataatttttctttgtttgattgttattatcatttatattccggcttttctttccaggaattggcccacagcaatgtatgaatgtacaaaattagttttctcatttagtgttctcattatggctacatctgttatggtttccagactctgtttatttgtcattggtaaaaatgcacatctgtcsttttgtccaatatccattatgatagcaagatacttaagatgtctccaattcaagtactcactttcgggttcattactcctataaaatgtatatctttagaagtattaatgcccagatgtctgtaagcatctaccaaaaggaaaaacttgtcttatcatcaatatatgtggaaagtttacgttgttttaattaattcattatgagatatcagtgaaatatgtaagagtaa

SEQ ID NO: 594784 - DNA, 605 bp, Homo sapiens
cagcagggcccattgggtagtgaatcttccactccccacctgacagagacaaggggcacagtggttttctcactggggtcctgaggcaagttgagactccatccccacctggtagcaatgagacttcacaaagcagagtgagacagggctagccgccactctacttctcatgtcatgagggaccaacraagagctgagcctccatatctacctgacagcaatgagactgaacccagaagtgcagaatacggctactcagtaccctggttccaccactgccccaccccagtggcagcagggcacagagggatgccaagcatccattcccatctggcttcgatgagactaaagaatactttcaaagtgagccagctggtacttcactacctgtccccagcgtcatcagggcccaatggggagcagactctactcccccactcacttagagacaatgagacagcatgagtcagtgcctcatttgccatgaatgtgtcagtgaggctggtgggcgatctggtcccactcatctgcacaaaagcagtgtaagtcagttctctacctttgcctagccagggtggtgtcatcaggcccacagggaatcaaaa

SEQ ID NO: 594785 - DNA, 605 bp, Homo sapiens
cagcagggcccattgggtagtgaatcttccactccccacctgacagagacaaggggcacagtggttttctcactggggtcctgaggcaagttgagactccatccccacctggtagcaatgagacttcacaaagcagagtgagacagggctagccgccactctacttctcatgtcatgagggaccaacaaagagctgagcctccayatctacctgacagcaatgagactgaacccagaagtgcagaatacggctactcagtaccctggttccaccactgccccaccccagtggcagcagggcacagagggatgccaagcatccattcccatctggcttcgatgagactaaagaatactttcaaagtgagccagctggtacttcactacctgtccccagcgtcatcagggcccaatggggagcagactctactcccccactcacttagagacaatgagacagcatgagtcagtgcctcatttgccatgaatgtgtcagtgaggctggtgggcgatctggtcccactcatctgcacaaaagcagtgtaagtcagttctctacctttgcctagccagggtggtgtcatcaggcccacagggaatcaaaa

SEQ ID NO: 594786 - DNA, 605 bp, Homo sapiens
cagcagggcccattgggtagtgaatcttccactccccacctgacagagacaaggggcacagtggttttctcactggggtcctgaggcaagttgagactccatccccacctggtagcaatgagacttcacaaagcagagtgagacagggctagccgccactctacttctcatgtcatgagggaccaacaaagagctgagcctccatatctacctgacagcaatgagactgaacccagaagtgcagaatacrgctactcagtaccctggttccaccactgccccaccccagtggcagcagggcacagagggatgccaagcatccattcccatctggcttcgatgagactaaagaatactttcaaagtgagccagctggtacttcactacctgtccccagcgtcatcagggcccaatggggagcagactctactcccccactcacttagagacaatgagacagcatgagtcagtgcctcatttgccatgaatgtgtcagtgaggctggtgggcgatctggtcccactcatctgcacaaaagcagtgtaagtcagttctctacctttgcctagccagggtggtgtcatcaggcccacagggaatcaaaa

SEQ ID NO: 594787 - DNA, 605 bp, Homo sapiens
cagcagggcccattgggtagtgaatcttccactccccacctgacagagacaaggggcacagtggttttctcactggggtcctgaggcaagttgagactccatccccacctggtagcaatgagacttcacaaagcagagtgagacagggctagccgccactctacttctcatgtcatgagggaccaacaaagagctgagcctccatatctacctgacagcaatgagactgaacccagaagtgcagaatacggctactcagtaccctggttccaccactgccccaccccagtggcagcagggcacagagggatgccaagcatccattcccatctggcttcgatgagactaaagaatactttcaaagtgagcyagctggtacttcactacctgtccccagcgtcatcagggcccaatggggagcagactctactcccccactcacttagagacaatgagacagcatgagtcagtgcctcatttgccatgaatgtgtcagtgaggctggtgggcgatctggtcccactcatctgcacaaaagcagtgtaagtcagttctctacctttgcctagccagggtggtgtcatcaggcccacagggaatcaaaa

SEQ ID NO: 594788 - DNA, 485 bp, Homo sapiens
ccaggagaacagtatgggggaaactgcccccatgattcaattatctccacctggccccgcccttcacatgtgaggattattacaattcaaggtgagatttgggtggggacacagtcaaaccataccagcatattatatttaaacttcagaaaaatcaaatacaaaaagaaaaaccttaaaaagcagccagattgagggtagatggtgaagggtacrttacctacagagtaacaagtataagagttgacttttcttcagacaccacacaagtaagaagagaatggggtgacatactacagttttgtgaaaaaaaatggaccgacaaatactaacaatctagaattctgtatccagtaaaattatctttcgagagtgaaagagtcagacatggtgatatgtgactgtagtcccagttgtcgggagattaaggcaagaggataattctttgggctcaggagggcagcttgggcagtattatgaggccc

SEQ ID NO: 594789 - DNA, 505 bp, Homo sapiens
gagagaaagaatttaaggcagcgattttccggtgttaggcaacaggtaaagcaaaactgtgaccaattagagaaggagaattcatgagatggarcccatgctctcccttccttttcttctgcatggagacaatttcatggctgcagacagagagctagaatagaataaaatatggtgggtctgctgaactggggacctcagagttcagaatggctgaagtggctggaatctaatgggcagagcactggagagcagggaactacataggaagtgtgtgtgaaaccataggagaaggatggccatgaattcttcaccaaaggtagagttgtgcatgcaaagagtgagattatgtcaggtctaccagaaagtggttgctacagagccaggaacacaagagatactagaatttgagcaactcgtggagatggtagaattctggtttagtcagagtgaagagaacattttagcactctgagcatgcaactaagatgatggaatatacatg

SEQ ID NO: 594790 - DNA, 505 bp, Homo sapiens
gagagaaagaatttaaggcagcgattttccggtgttaggcaacaggtaaagcaaaactgtgaccaattagagaaggagaattcatgagatggaacccatgctctcccttccttttcttctgcatggagacaatttcatggctgcagacagagagctagaatagaataaaatatggtgggtctgctgaactggggacctcagagttcagaatggctgaagtggctggaatctaatgggcagagcactggagagcagggaactacataggaagtgtgtgtgaaaccataggagaaggatggccatgaattcttcaccaaaggtagagttgtgcatgcaaagagtgagattatgtcaggtctaccagaaagtggttgctacagagccagraacacaagagatactagaatttgagcaactcgtggagatggtagaattctggtttagtcagagtgaagagaacattttagcactctgagcatgcaactaagatgatggaatatacatg

SEQ ID NO: 594791 - DNA, 523 bp, Homo sapiens
aattttgctttatctctagactgcgaatgcagttttaaccattaatagtatagtcacaggaaggccatggacagggttgyttggatgttctgaagtactttcttataagcccaaacaagctctattctatatagaagtccaaccagataatttctatagccttttgcagttttctttcagttttgaaattaggcatgtttagctagttctcctgacataattggattttgtcaaggagagatgcacttttggatgacagttatacagacaattctttccctgcaacaaattcaatttaatgatgctctaatgccctccactgatgtgttagctatcttctgtttattggaccagttctttcagggactttcaggtggttgtttgcttttgttcagaataactgtcagtgctagctatacacaggaggaaactttaccatctaaaaagagtccccaaccataaattatttgttgaacagaggtccaaattgtatttgacatctgcaaacattaaaataaagtaa

SEQ ID NO: 594792 - DNA, 523 bp, Homo sapiens
aattttgctttatctctagactgcgaatgcagttttaaccattaatagtatagtcacaggaaggccatggacagggttgcttggatgttctgaagtactttcttataagcccaaacaagctctattctatatagaagtccaaccagataatttctatagccttttgcagttttctttsagttttgaaattaggcatgtttagctagttctcctgacataattggattttgtcaaggagagatgcacttttggatgacagttatacagacaattctttccctgcaacaaattcaatttaatgatgctctaatgccctccactgatgtgttagctatcttctgtttattggaccagttctttcagggactttcaggtggttgtttgcttttgttcagaataactgtcagtgctagctatacacaggaggaaactttaccatctaaaaagagtccccaaccataaattatttgttgaacagaggtccaaattgtatttgacatctgcaaacattaaaataaagtaa

SEQ ID NO: 594793 - DNA, 553 bp, Homo sapiens
agcatagatgaattttgcctattaacataatttttttagtttatatgaacaatatattcacaraattacataaaacacagatttttgtgtttgtattcttttttcagtgtcatatttgtgagattctttcatatttttgcatgtaattttaggttatctgttttcattgctgcatattaatgtatcctgtgaatataccatacttaaaaaaaatccattttatactagagtatttgaattatctccgggtggggctgttaagagcttccgtgagcattcaatacataccttttaattaaaaaatagtaattttaggtatatacccgggaattgaattgctgggttttagaatgtgcatatgattaactttagtagagacatagccaacgcttttccaaagtggtttacaacttattctcccaccagcagagtatgcatttcctttttctccatgtcctcatcaaaatgtgtttgtttcaatttggccattcgaataagtgagcaatgcatctcattatggtgttaatttgtaccttctagagattaatgagat

SEQ ID NO: 594794 - DNA, 527 bp, Homo sapiens
ttatgcttacataaaattatgaaaaaaayagcctcgtaaacatgtgaattgtgatgtgatgaacataatgacttggcacatatatatacccacccaaatttctgaaaacaatgtttattctaattttgtttgatgtattataggattttccatatccttttaatttttcaagattctagatcagaaatcattgcactgagggttgcttccttgcatatacatcttcctgagcatctgctaccttttggtgtcatttatttgagccatggctgtgttttcagatactttctaccaaaaattcaattgtcctgtgtgaatagtaacactttcattcattattggttgttgacaatttaatgggaattagagtatcagattcaattcaatgtaacaaacacttatttaaaatcaactgtaagattctgtccaagttttaaatcactaattatcttaggaagctgattgcaagggcagtgaagaaactggacacaggtaaataacttttcatttggggaaggggaaaagat

SEQ ID NO: 594795 - DNA, 527 bp, Homo sapiens
ttatgcttacataaaattatgaaaaaaatagcctcgtaaacatgtgaattgtgatgtgatgaacataatgacttggcacatatatatacccacccaaatttctgaaaacaatgtttattctaattttgtttgatgtattataggattttccatatccttttaatttttcaagattctagatcagaaatcattgcactgagggttgcttccttgcatatacatcttcctgagcatctgctaccttttggtgtcatttatttgagccatggctgtgttttcagatactttctaccaaaaattcaattgtcctgtgtgaatagtracactttcattcattattggttgttgacaatttaatgggaattagagtatcagattcaattcaatgtaacaaacacttatttaaaatcaactgtaagattctgtccaagttttaaatcactaattatcttaggaagctgattgcaagggcagtgaagaaactggacacaggtaaataacttttcatttggggaaggggaaaagat

SEQ ID NO: 594796 - DNA, 527 bp, Homo sapiens
ttatgcttacataaaattatgaaaaaaatagcctcgtaaacatgtgaattgtgatgtgatgaacataatgacttggcacatatatatacccacccaaatttctgaaaacaatgtttattctaattttgtttgatgtattataggattttccatatccttttaatttttcaagattctagatcagaaatcattgcactgagggttgcttccttgcatatacatcttcctgagcatctgctaccttttggtgtcatttatttgagccatggctgtgttttcagatactttctaccaaaaattcaattgtcctgtgtgaatagtaacactttcattcattattggttgttgacaatttaatgggaattagagtatcagattcaattcaatgtaacaaacacttatttaaaatcaactgtaagattctgtccaagttttaaatcactaattatcttaggaagctgattgcaagggcagtgaagaaactggacacaggtaaakaacttttcatttggggaaggggaaaagat

SEQ ID NO: 594797 - DNA, 521 bp, Homo sapiens
tttgtgctttcttcttgttcattattgttcctgacataaaagggcaaagtaaccaagaaaactttgcaagctgagatgttaaaagaaggaaatagtcaatgacaagtgttcctttttagttgcacaaaatcaggtcttaaaataacatttccttgagcaaaggttttcaagaaggatgttctatactagattatttgcatagccagcagggcagtgtgattatctggagtagaaaaatcgcttcctgaagtggcccagtgcttctatgagaggcaaaatatgattagttgtgacactgagtaccaaggaaaaataccccatctacctgggactggtaagcatccacatgttcacatgtcctgagacttrctaattgtttgcagtgcactgtaacaactcccttaaggaagaatattgcatgtctttgaagacataaagatgccagaggatcaatgaaacagatgcttcagcatctccaaatggagcagcaacattgctccaagactttgccagcaattcat

SEQ ID NO: 594798 - DNA, 538 bp, Homo sapiens
  misc_feature 520, 521, 522, 523, 524, 525, 526, 527, 528, 529, 530, 531,532, 533, 534, 535, 536, 537, 538: n = A,T,C or G
atgttagcaggcttatgctccccctaaaactttaggagacaatccctccttgtctcttctaggtttctgtatttgaagtccttggtaatccttagcttgtagatgcatcactccaatctctgcctccatcaccacatgacattcttctgcttgtgtttcttccgtcgtcttccgtgtgtgcatctctgtgtccaagtttttcctcttcttttaaggacaccaatcctacaggtttaggggcccaccctactatagtatgaactcatcttaactaattacatctgcatcagcaactatttccaattaagctcaccttctgaggtactagggggtaggatttcaacatatcttttgggtaggacataattcaactcataaaagagggttttgctaattaaaattaatttcacaatgtagtctggaaataatgaagtttgttaytgaaacccatggtatcttctggaaaaaaaatgatctaccatatctgggtcggttggatgtgtattccctttactgaccnnnnnnnnnnnnnnnnnnn

SEQ ID NO: 594799 - DNA, 445 bp, Homo sapiens
atactttcataaagagtttttaaaaatatgctgatcccaggacaactaagaattacattattataatattcagaaaagaggcaggctagtctttatatttaataagaaattcagatgattcttttcttccatttggaatattctactctacatgtatattttagatgagattttaaaaactgactttcaagtatgaaaaataagataacatccagcagagaaggcttatttcaagcccaatttggattatataaaaaaatcmctcagagggattattataacggatttcagaaaatattagtaattccattcctatgtttacacactaaagaaaatagcataatagcatcgatcaatgtccctaaaagtttacattctaagctccacaggatcacccgtatttcaagagattacttcagtctttttacttcggatatctaacaat

SEQ ID NO: 594800 - DNA, 541 bp, Homo sapiens
agcctgccaatattgagaagttaaggagtaagtgagggcaggtgaggcgaggctcttggttcacctgacttactgcagaattaggctgccaggggagtgttgaatactataaaatatctctttcttgcccctacatactttcccctctcattgattagaataaggagtttgataagaatctattgcaaatttatccttccaacaatacccaagcagtactagcatcagcgattcttctgaaaaagtgcttcagatttttatttcaaccgcatttggcaggatgagtttggggacacatctagaaaaggtagtttgaaaaatgtcaaatctattatctcttccagttctgtaatctaaaagtagtactttaaatacctaagtgacttgaaaacctattagcatgaaggagagaaattagcttattggctcyaaaattggagcaaagctcagtatggaaaatctctgctatcttcctttttttttttttttctgtttttttgtttcctgagtgctaaagttgtcattactagagaattgtatg

SEQ ID NO: 594801 - DNA, 581 bp, Homo sapiens
ttttagttatgctaaagaataaattcatttcagttaggtgctattgtctggtttcagttccttaattcataagctgtatactactctagaaaagctatacaaactttatgaccattagttttttcctctataaaatgaggagtttagggctaaatctattatagctaagattctccccagcttttttaaaataaagtttttattttaatatagtttcaacttacagaaaaattgtcaagatagtacagacaaatcttacatatctcacrcccatttcccctattattaacatcttacattgagatggcacatttgtcacaattaatgaaccaatactgatacattatgtttagctgaagtctgtactttattcagattttctaactgtatgcctaatatctttgcgtgctcccagatcccatccaagataccaccacattgccttggttgtcatgtctccttagactcctcttgactgtgagtttctcaaactttcattgtttttgatgacctcgttagttttgaggagtactgctcggtcattttgtggaacaattctcaactcatacgcctatgtttta

SEQ ID NO: 594802 - DNA, 555 bp, Homo sapiens
  misc_feature 498: n = A,T,C or G
ttacatcatgaacaccttcattttatcctctaatggcggcttggagtatggggcattttccagagaaccatacctcataaattcagagatttagattgttttaacacaagcaatcctaaacaacccagatatgttacgctagaaacattccatagataaatttccacttgatactgttgggtttttttttgtttgtttttagttttttaattctagaaggtctatcactagcatattacaaggagattagactgagcctcttaccttctttttttcctgggagaatattttacctgcatttgggttaacttttcaatgtttagagatgtatatgtttaaagttttggccaataattgctcagtaactgaattttaacatatgtgcatcacgtatgccactctttaaatataagtgattatatcactcttgctaaaacagatataaacttgatttcccaaaatttacttacagatcctttcttatggggyctacattanaaaaaaaaaagtatttaaattgctttgcatgttctatcaaaattggtaaaattaaaa

SEQ ID NO: 594803 - DNA, 605 bp, Homo sapiens
ttcaaaccagtcaaatgaatttattccttaataaagactgccttgggcatttgcttccagagctcttgtgtctttcacaaataacacatttacagttttctatttctgtagcaagaagtggctatcagcttattccaagagctagatatatggggttgtgaagaaaaaaaaaagtttaaaaagtcatttaaaattagtactcactactctgagacagatgcccacatgtaatgtatcctggttattaataaactcacatatcaaaactacataaaatagtatattaacattaccttgtcaaaattagatagctttaccttcttctgaactaactccccagaaatttattttcatgaaaatttcatgacaggcacagtgcctcacacctgtcatcctagcactttggaaggctaaggtagaacttgtggctaagagtttgagaccagcctgagcaacatggcgagacccagtctctacattttwaaaaaaaaaaattgtgtgggcatggtggcatatacctgtgatgccagctactggagaggctgaggtgggaagatggcttgagctcaggagttggaggttgcagtgagctataattctaccac

SEQ ID NO: 594804 - DNA, 372 bp, Homo sapiens
aatcctcagtgctatagctgctaggagggctcatgttgtgtccagaattggtggattcttggtctcactgacttcaaaaatgaagctgcggacccttgcagtgagtgttacagttcttaaagatggtgtgtctggagtttattccttctgatgttcggacgtgtctagagtttcctccttctggtgsgttcatggtctcactggcttcaggagtgaagctgcaaccttcacagtgagtgttacagctcttaaaggtggcgcgtctggagttgtttgctctttccgtccagagctgttcgtccctcccggtgggttcgtggtctcgcgggcttcaggagtgaagctacagaccttctcggtgagcgttacagc

SEQ ID NO: 594805 - DNA, 251 bp, Homo sapiens
gaaactgccctttataaaaccatcagctctcgtgagacttattcactatcatgagaacaacatgggaaaaacctgcccccatgattcaattatctcccaccaggtccctctcatgacacgtggggattatgggagctacaattcaagatgagattttggtggrgacacagccaaatcatatcagatggtaagcattctttctttttcacgtacatgtatggtttgttctggatttttctttttagggagaa

SEQ ID NO: 594806 - DNA, 551 bp, Homo sapiens
ttattaatttgtgtgattgattatccctggctttatgataataagaagtcaagttctaaatggaatactaatrtttctaagtttaaagtttgtgatacctcaaagtatctgcaaacatttctacaggaatttaaatattccaaaacgccttaaaaaacttaatgaatattacaatgcaatttagttcatgatataccattagaaagaaggaaggagtgatgaattagtaatttcacagattaaaccacaggatgtgatagcttaaagaaatttagaaattattagattagtctgggtgcagtggttcacgcctgtaatcccagcactttgggaggctgaggcaagtgcatcacctgaggtcaggagttcgagactaacctggccaacatagtaaaaccccatctctactaaaatacaaaaattagccaggcatggtggcatacgtctgtaatcccagctacttgggaagctgaggcaggagaattgcttgaacccaggaggcagaggttgaagtgagccaagattgcaccattccactccagcctggatga

SEQ ID NO: 594807 - DNA, 512 bp, Homo sapiens
gaagtttatagcaataaatgcctgcatcaaaaaaatagaaaagtatgtcaaatatacaacttaatgatgcacctcaaggaactagaacagcaagaataaatcacacccaaaattagaagaaggaaagaaataatacatatcagagcagaactaggaggttgaagattatacggtatatataaagtcttgataaattttgacaagaaggccttttttctttacatcaaatagcaggatctcacaagagagaaagcctgctacttaaatagaacatagttaaattagttattgggactgtgctttcacctaattaatcagctccttttaggggaggggaggartggattctagtgagacaaccacctgggaatttaaatctacaatcaaggaatatatagttggagccaaaagatgaggttcttaatcagagaacttagatcaaacccaggaacttcagagaagggaaagctggaattttctaaaagttaggtatcaacaaccacatatcgagt

SEQ ID NO: 594808 - DNA, 561 bp, Homo sapiens
ctgaatttatgtttaggattcccttccttaaaaaaaaaaaattgttttattscgtatatatgattgcccgagaaaatatattattcagttttttaagtgtataatttatttactcattctcctattaatttacccattctcctattaatgaacatttggcttatatccagaattttgctattatgaatggcattacatgagcatttcttttctttttttactacttctggcacacatgggcaagagtttctccagggcttatggtacatgaattactgtgacataacatatgagaatgctcaactttataagataatccaaattgttttccaaagtggttgttctaatttaaactctcacctcttgtattagttcgagacaatcttgttgatccgcagtctctccatatttggtgatatggtttggctatgtccccacccaaatatcagcttgaattgtgtctcccagaattcccacgtgttgtgggagggacccagggtgaggtaattgaatcatggggatcggtctttcctgtgctattctcgtgatagtgaataagtc

SEQ ID NO: 594809 - DNA, 561 bp, Homo sapiens
ctgaatttatgtttaggattcccttccttaaaaaaaaaaaattgttttattgcgtatatatgattgcccgagaaaatatattattcagttttttaagtgtataatttatttactcattctcctattaatttacccattctcctattaatgaacatttggcttatatccagaattttgctattatgaatggcattacatgagcatttcttttctttttttactacttctggcacacatgggcaagagtttctccagggcttatggtacatgaattactgtgacataacatatgagaatgctcaactttataagataatccaaattgttttccaaagtggttgttctaatttaaactctcacctcttgtattagttcgagacaatcttgttgatccgcartctctccatatttggtgatatggtttggctatgtccccacccaaatatcagcttgaattgtgtctcccagaattcccacgtgttgtgggagggacccagggtgaggtaattgaatcatggggatcggtctttcctgtgctattctcgtgatagtgaataagtc

SEQ ID NO: 594810 - DNA, 455 bp, Homo sapiens
tggagtgcacatcagctgtcakcccccaagtgtgttttgaggccagggctgttgtgagagctagaggcttggtagtaaaacagtgctagatgtggtgtctgctcctgagcttaaaaatagcttgagaaagacagtgatattatcagaaaagaatgtgcataatgaaaagttgaaacttttaaaaactcactcaaaactaagttttaaaaaagaggctgctaggccgggcacggtggctcacgcctgtaatcccagcactttgggaggccgaggtgggcagatcacttgaggtcaggagttcaagaccagcttggccaacatagtgaaaccccatctcaaaaatacaaaaattagccgggtgtggtggtgcatacctgtaatccaagctactcgggaggttgaggcacgagaatcgcttgaacctgggaggcggaggttgcagggagccgagattg

SEQ ID NO: 594811 - DNA, 455 bp, Homo sapiens
tggagtgcacatcagctgtcagcccccaagtgtgttttgaggccagggctgttgtgagagctagaggcttggtagtaaaacagtgctagatgtggtgtctgctcctgagcttaaaaatagcttgagaaagacagtgatattatcagaaaagaatgtgcataatgaaaagttgaaacttttaaaaactcactcaaaactaagttttaaaaaagaggctgctaggccgggcacggtggctcacgcctgtaatcccakcactttgggaggccgaggtgggcagatcacttgaggtcaggagttcaagaccagcttggccaacatagtgaaaccccatctcaaaaatacaaaaattagccgggtgtggtggtgcatacctgtaatccaagctactcgggaggttgaggcacgagaatcgcttgaacctgggaggcggaggttgcagggagccgagattg

SEQ ID NO: 594812 - DNA, 455 bp, Homo sapiens
tggagtgcacatcagctgtcagcccccaagtgtgttttgaggccagggctgttgtgagagctagaggcttggtagtaaaacagtgctagatgtggtgtctgctcctgagcttaaaaatagcttgagaaagacagtgatattatcagaaaagaatgtgcataatgaaaagttgaaacttttaaaaactcactcaaaactaagttttaaaaaagaggctgctaggccgggcacggtggctcacgcctgtaatcccagcactttgggaggccgaggtgggcagatcacttgaggtcaggagttcaagaycagcttggccaacatagtgaaaccccatctcaaaaatacaaaaattagccgggtgtggtggtgcatacctgtaatccaagctactcgggaggttgaggcacgagaatcgcttgaacctgggaggcggaggttgcagggagccgagattg

SEQ ID NO: 594813 - DNA, 592 bp, Homo sapiens
caggagaattgctggccatagcatttgtggatgtcagtaattaagatatctactccagctgcaagctgtttgacaacgtgggtagtagaaggccacagtcctgtgcaaagcctggtcgtagtgagaacagaaaggtcaagtctccccgactggttcatcatgcacttgggagcttggcttatccagggttcactgaatggttttttcatcagtctcatatttttaaaagagaagagtatttgccacaagccacctggcctgtaagttgcttttaggtctttgctgtgtccgtacacaaaaactgttttctattgctgttccattacatgaaattatgctgggcacattcctgattctattayaggcctggagtttattttatagcttgtccctgacctggactgggtttggtttcatgtcactcataattatgcatttccatattttctgtcaaaatcaattctgtctataccttatagaatagagaatatttgttatacacttaaaaaacttactctgtatcattgaagcacaactgcaggagtgagagctttctgtaaagtaaatctgggattatttcacaatgtgtgag

SEQ ID NO: 594814 - DNA, 645 bp, Homo sapiens
ctgtatcattgaagcacaactgcaggagtgagagctttctgtaaagtaaatctgggattatttcacaatgtgtgaggctctgtgcaccttgtttgcctgttttaggtgtttttgataatgtactcttgcagtcacaattgagatgtgtttgattggactagcaatcaagctgattgtctttttattgtatctccaacatctagtaaaatatctgcatatagtaggtcctaacacatatcagggataaatgaattggtctgttgaccaaatatcactgttttcataatgcctttccaggtatggctccaaatagctcccagtttctaatcttttcatttcaacatgcaagctctttccttcatttattcaacataaaatgtatttcrtgtttactatatgccactttcctcaaagagatcacatctggtgtgtgtgagagaaagggagggattgaaaagaagcatgcacgtggatggggtataaatagacatgtcaacagacaattacaatccagtgtgtaaattaagtacaggtgcaatgcagtgaaggcagaacaccaaacccaaacctagaactgcggatgacttcctgaaaagatcattctagtaggctttttttttctttctatttggggcaaggtatgtg

SEQ ID NO: 594815 - DNA, 454 bp, Homo sapiens
cattccaagctcacaaggaaagggtataaatagtatattcttyttgaatattttaaggaatgtagactgcatgttccctttgttagttaagatgctttgacatcaggtgatcagatatggcttccttaagcacagccaagagagccccctgtattaagcaaagacagtgtcctaattattgataccagtttcttcccgcagccagtctgctaatattttcgagctttcctcttctgaaatgggaaaaggtaatctatttttatcaacattcatttttcattgtagtaattctctaaacacaggaattaaaaaaatctcagtgtctctggggcatcctatcgagaggatataagcttcaaggcactcaagcgaaaaacaaattttccaaaaaatatatttcaggattagaatgaatcaccttgacctaacagtaggttcatttaacaaaccgagt

SEQ ID NO: 594816 - DNA, 641 bp, Homo sapiens
gatcagattaacatgagagaaattctgagcacagtatgagcaattgaccagttggagaggaagaatagtgatgccagttaggagagtatcacagaaatgtaggtaaataatgatatggaatacagttatagtaatggcaaaattaatagaatagacgaatcaagagataaaggacataaaattttgtggcttatgaaatgtagcaattgtggyagaaaaaacgttaatccttatgatttggtggagtaacagtgtagttggtggaatgagtcaaagaagaaaaagaatataagaatgaaggggaaataataataatgagtttttagtagcaaggcaataatccagaagtgatatccagtagcaattagatattagggtcaggggctcagaaatagaaccagactgaaaatatggttttgaaaatcaggaacgtgaaaatggttgattcttccgagataaaatttgcagtgagaaaaaagaaaccgaaggacaccaagatttaagagtctggcttaagaagaatcacccatgaaggaaacttagtaggatgtagagtctcaaaagccaagggaatactattagagaaaaattaacaatgtccaattataattaaagatttataacattaggagcaaatttgt

SEQ ID NO: 594817 - DNA, 641 bp, Homo sapiens
gatcagattaacatgagagaaattctgagcacagtatgagcaattgaccagttggagaggaagaatagtgatgccagttaggagagtatcacagaaatgtaggtaaataatgatatggaatacagttatagtaatggcaaaattaatagaatagacgaatcaagagataaaggacataaaattttgtggcttatgaaatgtagcaattgtggtagaaaaaacgttaatccttatgatttggtggagtaacagtgtagttggtggaatgagtcaaagaagaaaaagaatataagaatgaaggggaaataataataatgagtttttagtagcaaggcaataatccagaagtgatatccagtagcaattagatattagggtcaggggctcagaaatagaaccagactgaaaatatggttttgaaaatcaggaacgtgaaaatggttgattcttccgagataaaatttgcagtgagaaaaaagaaaccgaaggacaccaagatttaagagtctggcttaagaagaatcacccatgaaggaaacttagtaggatgtagagtctcaaaagccaagggaatactattagagaamaattaacaatgtccaattataattaaagatttataacattaggagcaaatttgt

SEQ ID NO: 594818 - DNA, 548 bp, Homo sapiens
ctctgccagccatgtgtacagcaaggagcagacaagaggtgctagcccagggaaagttaatttgcataataagatcagggtggggcaaccagccttccccatgcgctttgtgaatgtcatacctgatagaaccaatctgtgagccctatgtaaatcagacactgcctcctcaagcctgactataaaatccagtgcatccgcagctggcgaktctttcctttctgaagtcccctctgtctcactagaaagagagctgtttcctttctctttcttttgtctattaaacctgtactcctaaactcctcatatgtgtccctgtcctaaattttcctggcaagagagacaaaccttggatatttaccccagaccttgtagctgtttcagtagtgctacaagggtaatcaaaatagcctcagtttctaccgttgtgaattttgccttttattcaggcgttgctgcccaaagtgtggtcaccaacttgcagcatctgtatcacctggaaagaacttgttgaaatgcagaatctgaggcccagcccagatcccctg

SEQ ID NO: 594819 - DNA, 568 bp, Homo sapiens
taatttgcataataagatcagggtggggcaaccagccttccccatgcgctttgtgaatgtcatacctgatagaaccaatctgtgagccctatgtaaatcagacactgcctcctcaagcctgactataaaatccagtgcatccgcagctggcgagtctttcctttctgaagtcccctytgtctcactagaaagagagctgtttcctttctctttcttttgtctattaaacctgtactcctaaactcctcatatgtgtccctgtcctaaattttcctggcaagagagacaaaccttggatatttaccccagaccttgtagctgtttcagtagtgctacaagggtaatcaaaatagcctcagtttctaccgttgtgaattttgccttttattcaggcgttgctgcccaaagtgtggtcaccaacttgcagcatctgtatcacctggaaagaacttgttgaaatgcagaatctgaggcccagcccagatcccctgaatccaaatctgcattttaatgaaagtcttgattcaaattcagagaatgtttgataagtactgtgtagtacacacta

SEQ ID NO: 594820 - DNA, 552 bp, Homo sapiens
ccaagtgctgccacttcctcctctgtgttgccactggcttctgattagacactgcaactgtgtctaattaggagtatggcttgctatctgatatggtttggtttttgtccccacccaaatctcatctcaaattgtaatcyccacatgtcattggagagaccttgtgggaggtgatgggatcatggaggtggtttctcccacgatgttcttgtggtagtgagggagttctcatgagatctgatggtttttaaagtggtggtttccccgctctctctcttctgtcaccttgtgaagaaaatgcttgcttctcctttgccttctgccttgattttaagtctcctgcaccatgaggaactgtgagtcaattaaaactttccttcataaattacccagtcttaggtattctttttagcagtgtgaaaatgaatacagatacttggtacaggcagagtgcaatactgctataaagaaaatctgaaaatggggaagtgaatttgcaactgatcaacagggagaggttggaacagtttgaagggctcaagagacaggaag

SEQ ID NO: 594821 - DNA, 634 bp, Homo sapiens
tttgtttataacccaactaaaccagtcactagctatgttttgttgtttaagaactctatttttataatgcaaacatgctacagtgtggggaaaacatattatattgtataaaatacagacatcatacctatgagacatggtcttattttttattataaaagcttaaytgaggacctaccaaccacctgagtatatttacatacattttgtagctaatggcagaaataaaataatttccataagatttaatcctattgctcattggtaaatatttttatttggcctgcacagtatttataatttaaaaaataattattgaacaatgagaataatgatagcttatgttcattaagtgcttattacatagggcgtcacatgaatttgactctttcagtcctcagaaaacactatgagccaggcagtatcgcaaaagtgcacgtctcccaggataaaaatcacactgcagtcttcacagccttcgggacagcactatttttaaactccgttttcggctgagaacaatgaggccctgaacaattgagtaacaccagcatcacagcctagtcagtggcagagctaggatacaaatgtagtgtctcttgctccaaagtttgccctgtgctatactgcccct

SEQ ID NO: 594822 - DNA, 463 bp, Homo sapiens
ttttatttaattcttaaaaacctagcatctgtgagattttttcagtaaatgttgccattattgactataaaatataaaaatatttaagtatgttcttatctaatgaaagtgtcacaaatgagtaatttagggtaagaagacatgcccaaatatagcttatgatttgatggtaaaaaaatacatggtttaagtatttcaataaaaaatgaattttaagatttattaaaatatgaataattaaagaaaactcttttactatctcctgagaaatcacagggattcttcattgttttctgagaaacatcatataartggataattgcttaaaacagggaaaaataataacttccaataatataaaagggcttaaagccaaatatatttcattcctttgcctatgtaaaataaataagcaaaaaatgagatgaaaattttgtctacaatgagactaaaaatggctata

SEQ ID NO: 594823 - DNA, 577 bp, Homo sapiens
tcaagttatagtctgtcaaaaatgactgccaaatattttgcctttggattaaatcaaggtagaattctaaaactcaacataaaatattttatagttcaaatagcacgtctattttcctgaaagatatgcatgagacttctgagcacctacattttaattcttttcttgagaatattaagtcgagtgggataggaacataaatagaatagttgacaacctattatcaacataattaaatgaagctggtacctgctggagcccactcatgcattctcacaccattcatgggcaaataacagacctgcatagacccaaaccrcactcaaagttaggtatttacctgaaaaactccaaaattggacctcctaatagatactttcaggaagaggaagaaacatacattaaaaatcaaggagataaataccccaggaagaatgaagaagagttattttagaaatcaagagtataaaaatctaagaactacagaaacatagtcaacttgagtaaaaaaaaaaaaagagtttaaagaagaaaaatataatgtttaaaaggtaagataagataataaagaataaaa

SEQ ID NO: 594824 - DNA, 667 bp, Homo sapiens
taagtcgagtgggataggaacataaatagaatagttgacaacctattatcaacataattaaatgaagctggtacctgctggagcccactcatgcattctcacaccattcatgggcaaataacagacctgcatagacccaaaccgcactcaaagttaggtatttacctgaaaaactccaaaattggacctcctaatagatactttcaggaagaggaagaaacatacattaaaaatcaaggagataaataccccaggaagaatgaagaagagttattttagaaatcaagagtataaaaatctaagaactacagaaacatagtcaacttgagtaaaaaaaaaaaaagagtttaaagaagaaaaatataatgtttaaaaggtaagataagataataaagaataaaacctcttattatatctcaccattttgarggtcaggagattcagacagggtctgcctggtcttgtctctgatctgcatattggacctccaatgagaagactcaaatgtttggtggcccaaacaactggagctggttgggtatcatactttctatacatggtcagcttagtcttcctcgcagcatggtattcccaaggtagctgtactatatacagtccccttaaagactagatcagaactgtcaagtgtcacttccactatactcta

SEQ ID NO: 594825 - DNA, 667 bp, Homo sapiens
taagtcgagtgggataggaacataaatagaatagttgacaacctattatcaacataattaaatgaagctggtacctgctggagcccactcatgcattctcacaccattcatgggcaaataacagacctgcatagacccaaaccgcactcaaagttaggtatttacctgaaaaactccaaaattggacctcctaatagatactttcaggaagaggaagaaacatacattaaaaatcaaggagataaataccccaggaagaatgaagaagagttattttagaaatcaagagtataaaaatctaagaactacagaaacatagtcaacttgagtaaaaaaaaaaaaagagtttaaagaagaaaaatataatgtttaaaaggtaagataagataataaagaataaaacctcttattatatctcaccattttgagggtcaggagattcagacagggtctgcctggtctygtctctgatctgcatattggacctccaatgagaagactcaaatgtttggtggcccaaacaactggagctggttgggtatcatactttctatacatggtcagcttagtcttcctcgcagcatggtattcccaaggtagctgtactatatacagtccccttaaagactagatcagaactgtcaagtgtcacttccactatactcta

SEQ ID NO: 594826 - DNA, 622 bp, Homo sapiens
tcttcaattattttcatcagtttttttgtaatttttatagtaaaatgcacttgtaagtgtattcataagtattttattatttttgatgctattttaagtggaattatatttttcattttatcttagggttatttattgctagcatatagaaatcaatttttgtagattgatcttgtatcctgcagcctcatgaacttgtttctcagtctgatagttgattttcccttgaaaaaaatataatgattccttaagactttctatatatgagttcatgtcatctgtgaatagatgcaatttaacttctctctttccatctggatatcttttgtttatttttcttgcttaatagctctgggtagaacctctactacaaggttgaataaaagtgatttgagtggaaatacttgttcttcatcttaggtagaaagcaytcagtcttaaaccatagaatatagtgttagatgtcaattttttaagatgccctttttcaggctgaggatgtttctttctattcctagttccttgagtgcttttatcatagaacgactttaaatgttatcaagtgctctctctgtgtctattgggattattatgtgcttttgtcacttattgttttattttt

SEQ ID NO: 594827 - DNA, 467 bp, Homo sapiens
cttatgtctttgaatctatagcatttccattgtatatgtcatgctattggataatgtctttaaaaaatcatttctgacaatccgtgtacagtgtataaacatttacrtattaattacatagcaattaattacaatataattgttaacgtaagatttgtctgatttttaaattatacttctatgtgtctttgttttctctattttttcattgatgtattttctgtgtttaataaatattttctagtgcttttagatttttaagtttatatttacacaaacacacaagagtcatgtgtcacttaatgatgtggatatgttctgagaaatgcatcattaggtaatttcatcactgtgtgaacatcatagagtgtacttacacaaaactggatagtatagcctactacacacctaggctatatggcatagcctattgctcccaggctacaaacctatacagcatgttacca

SEQ ID NO: 594828 - DNA, 569 bp, Homo sapiens
gtctttcaacttgttagttgtagatatttcataggtgcccttctctggttgaggaatttccactttattcttaatttgttgagaggtttttatcatgaacagtaatcgaatttggtttaatgcattttctattgaaaatatggggattgttttcatacaattaatattacmtatgtattacattaattaattttgaatgttaaactaaccttgcattcctagcataactttcacttggccctgtttttttttaacccctcaccattttacatattttctctgtattatgatgtcaacagtgtggttattgtgtttttaatgagtatttcatattttatcctattgctgttttgttgagtttcttggatctgcaaattaaggactatttttaaagaaatttggaagattttgtgattagacctccatgtaaaagtgtgtgtgtgtgtgtgtgtgtgtgtgttatgtgtgtgtgtgagaaacagagagtcacctgaaaaataagaataattttgcatacataaaatttgaacttatgctaataaagagaaacaataaaataactaaaaagg

SEQ ID NO: 594829 - DNA, 569 bp, Homo sapiens
gtctttcaacttgttagttgtagatatttcataggtgcccttctctggttgaggaatttccactttattcttaatttgttgagaggtttttatcatgaacagtaatcgaatttggtttaatgcattttctattgaaaatatggggattgttttcatacaattaatattacatatgtattacattaattaattttgaatgttaaactaaccttgcattcctagcataactttcacttggccctgtttttttttaacccctcaccattttacatattttctctgtattatgatgtcaacagtgtggttattgtgtttttaatsagtatttcatattttatcctattgctgttttgttgagtttcttggatctgcaaattaaggactatttttaaagaaatttggaagattttgtgattagacctccatgtaaaagtgtgtgtgtgtgtgtgtgtgtgtgtgttatgtgtgtgtgtgagaaacagagagtcacctgaaaaataagaataattttgcatacataaaatttgaacttatgctaataaagagaaacaataaaataactaaaaagg

SEQ ID NO: 594830 - DNA, 568 bp, Homo sapiens
gaaaaacaaacactagtacatgtctttaatctgtgaattgggcaatggaaaagggaactgagaaacagaccggaggctcagcctagttttaccacattggctgtatgttaaataactcacgtaaactctcatcctgtttcctcaagaaaagtacttactaggacaatatggtagagactttcaagcacagtttctcaaggaggagagattttcagggaaactccctacacatacagctgtgtttctgcacaatggaaagcacgtgggatgggtgcctgatttacactgtgccaatgagaatttttcttccagaaatttgagattaggtcatacatatcagtgtctaataacacttgaacttggaagaaaagcaaacttataatcaaggttgtctatagtatggtcagttttcatcrcttgctcatccaattttatgcacaaaaagacagcagactgaaattgaatacaaaatgcaaaggcaagagataattagaaagaggtaaagggagacagattgacattgagaatacctgccatggagcctgattttcccctttcctggtatcag

SEQ ID NO: 594831 - DNA, 616 bp, Homo sapiens
ctcaaacagagagagcaaattctccattcctccaattttttcttttatttgagtttcaggtaattggatgatgcccatccacagtggtgagggcaatcttctttatawcatctattgattcaaatactaatctcttctggaattaccctcaggaacaaacctagaaatagtattttactggctatctgatcatcccttatcacagtcaagttgacccacaaaattatccatcacaagggatttataactaatggatgaaacaggtattaaaaaaagtgcaataaagggttaaagaggagtttatagtggtacatttaacttcctgttttagcaatggagcccattgctgcaggcttatatataaactcatgtgtggtaagtctgtgggcctatgaccaggaataaattccatacctttatcaatcattcacatccattactggaaaaatgatataagctcagttgtagaggtgaggttttacattaagtataaacaaggtaatggtaaaatttactcctgggataaggaaactcttcatagagaaagcgatgtttgagctaattttggaagcaaagtaggtgttgattagataatgaaggagagtaggtgggactt

SEQ ID NO: 594832 - DNA, 424 bp, Homo sapiens
cttgcttacttcacatgtttttgtactcgcctgctttgaggtttcgacttcttgtaaagccttgaaaacataaatgtccatgatgtcattgtagaaagargagccagcaaaagagactgagaaggaaatggggacaggagggttgatttggttgtagcatcaaatggttctggatagcaagagatgatcaatgtgggaaaaggaatggaaaagcttatggaacaatgccaaagccagtctgccccatttaaaaatgcttgcaaggattctcaagtttggtagcttagaattacataggttgtgtgatttaattcaactattttgaaaatgatatttcttaggataattaaaattttgtgatgcagtaaaatatatttatctttttttaattttatggcttactcatatcttattaaattattgg

SEQ ID NO: 594833 - DNA, 582 bp, Homo sapiens
tggacttacagttccacgtggctagggaagcctcaaaatcatgtggaaggcaaggaggagcaagtcacatcttaagtggatggcrgcaggcaaagagagaggttgagcagggaaacccctccttatgataccatcagatctcatgacacttattcatgagaataattattctcactatcatgagaacagcacgggaaagaccagcccccatgattcaattacctcccactgggtccttcccacaatacgtagaaattcaagatgagatttgggcagccaaactatatcattctgccccagcccctcccaaatctcatgtcctcacatttcaaaaccagtcatgcctttccaacagtcccccaaagtcttaactcatttcagcattaacgcaagagtccacagtccaacatctcatctgggacaaggcaagtcccttgtctgcctataagactgtaaaaccaaaagcaagttagttacttcctagatacttgttagttacttctagttacttcctagatatttcctagttacttcctagatacaatttaattggctcatgcttccacaggctatacagaagca

SEQ ID NO: 594834 - DNA, 643 bp, Homo sapiens
  misc_feature 129, 168, 171: n = A,T,C or G
agaaatcatatcaagttcttttttttacaataaattaaactggaatcagtacagggaattttggaaactttcaacagacaaaactacatgctcttgaatgatcaattaatgaagaattggaaaggcagntaaatattttttgaaataaatgaaaatgaaaacataagntgntaaaatctatggggtacacaaatgctgtagagtaagagggaagcttataggaataaacatctacatcgtagaagatttaaaaaaactaataatgacctcaaaaaactagagaagaacgaacaagtcaaacccaaaattagtgaaaaaaatgaaatatcaaatattgagcaggaataaaagatactgagactaaaaaaattacaaaagatcaacaraaagttttttttaaagtagttttagataaaattggtaagcctttagctagagtaagaaaaaaaagaaggaagacccaaatatataaaatcagaaatgaaaagggggggtcatagcaagtggtaccacagaaatacaaagtattattacagactgctatgaacaactatatgccaacaaataggtaaacccagaagaaatgaataacttcctgggcacatacaacctgttaatattgaaccatgaggaaacagaaaac

SEQ ID NO: 594835 - DNA, 457 bp, Homo sapiens
ggtaaaaatctataaaaagctgggtaggttacatttaatttctaaagcaaccagtaaaagataaccaaaaatatatagttaaaaatcacaattgctaaaatagaatactaaaaaatttttcaattaatatagtataaaattgatataaaataaatcaggacatgagggagggaagtaggaactaaatgagacaaatagcaaataatrtaatagaatccctaaataaaagataacaaatgatcacattaaatgtaaatgatcgaatcacacgcaagtgggtgtgcatttccatcacatttgtggacccctggtattcaacattctttattacctaactagcccatacctaatctttacgaatctattagatttttctttctttcttttttttttttttttttagcagaattcatcttactgttctacagaggaatttggcacagggaagcaaatgttc

SEQ ID NO: 594836 - DNA, 457 bp, Homo sapiens
ggtaaaaatctataaaaagctgggtaggttacatttaatttctaaagcaaccagtaaaagataaccaaaaatatatagttaaaaatcacaattgctaaaatagaatactaaaaaatttttcaattaatatagtataaaattgatataaaataaatcaggacatgagggagggaagtaggaactaaatgagacaaatagcaaataatgtaatagaatccctaaataaaasataacaaatgatcacattaaatgtaaatgatcgaatcacacgcaagtgggtgtgcatttccatcacatttgtggacccctggtattcaacattctttattacctaactagcccatacctaatctttacgaatctattagatttttctttctttcttttttttttttttttttagcagaattcatcttactgttctacagaggaatttggcacagggaagcaaatgttc

SEQ ID NO: 594837 - DNA, 551 bp, Homo sapiens
ataagaaatccttcggcactggcaaggggattcaaaccatgcaagcgccttgtcaaaatgcaccagagctctcacccaagccatacccctaaccatactagaaacctctagccatttttagacttatttgggaggtctgcaccgctctcctcagaaaagcatcaattacgtaagaaataaaccttttaataccctctgggggtatgtgtgcgtgatatcatgtctcaacatctgaaccaaattttcagtgtgggcccatccttgtatttcaggrttggtgcaacagctaatctgcacaccgatttaagcctgtattattgccaggaattttgggatattttcaaatatgtcacactatatttatgcaaattttttgtttaggctataaacaggtagaaatagttacataaagaaattgaaatagcttttcaccagttcactcctatttttggatgtttctgctctggtgactaatagacagttctggtaaacaatttaatgctgtgagaacttaaggacatatgatcataaacctggtgtatcaaaccaag

SEQ ID NO: 594838 - DNA, 637 bp, Homo sapiens
acaaaagacaataactctgaaagtcatcccatatcttaagatatgattttttcatcaattttgaactatgggtagttgtatctatactacactagaaaagatacgttgcttttaatgtcatcccatgtctataacaagagtaacttcattgtttctgtaattcttttataatattgaaatattactaaggatatacagttgaaataatcttgagcacagatttttctttattaacattagtggagtattttatattaaaatatttttaaatgaacaggggccagatgagaaatttctatccatatgctataaatagaacacgatggattgtgttaattactttgttttcagaaaaagtgattcatttttaccaagtacttagatttacttacctttctggtctttcaaatcttattcagactctcttcagcagtgaaatcagtgtctaatactctgatrttatcttttgtataatagtgtgtcctggcaaaggaaggttctggctaattgttagcagagaaatctttcatcttgtctcatccatctcaatgagcttgtgctacagtgcaaaatatatactaaacaatagacaatgaaaagattactgggctcattttcttaagaaatcataaaaatt

SEQ ID NO: 594839 - DNA, 527 bp, Homo sapiens
gaaatttctatccatatgctataaatagaacacgatggattgtgttaattactttgttttcagaaaaagtgattcatttttaccaagtacttagatttacttacctttctggtctttcaaatcttattcagactctcttcagcagtgaaatcagtgtctaatactctgatattatcttttgtataatagtgtgtcctggcaaaggaaggttctggctaattgttagcagagaaatckttcatcttgtctcatccatctcaatgagcttgtgctacagtgcaaaatatatactaaacaatagacaatgaaaagattactgggctcattttcttaagaaatcataaaaattataatttttgcattggtatcaaataatgctaaaaacggattttttgaaaggaaaacttatgaagttatatgtttttgaaaaggaaacgaagtctggataaagttatatttccttttcccaaatctagttttttatcacagctactagtataggtagacattaggctgattaataaaaa

SEQ ID NO: 594840 - DNA, 533 bp, Homo sapiens
gacagaaaacatggttcaagcctccattctgccacttttcaactatttgactttagttaagctacttgatccctctgagcttcacagatcagcctcaaaacgccacgcttatcattaccaaaggcagttctctactaatgagagaggaatcagtgataaatactgcaacttcccaatctctcaatagacaattctaagtaataatttgcacagttcctcaaaggtccctagaaggactgagcccgtttcacatagtagtaatcactccactaatgcacrgtacaacggtaaagttacttatcttccccattcctgcattgtgcttccagagatcacctctcctacaaactcctgccttcaactccttgtattagcttctagaagaactgaaacaaatcatctcattatgtttaagacaatccacagtaattctccaagataagttcaacatctgcttgttcaaacaggcagtttaaataatggtgcagtaggaataagcacctctgcaagtttcaagtctttgacagtagcaa

SEQ ID NO: 594841 - DNA, 384 bp, Homo sapiens
tatattgtggccatgttgccaaaagtctagccccctcctcagacaaggagctstaggtctgcaaactgagtaagcagctatgaattaccactatggatgagtcaggtttcttcctatgtgacctggaatgtacttgtttatatatgtctaggctgcccctctatttcattcctagtgttcccacctttggttccttatcaacacagaagcctgggagtcaaaacactccaagttccattctgttaatcagccatggaaattgggaccacttgtgctgaagtgctaccacctgtgtctactattctgtgctccatttatttctactataattggggagcccaactacatgctggtatcttctatgatcatttttagtcttcagag

SEQ ID NO: 594842 - DNA, 384 bp, Homo sapiens
tatattgtggccatgttgccaaaagtctagccccctcctcagacaaggagctgtaggtctgcaaactgagtaagcagctatgaattaccactatggatgagtcaggtttcttcctatgtgacctggaatgtacttgtttatatatgtctaggctgcccctctatttcattcctagtgttcccacctttggttccttatcaacacagaagcctgggagtcaaaacactccaagttccattctgttaatcagccatggaaattgggaccacttgtgctgaagtgctaccacctgtgtctactattctgygctccatttatttctactataattggggagcccaactacatgctggtatcttctatgatcatttttagtcttcagag

SEQ ID NO: 594843 - DNA, 475 bp, Homo sapiens
ttatcagaaataattctgagtccagtaccagacagatctgtcaaggtggaagcaacaattccaagaatcttccaggtgttgacctctgcttcacagactcactccaggaggattctgttgatctgggagcctctgctttgctgcctgcttgcttctttggcctataggggacttcctaccatattctgcatgcacatggccttctccacatttctctcctgcccccctaagataatagcctgctatctttgagaaaagtgaccagccagaggagaggagccacataccaacgaagttatattcaaatttattttaattcaaaaatgttacagcaattttactctactttgttatagtctacttataataaaagtaattgggaaggaatgtctccyggtttaaacctaggctggaatagaagatttttgcttagcatcatgtccatgaccttcatctaggaagcaaaattatgatt

SEQ ID NO: 594844 - DNA, 644 bp, Homo sapiens
gattctccattttccaaaagtaagaggctccaacttggctttctgtctgcccaccagtaaagtaacttccatatagatggtatttgaaagtaagagttcttgacaagagactgtcttccatttcatctctattttacctccctgtctccaatgtgtggttktgttctgtttttccatgaaaacaaaaaaaaagtggtagatttaaaaaaacgtttgcataatcattattctgcacctggaacaaactggggatatggcaagtccaaagataaacaagcaatcattgtattcaagaagcttatgaagcagatgacatcttaactgaatctttgattttactgactcaacaagaacccagacttagtgaaggatactgagaagtagggaactatgcttgaaaaactgagagactttatgtcctcaggtccactgccaggaagctgaacacattatccttttagacctcaatggcaggctacatttaaacatttccctctcatgtttatgttctttgacctattcctggagatctcatttccagtcacccagttaaagctatcacatctaaatataatcccaatagaagaatgaatttagtaacatctgatatgttactctcaaaagatttattcagaagagtttgt

SEQ ID NO: 594845 - DNA, 573 bp, Homo sapiens
ttattttcttttttgttcagtccagaaccaaagtactaaatgccagttaattactctgctgactcagaacctaaagaagttgtatgtgtttagctgaatatcaaagcaaagagagagagagagagacagagacagacagacataaagagagattcaactcaagctgcagatggtaccaagatgaacccagctaagacgtggttggttctcttcccctaaacaaggaataatttttaagtatatctgccatgatataacaggttaacaacataacattaactatttgcttccagcttttaaaaaagacagcttttgtttaaggcctagataaaattcttggttcttcatggcttttttcacagcctcctgaaaaggcagtayttttccagtgctgaaggagctcataatttaaactggctggtcctgtcaaattcaacttgacagagccactgagaaaataaagtctatatttcatttgatatttacaatacacatatttcaggcattacaattatgaaacctacactattttatttaaaataaaactaaatctgagcacacatacctatccaa

SEQ ID NO: 594846 - DNA, 609 bp, Homo sapiens
aatgagttagaatggaaattagactcttttttttatggatgttatatgttgggagcaggagaggaaaaagtggaatttgatgtgcacattgattttggatgttctttaaggaagttggaaactgggaaaagaatttggactaagaatgtatacttgtaattaaattctccaaattataaagtatactgagacctatcatctacttttaaaaatgtttttcattgcactgcaatccagaataccaaattatctgccactaaacgtaaccacacctgcagcatgattattctatggagagtctgtaatgtaggacatttgtctttctttctactgctaacctcgtgtagagtgattactcttgctggactactgtacttgaaggcagtgtggagcacgttatgttaatagcagagagctatcactctgcctgtactcctasttacagtaaatggatttggtatctctcacagctgcatcccttttcatgattccctcatatagtgaaagaatcatctgtggaaacttccctcaacagccaatcttgcctagtgttccccacacactgatgcatttgacagatgcaactgccttagtgaagtccacaaacac

SEQ ID NO: 594847 - DNA, 624 bp, Homo sapiens
agaatcttcaaaggctgcatgccttccacttgtaaaatctctcagggtgaatgctgttttctatcacaatgcaagtgtaatattagtgtattgatgaacacagattttaaagtaagctaaatagatattaaactaactttcttcatttttatcagaaataaataagttatgtcataacttgttcttattataaaatctttttatcttaagttccagacagatttatttttggagttagcattttaaataacaatttcctgagtgaaaaaagttatgycccacttagaatggtagaactttctgaaaatgtttttgcagccctagattaaaatgtaaatttcttgtataaagtacacagaactgaaagcttttcgatgtaaaatcagacaagctagatagtctcttgggttaatctaagtgacagctcttccagccgctgagtccttctccttgctccacgcctggcacatatgctagaactaacctcatcaactctcagtttaaaaatacttgttttgtcccatacagaattttaattgtaattttctgtagctgttggtaaagcgaactaaatgcttcatatcatatagacattacataccttgccactgataacataactga

SEQ ID NO: 594848 - DNA, 624 bp, Homo sapiens
agaatcttcaaaggctgcatgccttccacttgtaaaatctctcagggtgaatgctgttttctatcacaatgcaagtgtaatattagtgtattgatgaacacagattttaaagtaagctaaatagatattaaactaactttcttcatttttatcagaaataaataagttatgtcataacttgttcttattataaaatctttttatcttaagttccagacagatttatttttggagttagcattttaaataacaatttcctgagtgaaaaaagttatgccccacttagaatggtagaactttctgaaaatgtttttgcagccctagattaaaatgtaaatttcttgtataaagtacacagaactgaaagcttttcgatgtaaaatcagacaagctagatagtctcttgggttaatctaagtgacagctcttccagccgctgagtccttctccttgctccacgcctggcacatatgctagaactaacctcatcaactctcagtttaaaaatacttgttttgtcccwtacagaattttaattgtaattttctgtagctgttggtaaagcgaactaaatgcttcatatcatatagacattacataccttgccactgataacataactga

SEQ ID NO: 594849 - DNA, 529 bp, Homo sapiens
aaaaaaaaaaaaaagaaaagaaacaaaatacaacagatgaggcttatctttaatcatgccacttaatctccactttctcaagaagtaacgactgttactaatgagtgaatattcctcctgatctttctcttgcattcataagttattatatgcacccattaaaaatgcaaaatactgtcttgaggtactactctgacttcatttgtttcatgatttcataatgtgcgtgccatttgcagtctgttgtttttcacttrataatgtgtcaggaattgttctccataccagctcaaagctatcaatctcattttgaaagaactgaataacattccataatatattagtaacataatgtatttaactcttcttcatatgggcatttaggatgtttcgaaattttttgttattaacaaatagcatctgatgaatgctcttagacatgtgtgtttgtgcacatgtgcaagtactgctatagaataagccaaacacctaggcgtgggactgatctgtactatgatatgtaacactt

SEQ ID NO: 594850 - DNA, 529 bp, Homo sapiens
aaaaaaaaaaaaaagaaaagaaacaaaatacaacagatgaggcttatctttaatcatgccacttaatctccactttctcaagaagtaacgactgttactaatgagtgaatattcctcctgatctttctcttgcattcataagttattatatgcacccattaaaaatgcaaaatactgtcttgaggtactactctgacttcatttgtttcatgatttcataatgtgcgtgccatttgcagtctgttgtttttcacttaataatgtgtcaggaattgttctccataccagctcaaagctatcaatctcattttgaaagaactgaataacattccataatatattagtaacataatgtatttaactcttcttcatatgggcatttaggatgtttcgaaattttttgttattaacaaatagcatctgatgaatgctcttagacatgtgtgtttgtgcacatgtgcaagtactgctayagaataagccaaacacctaggcgtgggactgatctgtactatgatatgtaacactt

SEQ ID NO: 594851 - DNA, 440 bp, Homo sapiens
taagatgtgacttgctcctccttgccttctgccatgattgtgaggcctccctagccatgtggaactgtaagtccaataaacctcattcttttgtaaattgccaagtcttgggtatgtcactttcagcagtgtgasaatggactaatatactaagcttcagatgtggccactggctataagatgtgtggggaaattattttccagaaaggtcatcatcaatcttcatacacccacggcactcccactgcctcaatccatccacagattattgaatatgaagctctgcttaggaactaagtgaggcttaatggtataagtagccatggttcttaacgtggtgtttgcaaatatttagtttttgctttagaaaaatgatgggctttaaatgtatttatttgagaaactccaaaagacctttatccttgatgcttaaaataaac

SEQ ID NO: 594852 - DNA, 598 bp, Homo sapiens
acaaatagtcatacaaacataatgaaaacaacatgcttcagatttttcacattttatttttgtggattatctgagcagtcctaatcatgttacactggcaatgcatttaagggtacagcctctacactcagcacctgggatttttaaatgtattaagcagcccattttctttgtggaccttctagwtttttcatcacatggtagatatcttttgtaccagtacccaccataaatagctgttatgaggataaagcaaattggtatttgaaaagggtgatcgaattgtgtctggaacctatggttccataaatgttaactattttcattatcttgaataatagttatatcatcactattattattttactgttgtcagcatgcttttcaatctattgctgtctgtagccagatttcaggagtgttcaaaagcttccccctaagcagcttcccgttcatttagctcagtgcgtcccaggatgtctctgtactgtttttgcacttctggctgcaaacaaggctgaactgccctccttggataactggaaattgcttccttggtgtgagatgtgtagttgtgagaagtaggaatgagcagcag

SEQ ID NO: 594853 - DNA, 541 bp, Homo sapiens
taattttctgttagatgtcattgaagaaaacaatagtaaaatagaagttaaaggctttattcaacagctacacatcaagaagccccttaacatgagctagttctctaagttgaagcaggattggagtaggacaggtagagagaagagaggaatatgtggctgtgatctygtccaaggttgtagttgccttcatctgtaactgctgcaaaatctgtagttgaaatgattgaaagacgatgccaatggttcatgcccttttcttgaggtggttgatgcaataccatctggcagttctagagcagttctttcaaaaactgtctttgtaagcctggtgagttgtctgttggctgcctaataccacctaagcttcaggaggggagatgatacaaaagacataaaggcagggggagcagagagagaaaaaaaggaggcaaatgttggtctaagcaagaaaattgggttgattttgattattaaacattaaacatggggaaaatgtatgatttaaaaagtgttagttctgttctttgttataaaggat

SEQ ID NO: 594854 - DNA, 541 bp, Homo sapiens
taattttctgttagatgtcattgaagaaaacaatagtaaaatagaagttaaaggctttattcaacagctacacatcaagaagccccttaacatgagctagttctctaagttgaagcaggattggagtaggacaggtagagagaagagaggaatatgtggctgtgatcttgtccaaggttgtagttgccttcatctgtaactgctgcaaaatctgtagttgaaatgattgaaagacgatgccaatggttcatgcccttttcttgaggtggttgatgcaataccatctggcagttctagagcagttctttcaaaaactgtctttgtaagcctggtgagttgtctgttggctgcctaataccacctaagcttcaggagrggagatgatacaaaagacataaaggcagggggagcagagagagaaaaaaaggaggcaaatgttggtctaagcaagaaaattgggttgattttgattattaaacattaaacatggggaaaatgtatgatttaaaaagtgttagttctgttctttgttataaaggat

SEQ ID NO: 594855 - DNA, 556 bp, Homo sapiens
atgatcaacattatttacttttctttctttcttccttttctttttccctcccaccctccctcccttccttccttccttccttcctttttctgacagagtcttgctctgtagcccaggctagagtgcagtggcacaatctcggctcactgcaacctctgcctcttgagttcaagmgattctccttgagtagctgggactacaggcacataccaccatgcccagctaatttttgtattttcagtagaaataggatctcgtcatgttggccaggctggtcttgaactcttggcctcaaatgatccaccagcctcagcctcccaaagtgctgggagtacaggcatgagcgcccatgcccccagcccccttaatcttatttactcttaagaccaaactataattttctaatattctaggaatgttaaataatcttaactccttctaaaagacatctttcttgccacaacggcacttttataaatggcctgtctccttcgacaaggcttaactggtgagtggtaaagctctctggtttccatgaaaaagtgaaccagtcaga

SEQ ID NO: 594856 - DNA, 583 bp, Homo sapiens
tttagacgtgtagctgccacagacatgagggattgagagaaaagtggctgagcaattttgggcaggacctaytagcaaagctcaaaatccatcttgaagtagtgtcataaaatcctagacttaagtccttggcctcacagagctggggtctccccttcacactgaggaattcacaatgctcagatatggagagaacgtttccagtcctctcctctgtgttctgagatgagtggggaaagaacaccaggtttaaggggcacaaacctttggaaggggtcttcttgctactttttttgttttctacttttgttaaggacagttgaccagcaaagacaagtgcagcatcttaagatcatagccccagaacctcaccccagagatgatgctctctggtttgtcccagtctttctggaaactgctacatagactttatattctctgtcagataacatgtcctgatcactgaggctgctcaatgttcatcatgctctattaaaacattatttcaagtctaggaagggaagtagaaaagaagagcccaaataataaagattgaaactcctgtaacaacaatattgacaaa

SEQ ID NO: 594857 - DNA, 583 bp, Homo sapiens
tttagacgtgtagctgccacagacatgagggattgagagaaaagtggctgagcaattttgggcaggacctattagcaaagctcaaaatccatcttgaagtagtgtcataaaatcctagacttaagtccttggcctcacagagctggggtctccccttcacactgaggaattcacaatgctcagatatggagagaaygtttccagtcctctcctctgtgttctgagatgagtggggaaagaacaccaggtttaaggggcacaaacctttggaaggggtcttcttgctactttttttgttttctacttttgttaaggacagttgaccagcaaagacaagtgcagcatcttaagatcatagccccagaacctcaccccagagatgatgctctctggtttgtcccagtctttctggaaactgctacatagactttatattctctgtcagataacatgtcctgatcactgaggctgctcaatgttcatcatgctctattaaaacattatttcaagtctaggaagggaagtagaaaagaagagcccaaataataaagattgaaactcctgtaacaacaatattgacaaa

SEQ ID NO: 594858 - DNA, 589 bp, Homo sapiens
gactgtgtgagatcctgaaccagagaaagaatacagggagagagagcttccggtgagcccactcagcagcctgggatgttacagtttatttcttagtggaccataacaagtcccatccttctcctacagttttttttaaaagcatatctttttattcatactcaaattaatgttttaaagaacttctgggcaataaagtctacattaagaaaaagcctagtagacatactgatagtcttctctatttatcatagttaatccagaaatttttagcagggttcaaacaagatggacaataaataatattattctrtctggataattgtaggttctgagtaaactatttaactttgtgaaagttaattaattttctaccaaatgaggaagtttgattagataaaatgcaggtttactttcaacttgttgatttgatatttgtaaacatgcctatcattttgggtaactgtcgtaaggaatccacattgtccctacgcttttagattatcattcaaacaattcccttgcacaggatgtccagcaggtaaatgatagtatgccagaaacagattgttaatttaatgaagagaga

SEQ ID NO: 594859 - DNA, 593 bp, Homo sapiens
aggattcccggagaagccccctcctccactgccttcaatcaggctgctttggatgtctttctccacaggaagtgcatttcttctcttagggttttctttaacattactgataactttgtttccttgctcttattcaggctctgagctctaaccttctcactgaccattaagcaaaatggctctctcctttcatgttctaacggagcagatgacaagtatttgtttgtgtcttcactcactctacacttccacagctttgtgcaactcccaatgtgtgtgtttctccatttgtgactctgtcattttattctaagtatgggttctggggactttccccttgaagacagaatccagtcctgctctactcatcamccttacaaaatgtagtactgtgcctggggtgcactataattcactgaatcttgggtgaagaaattttatgcactggagatacatccttatttgaaacagaagaaacaaattacttgacagggacgctcaaagagggttaattctgtacaagaacctgactttgaaaagctgcatagtaaactactttccattaaagaaaatggaaattctagcattgtaaa

SEQ ID NO: 594860 - DNA, 593 bp, Homo sapiens
aggattcccggagaagccccctcctccactgccttcaatcaggctgctttggatgtctttctccacaggaagtgcatttcttctcttagggttttctttaacattactgataactttgtttccttgctcttattcaggctctgagctctaaccttctcactgaccattaagcaaaatggctctctcctttcatgttctaacggagcagatgacaagtatttgtttgtgtcttcactcactctacacttccacagctttgtgcaactcccaatgtgtgtgtttctccatttgtgactctgtcattttattctaagtatgggttctggggactttccccttgaagacagaatccagtcctgctctactcatcacccttacaaaatgtagtactgtgcctggggtgcactataattcactgaatcttgggtgaagaaattttatgcactggagatacatccttatttgaaacagaagaaacaaattacttgacagggacgctcaaagarggttaattctgtacaagaacctgactttgaaaagctgcatagtaaactactttccattaaagaaaatggaaattctagcattgtaaa

SEQ ID NO: 594861 - DNA, 588 bp, Homo sapiens
cacccggctagtttttgtattcttttagtagagacggggtttcaccatgttagccaggctggtctcgaactcctgacatcaggtgatccgcctgccttggcctcccaaaatgctgggattacaggcataagccaccatgcctggtcacacagagtaggtttttaaaaatagctttattgatatataattcacataccatgcaattcacccatttaaattgtctaattcagtggtttttagtatattcacggagttgtgcaaccatcactgcaatccattttgcaacattttcatcaaccctgtgtaagaagccccacgacagttgcttccttttctccctatctcagccctagccaaccacgaatttactttttgtctctatagatttgcctaatctggaaattttatatgaatgaaattatataatatgtagcctttcataaatggattgtttttacttagcataatgttttctaggttgatccactggtagcatgcacagttctttatcccttttaaayacccaataatactccattgtatggccatgcaacattttatcctttcattagttaataggcatttgga

SEQ ID NO: 594862 - DNA, 621 bp, Homo sapiens
actctgcatttttaagccttttcctacaattttattgtagtttcagtaggaagtgaaggtagatacacatgtgatgactgccatctttatctataagctggtttatttgttttgcaaggarttgctttggagtcatcctttctatacagcagggatcaaactgatccttggctgcgtttcctgccacttcttggctacagtttatactcctctcagctcttagaatccttacataaaaatatgtctcatattctctaaacgcggctgaaacctcaagcctgtagggcataatgtctacaagtagttgccaaactcaacggaagcatatagtattctaatattctttggcaaggagatgaaaacaatccactttccttctctttagccctggtttctacattatcagtgccttgtgctccctaagacataaagaattatttgttagtgggcctacatgatccaccaactgatcccatatcaactttttttttctacttggatttgaaagctttagttgagtcccatattaacataggggtttcctactcaactctgccctttatttccccttcagctccctaaggggttattacagggagagtttgatctctgattcctgga

SEQ ID NO: 594863 - DNA, 593 bp, Homo sapiens
ccttttcctacaattttattgtagtttcagtaggaagtgaaggtagatacacatgtgatgactgccatctttatctataagctggtttatttgttttgcaaggaattgctttggagtcatcctttctatacagcagggatcaaactgatccttggctgygtttcctgccacttcttggctacagtttatactcctctcagctcttagaatccttacataaaaatatgtctcatattctctaaacgcggctgaaacctcaagcctgtagggcataatgtctacaagtagttgccaaactcaacggaagcatatagtattctaatattctttggcaaggagatgaaaacaatccactttccttctctttagccctggtttctacattatcagtgccttgtgctccctaagacataaagaattatttgttagtgggcctacatgatccaccaactgatcccatatcaactttttttttctacttggatttgaaagctttagttgagtcccatattaacataggggtttcctactcaactctgccctttatttccccttcagctccctaaggggttattacagggagagtttgatct

SEQ ID NO: 594864 - DNA, 556 bp, Homo sapiens
caactctgccctttatttccccttcagctccctaaggggttattacagggagagtttgatctctgattcctggaaacagcttctgcactgaatccttcccctccctttcctggtgggctggggtaaatagtctagacttatactctttattatggtaggtagccactagccataggtggctgttgagcacttcaaatatggctagcctgaattaagatgtrttggtagtgtaaaatacacaacagatttcaagggctaaatccaaagaaacaaaatatctcagtaacttttatgtggattatatgttgatataatattttgggtagattaaaaatatactattaaaatttctttttatctttaataaatttagaaaatgtatgattatttatgtggctcacattatatttccattggaaagcactggtctatacaggaacttgatgattccttttagctttgatggagcaaatactgagcagtcagttcccttggtgatttttcatggtccctgctctagaccctttgactttctagagagaaaaggatttcccaa

SEQ ID NO: 594865 - DNA, 560 bp, Homo sapiens
cccaggtgcatgcaaggttcaagagtggttccagccaggcatggtggctcacacctgtaatcccagcactttgggaggccgaggtgggtggatcacctgaggtcaggagttcaagaccaccctggccaacatggagaaaccccatctctactaaaaatacaaaaattagccaggcgtggtggcaggtgcctgtaatcccagctactcgggaggctggggcaggagaattgcttaaacccaggaggtggatgtttcartgagccaagatcgtgccactgcactccagcctgggcgacagagcgagattctgtctcaaaaaaaataaaaaataaaaaagagtggtttcaccagcccttccaaagatgcagtttttagagtagagttagtgattattatatatatatataaaaggtatatataaaatttgaattttttttaaagatttgattgcccagtatgcacagaacactctgtagaggaagagaagaaagctcctttgcaagtttcatttgctcctgacttcctcaactagctagcatgtttgttttccttcatgcctg

SEQ ID NO: 594866 - DNA, 560 bp, Homo sapiens
cccaggtgcatgcaaggttcaagagtggttccagccaggcatggtggctcacacctgtaatcccagcactttgggaggccgaggtgggtggatcacctgaggtcaggagttcaagaccaccctggccaacatggagaaaccccatctctactaaaaatacaaaaattagccaggcgtggtggcaggtgcctgtaatcccagctactcgggaggctggggcaggagaattgcttaaacccaggaggtggatgtttcagtgagccaagatcgtgccactgcactccagcctgggcgacagagcgagaytctgtctcaaaaaaaataaaaaataaaaaagagtggtttcaccagcccttccaaagatgcagtttttagagtagagttagtgattattatatatatatataaaaggtatatataaaatttgaattttttttaaagatttgattgcccagtatgcacagaacactctgtagaggaagagaagaaagctcctttgcaagtttcatttgctcctgacttcctcaactagctagcatgtttgttttccttcatgcctg

SEQ ID NO: 594867 - DNA, 561 bp, Homo sapiens
aatgaacatccaaaatggctgactcacatggctgggctgtcactcatggcacctgccatggcctctccttgtggcgtgggcttctcactacagggcaactgggttccaagagggcctctccccaaagtaaacrttcaaagaaaccaagatggaagctccaggacttcttctgacctaaccttggatttcatgcaccatcaattcggctacagtctgttggtcaatcaaatcactaggatagtccaggtttgagagaaggggatttagactccacctctcaatgggagtagtagcaaacaggttcagcagtctttatccaaaatatttgatatgcttcatctggcataatgttaccccacgttgtcttgggtggttggcttctctctcctgctggagcctgaactcccaggaggcaaaaatgaagcctcaccaatcccatatccccaatggtgcttagcaccacataatgctcgagtgtttcatgaatgaagagtctgttttgatctctgcatataacattccaacaattcttattgaacttcagatagtcaaacaattctt

SEQ ID NO: 594868 - DNA, 488 bp, Homo sapiens
tacctttgtcaacaaaactttcaggagaatcaacaaagactttcccaatttcctgaaataattgtaggcttcctctaagcccttttaacttgggggaatggagacctattttggtgaggagactgacacaatcaggcccctwtacctttgcgctccatcctattagtagaagaggtgggtaggaaaggcctgcacagcctccgcacagtatttctagggaggagtggaggatgcttcttgaccctgatctgctttggtccttagtgggcttctagctgccagtctgttttgattggtctgccctcaccatgaacaatatatcttgatcccagggattgggcaggtactacctcacctcccacctttgcccctcaggctgtggatcctgagactgcaaacacatgcccctcagggccctggtgggacttcccctgagtctctgctgcaagatccctccttgccccgtgacttccatggaaggccacaca

SEQ ID NO: 594869 - DNA, 609 bp, Homo sapiens
gttcagtaaggacagcaaatcttgtggtctttgaacctagacccactccctcccttcctgctcccagcttagtgagataggaactgcactcaagactgatgcagctaagagcacagggctcctgcctactccccactgccagttaaagggccatattcctggaaaggacaagacagcagcatttctcatcctgcccacagctacctactgctgaagataagtcccagttgagtrtagccaaaaggtggggctgccttcttccacccagcctccactgaggagactgaggctccacgtttggtgcagcatcactgttgtcccagctcctaagatagtaattcctcaatggcagaggcaagctgaggagacctgaagctactctcttcccatccatggcgtactcagctcctagagctggaatatgcccctgcgaaaagtgcaacattgtcatgcccctggcttggaggtttttcctgagtgggagaagcaacctataaaacagatagttccttatctcctcacagagtaactgacttcatttccaacacagtatggaaaagtttaagcctaatgatgctgtctaaaacaataaagtttgtagtgaaaagc

SEQ ID NO: 594870 - DNA, 598 bp, Homo sapiens
aaattgactctttggaattatatacacttcttttgcagcctggtgcatgttttgtttatataaaatattccatgcatgtcatttcttgaatgcaargttccatatgtgacctttagctcaaacttactaattgtggtatttaccttactaatgttcttatactggatctgtcagattctaagacagctatattaaggtataccactatgattggcaatttccctttgtaattttagaatttttcccattatactttgtgaaactatgccagtatataaaaataggtttacagttaagttcttagtaattgttcctttttattaaataatatcactctttactctgaataatgctttttgccttaaatatatttcttttttattatttttattttatttttgaatcagggagtacgtgtgctggtttgttacatggatatattgcatgctggggaagtttgggcttctaatgatctcattgcccaggtagtgaacatagtactcaataagcaggttttcaacccttgctgcctccctccatctgctctttcagagtcctcagggtctattgttccctcctttatgtctgtgtgtaccca

SEQ ID NO: 594871 - DNA, 619 bp, Homo sapiens
ggtatcttgtggttgttagggagagtattctgtagatgtctattaggtccaaatggtcaygtcgaatttatgtccagaattggtcaattttctgcctcagtgatctatcaaatgctatcaatggggtgttgtgtgttgtgtgactattgttgtgtactgccaaagtctttcattaagcctagatgtgcttgttttataagtctgggtactccaatgttggatacacatatatctaggacacttaagatgttttgttgaattgagccccttatcattatttaatgcccttctttgtccttttttatttttgttggtttaaattctgatataagaacagtaacccttgcttttttttgttttccgttgcatgacatatctttctccatccctttactttgagcctataggtgtcataacatgtgagattgggtctcttgatgatagaagaagaatgggtcttgttttttcattcaatttgatactctatgtattttaagttgagcatttaggccatttatgttcagtgttaaaattgatatatgaggttttgttgctgtcataatgttgttagcttagttgctttgtagtctttattgtatagttgctttatgggtactgt

SEQ ID NO: 594872 - DNA, 619 bp, Homo sapiens
ggtatcttgtggttgttagggagagtattctgtagatgtctattaggtccaaatggtcacgtcgaatttatgtccagaattggtcaattttctgcctcagtgatctatcaaatgctatcaatggggtgttgtgtgttgtgtgactattgttgtgtactgccaaagtctttcattaagcctagatgtgcttgttttataagtctgggtactccaatgttggatacacatatatctaggacacttaagatgttttgttgaattgagccccttatcattatttaatgcccttctttgtccttttttatttttgttggtttaaattctgatataagaacagtaacccttgcttttttttgttttccgttgcrtgacatatctttctccatccctttactttgagcctataggtgtcataacatgtgagattgggtctcttgatgatagaagaagaatgggtcttgttttttcattcaatttgatactctatgtattttaagttgagcatttaggccatttatgttcagtgttaaaattgatatatgaggttttgttgctgtcataatgttgttagcttagttgctttgtagtctttattgtatagttgctttatgggtactgt

SEQ ID NO: 594873 - DNA, 596 bp, Homo sapiens
aaatcaactattttactaagaatttctcattttctttagtggaggatgacaatagtatttaaaaataagtatactagatatgctcattgctgctatcaaggtgtctttgtgtctagttcttttcagcacatggactggaaaatttacatgtatgtatacacacatcaattttcatacatttacttatttatttaaagacacagtcttgctctgttgcccaggccagagtgcagtggtaagatcatagctcagtgcagcctsaaattcctgggctcaagaaatcctcttgcctcagcctcctacgtagctagaactacaggtgtgcaatattgagcttggatactaaaaaaattttttgtagagacagagtcttgctatattgcacaggctggtctcaaactcctggcctcaagtgaccctcttgcctagcctcccaaaatgctgggattacaggtgtaagccatgtgcccaggcaattttcatacatttacatgtatgttaacattttgaatatcaatgagtactgagacctgcaataccaatccaataaaacagagtgcattctaatttttctccttccatacatatttgtaaat

SEQ ID NO: 594874 - DNA, 558 bp, Homo sapiens
tttcataattatttcttaagctgtcaatacatatttcatgcactcttctatactgatgttctttcacaattattaacaatgaaaaagaagaaacacagaagacaacattttagtatctatgtaaggtagaaaaataatttccaaatatttaaaagtgaattcagcccctctcactactcttattcaactttgtcctgaagtcytagctaatgcaataggacaataaaaggaaataaaaggtatacagattgggaaggaagaagtaaaactgtctttgtttacaaataacataattgtctatgtagaaaatctacctaaattgacaaaacaaaacaaataaaactggaactcataggtaattatagcaaagttgcaggatatgaggttaacatatacaagtcaatcattttgttatacaccagcaaggagcaattggaatttgaaattaaaaatataacacaatttacattagtgccaaaataaattaactataaatatgtactagatctatataagacaagctataatactctgatgaaagaagctaaagaactacta

SEQ ID NO: 594875 - DNA, 571 bp, Homo sapiens
ttaaataaatagtcagcacatggcagaattaacaataaggacttaacactgcattcatacatctgggktttaccaaattgggaaaaacttgcaattgttgctctaagtgagattcatcataattctggtttctctatggttttcaacagagaaaaccagctgtcacagaaactgccttctttgtgaggtggaggaaacctggatggaaacaccagtcctgccaacatttgagttcccagtggatttagccttggaaaccaagatgcttcagggaacgatgtatgacctcatctctctgacagctttgaaaacagtttctccttatgtatatttaatcaccttaaaacagtggttctcaaagtatgtttgcaaaatccgcagcattagcatcacgtggtaacttgttagaaatgcaggttcttggtctttagcccagacctactgaatcagaaactgggggatgggccccaggagtctgttttaacaagacccccaaatgattctgatgtacaccaaaatttgagaacactggtgtagagaacttgtcttagctttgttctgtggtgatgaa

SEQ ID NO: 594876 - DNA, 564 bp, Homo sapiens
ggtggcatatttactatattagcttcccagttttcaaacrtgtgtggtctacagagaaagaaagaaagaatgaatgaatgaatgaatgaatgaatgaatgaatcagactgtgcacagtggctcatccttgtaatcccaacattttgggaggccaacatgggcaattcgcttgagcccaggagttcaagaccagtctgggcaacacagcgaaaccccatctctacaaaagttttaaaaaatagccaggcatggtggcacacacctgtagtcccagctactcaggaggctgaggtgggaggattgcttgagcctgggaggtcaaggctgaatgaacagtgattgtgccactgcactctagcctgggtgacagagaaagactctgtctcaaaaaaaaaaaaaaagaaagaaaagatgccagatataagataaataggttaaaaggtcttagaggaggtctgacaggttgggatcagaggttctgggtgaggcccttgttccgctaacaaaagcagctgagatgaggaggtagtttaagctttaggaaaattttgagatcaagagcta

SEQ ID NO: 594877 - DNA, 581 bp, Homo sapiens
aaagctttggagtgaattgtgatttggggttagtcactgacttccgagatatgacacaaaaaagaaaaaataaattggacttcatcaacatctaaaacttttacacttcaacacacaccatcaagaaagtgaaaaggcaagacacagactgaaagaaaatatttgcaaatcatatatctgataagggcttgtatccaaagtatataaagacctcttacaactcaacartaagaaaaataactcaatattaaaatggttgaagattttatttgaatagacatttcaccaaagaagacatacaaatgcccagtaaacacatgtcaagatgctcaatttgtcatgagggaaatgaaagttaaatctctaatgaaatgccacttcacacctactaggatgactataattttaaaagataataacaaacgcaggtgagcatatgagaaaattggaagcctcatacctgctggtggcaatgtaaaattgtcctgctgctttgaaaaaaattttaaataaagttgccatatgacttagcaattctactcctagatatgtacttagaaaaaattaaaacatatgtcctc

SEQ ID NO: 594878 - DNA, 600 bp, Homo sapiens
aagaatcctcccaaaactaagaaacctggctgcatcttgcgtgcatgttcttagtaagagttttgcaaagttgccaaacagatcatgtaagccagatccttaagtagaatactaggctgtggtcctcagtaaattctataatgatacgctaattttaatgtatggataccartttagtagcctttaattcattcattaaacaaatatttgttgagcaccttccatacgcctgatattggtgtatcatccctgtcctcatggatcttcttccatggacacagataatgaagagatgaatgagatatctagatatagacacacagttactcatgtatatgttagaaactatttgtatttgtgtcatggagaacagaaggctggagctttttacatacatataacatatatataaataaaattatcagcttgtctattctccatcatacacatacaaatggacagattttcatcaaatttaaagattgggtttgagatggtcctacataaaatacagaccatgtggagtatgttaaactcatgttggggtcccaggaggggatacctaaagaggtcatcctcacaagttaaagcaaatgttaa

SEQ ID NO: 594879 - DNA, 600 bp, Homo sapiens
aagaatcctcccaaaactaagaaacctggctgcatcttgcgtgcatgttcttagtaagagttttgcaaagttgccaaacagatcatgtaagccagatccttaagtagaatactaggctgtggtcctcagtaaattctataatgatacgctaattttaatgtatggataccagtttagtagcctttaattcattcattaaacaaatatttgttgagcaccttccatacgcctgayattggtgtatcatccctgtcctcatggatcttcttccatggacacagataatgaagagatgaatgagatatctagatatagacacacagttactcatgtatatgttagaaactatttgtatttgtgtcatggagaacagaaggctggagctttttacatacatataacatatatataaataaaattatcagcttgtctattctccatcatacacatacaaatggacagattttcatcaaatttaaagattgggtttgagatggtcctacataaaatacagaccatgtggagtatgttaaactcatgttggggtcccaggaggggatacctaaagaggtcatcctcacaagttaaagcaaatgttaa

SEQ ID NO: 594880 - DNA, 600 bp, Homo sapiens
aagaatcctcccaaaactaagaaacctggctgcatcttgcgtgcatgttcttagtaagagttttgcaaagttgccaaacagatcatgtaagccagatccttaagtagaatactaggctgtggtcctcagtaaattctataatgatacgctaattttaatgtatggataccagtttagtagcctttaattcattcattaaacaaatatttgttgagcaccttccatacgcctgatattggtgtatcatccctgtcctcatggatcttcttccatggacacagataatgaakagatgaatgagatatctagatatagacacacagttactcatgtatatgttagaaactatttgtatttgtgtcatggagaacagaaggctggagctttttacatacatataacatatatataaataaaattatcagcttgtctattctccatcatacacatacaaatggacagattttcatcaaatttaaagattgggtttgagatggtcctacataaaatacagaccatgtggagtatgttaaactcatgttggggtcccaggaggggatacctaaagaggtcatcctcacaagttaaagcaaatgttaa

SEQ ID NO: 594881 - DNA, 236 bp, Homo sapiens
ttatttttaagcaatctattctttctgatactattgtaaattgaattgctttcttaatttttgctatgatttaaatgtgttccccaaagttcctttattagaaacttatccccartacagcagtgtcaagcagtgattagatcatgaggactctgagctcatgaatgggttaatgtcattgtcatatgagtgatttagttatcacaagaatgggcttcttataaaagcaagtttgg

SEQ ID NO: 594882 - DNA, 236 bp, Homo sapiens
ttatttttaagcaatctattctttctgatactattgtaaattgaattgctttcttaatttttgctatgatttaaatgtgttccccaaagttcctttattagaaacttatccccaatacagcagtgtyaagcagtgattagatcatgaggactctgagctcatgaatgggttaatgtcattgtcatatgagtgatttagttatcacaagaatgggcttcttataaaagcaagtttgg

SEQ ID NO: 594883 - DNA, 605 bp, Homo sapiens
atcactatgtaatattaatgacagtttgtcctgtttgcgagaaaaatatttctccaactttttaagttcaaaagcatttcatgagtgtgttaccattttggtatttaaatagcaaccccaagaaataagttatttgtgttttgtatattgtaattcattgtaaactcttggaacacttttcagcaaagtaaaaagcaaatggtttatataatcaaggccttttgaaataaaaactataaaagaagttgttccaaaaatagagaargagggaattctctctaatacattctatgaggccagtattatcctgataccaaaaccagataaggacacaacaaaaaaagaaaaatatagaccaatatccctgataaatatagactcaaaaatccccaacaaaatgctagcaaactaattcaatggtacatcaaaaagataatataatataaagataatatcaaaaagacaatatcaagtgggttttatccagggatgcaaggatgatttaacgtatgcaaatcaataaatgtgatacatcacataaacagatttaaggacaaaaatcatatgatcatctcaatagactcagaaaagcattgataaaattc

SEQ ID NO: 594884 - DNA, 649 bp, Homo sapiens
attcaacaagaaaaggttacataaaaatgtgattattatgcaagggctatatgctcaacatacctggatctgtgaaggttttaatgagctcttccattgccaacatccaagaaacagcaagatggcaattttgcaaaaatacccagtttcctgatttcattgcatccttgaccattttttcagcaataggtccttgtccttgccccagtgaaattgactgcaccctgaattgaacagcaagaacacaatatcatcttatgctattttaaagcaaaatcaatatgaagaaatataaatacagtagactcttgcttaggatatataaacattttgaatcctcattccaataggagtacaagtatgttttccttatttcttgtttttaaaaatatttttaccatgacccacatagaaaagtgcaaaaaccgaatatacagctctacaaatgatcacaaatcaatacctgcrgttgagaagagacctgtgctgatacactagagacatttctctcatgcctctctccaccgcaatgatttccccttccttcttcccacaggtaatcattatcctaacttctaacaacactatagatcagtttttaaacacttaaaaaattaaagtctaacatatacagaaaaatacatattat

SEQ ID NO: 594885 - DNA, 627 bp, Homo sapiens
caagccctcaaaggaaaacaggaatacaamaaaaaaaagcctcaacgaaatgacagaaacttgaaaatgataaacactagcccccttggataattaggaatcagcaaaagaattctggcaattcaaaaaatcagtgtttccttacctctaaaagattgcaatgtatctaaccagattgaaatgtctgaaatgacagacatagaattcagaacctggatggcaatgaaactcaatgagatctaacagaaagttgaaatccagtccaaagaagccagtaaaatgatccaagagttgaaagatgacatagctatatgaagaaaaaacaaaactgaactcctggaattgaaaaattcaccacaggagtttcaaaatacaattggaagcattaacaacatactaggccaagtcaaaaaacgaatttcagagctcaaagactgtcccctcaaaacaacccagtcaggcaaaaataaagaaaaaagaatttaaaaaatggacaaaggctatgagaaatatgagattatgcaaatagataaaacctatgccatactggcattcctgagacaggagaaaaggtaaacaactcgggtaacatatttgagaatatagtccatgacagttttcccaata

SEQ ID NO: 594886 - DNA, 627 bp, Homo sapiens
caagccctcaaaggaaaacaggaatacaacaaaaaaaagcctcaacgaaatgacagaaacttgaaaatgataaacactagcccccttggataattaggaatcagcaaaagaattctggcaattcaaaaaatcagtgtttccttacctctaaaagattgcaatgtatctaaccagattgaaatgtctgaaatgacagacatagaattcagaacctggatggcaatgaaactcaatgagatctaacagaaagttgaaatccagtccaaagaagccagtaaaatgatccaagagttgaaagatgacatagctatatgaagaaaaaacaaaactgaactcctggaattgaaaaattcaccacaggagtttcaaaatacaattggaagcattaacaacatactaggccaagtcaaaaaacgaatttcagagctcaaagactgtcccctcaaaacaacccagtyaggcaaaaataaagaaaaaagaatttaaaaaatggacaaaggctatgagaaatatgagattatgcaaatagataaaacctatgccatactggcattcctgagacaggagaaaaggtaaacaactcgggtaacatatttgagaatatagtccatgacagttttcccaata

SEQ ID NO: 594887 - DNA, 604 bp, Homo sapiens
cactcatatgtttatcacaacactgttcacagtagcaaagacatggaatcgacctacatgtccatcaatggatgactggataaagaaaatgtcatatatatacacagttgaatactatattcgaccataaaaatatataaaatcatgtctcttgcagcaacgtagatggcactggagaccactgtcttaattgaaacaagtaagacacagaaaggcaaatatcacatgttctcactcagaagggagagctaaatattatgtacacatgaatgtagagaaagggatggtagacaatggagactcagaggggtgagaaggtgggaaggggatggaggataaaaaaaaaattacttartgagcacagtgtacattattcaggtgatggaaaccctaaaagctgtgactcaaccactaatgtagtctacacatgtaacaaaattacttttaccccataaatttatacagaaaagagtgtccacccaaaaaaaatataaagaaattgatgctggaaaggttaagtgaattatacttagccacacagtaacacaactagaagtagaactaagctccaaacgtgatggccctattgcatagctgttccttc

SEQ ID NO: 594888 - DNA, 568 bp, Homo sapiens
ggcttgtttggacagaacggtgttgatagctagtggagggctaaggggagggctgctgttaacagttatgcaggatgtccactgaataacccatgggggagccattcacattgtagatattataggctgtgtatttatcatgacagctttctggcacattaaaagtcccttgaagaggagacacctttttctatctcacacaaaggctccatrtgggttggggagggacaaggccagcaagaacaggaatggggtaggtagggtagggtaggatcagtgaaagaaccaaattgatgtaggaaatggccaggcctgggcgtaatcatcaaggctgaggttggttccagagaagggtcagaagaggctggtgagtgaatgagatgaagaaagggagacaataaatggagccaattttctgaaaagttggcttgtgagtgcttacaaagaaatgaaatagtggctggaaaagtagctgccatcaagggaagatctctgttttggttttatttttaaggatggaatatagtaatgcttaattgtatgatgataggaatatcaaggaaacaga

SEQ ID NO: 594889 - DNA, 581 bp, Homo sapiens
gccttactagtaatttggaaacaacaaattaaaaccatgaaaagatgccatttcacacctatccaactggcaaaatggtagcaaagatatggagctatggaaacaattcatactgcaaggggagtaaaaaataagcaaaaattatttggcagtatatattaaagtcggagggcatcttcaatagctcaacaattcactactgaatttgcatcatagagaaaaaatcaatcatatttgtatgagaagccacattcaagtcctttttttataatttcaacttttagacttctgtgatatttcattttctgttcctgcattaattcatttaagataatggcctcccactgcatccatgttgctgcaaagaacatattattcttttttatgactgcatagcattccatggtgtatatatacatttcctttatccaatccactgttgatgagtacctacctaagttgattccgtatcgttgctactgtgaatagtgtcaagaacakttacagaaacattgtttgtaataataaaagttggaaataacctaaatttccaactagaaaatgagtatataaattgatat

SEQ ID NO: 594890 - DNA, 575 bp, Homo sapiens
atatttttttaaaaagtgtaaagaaaggtagagaaattatatgaaatccagaatagaagtgaccttsggagtggaggttaggtaatgagagagaagtaaacaaggaaaggcagactgaaggctcagatcatgtagataatgttttatttcttaagctggattgtggatacatgaatatgcgttgtattaacttcatcgcttttgtgactcttaactatttcataataatttttaaagtaaaggtagaattcaagatgacaattagaaaattaggaaggttattaatcagtagctaatgagtgctaatttcttgatatattcaggaggaaaaaagaagtatagaatcactatattcgcttaggaaaattcgtggtttcatgtaagtgttaaaattttaggggaaaagactaaaaggataaatgatctgtagtttccaaacaagcagaggagaaaaaggatatacagtcgaatatttccatccaaaagcagataggaataaagaaaatcaaaaatgaagtatagtaaaccaaaaagtcaaactagagagtagaaattaatgcaaatacctaaatagg

SEQ ID NO: 594891 - DNA, 556 bp, Homo sapiens
tgcttctctgttgcctccacccccactgagggctattgcagctaagagcctatgtgctggctcttttaagccaggactacagcctgaattacaataccaaacaaaaataacattgctacaagcaatgcctgtcaaacayactgcacaaacctctatgtaaccaaagaacccacatagagccttgcccctctgaaagcacccagaaacaaagccaattgattgtacacaacatacaccacagtcatatcctccaggaaaaaaaagaataaaatgtcaaaaaactccatccaaacaagcaaattcaaaaagataaagaggcatcaattccttcagataagaagaaatcagcacaagaacttcagcaatacaaaaagccagagtgctttgttacctccaaaggatcacactagttccctagcaatggatcctattcagattgaaatgtctgaaataatagatacagaattcagaatatgtatgacaaggaaactcaatgagatccaagagaaagttgaaatccaatgcaaagaagccagagaaataatccaaggtttga

SEQ ID NO: 594892 - DNA, 556 bp, Homo sapiens
tgcttctctgttgcctccacccccactgagggctattgcagctaagagcctatgtgctggctcttttaagccaggactacagcctgaattacaataccaaacaaaaataacattgctacaagcaatgcctgtcaaacatactgcacaaacctctatgtaaccaaagaacccayatagagccttgcccctctgaaagcacccagaaacaaagccaattgattgtacacaacatacaccacagtcatatcctccaggaaaaaaaagaataaaatgtcaaaaaactccatccaaacaagcaaattcaaaaagataaagaggcatcaattccttcagataagaagaaatcagcacaagaacttcagcaatacaaaaagccagagtgctttgttacctccaaaggatcacactagttccctagcaatggatcctattcagattgaaatgtctgaaataatagatacagaattcagaatatgtatgacaaggaaactcaatgagatccaagagaaagttgaaatccaatgcaaagaagccagagaaataatccaaggtttga

SEQ ID NO: 594893 - DNA, 586 bp, Homo sapiens
tcaggagtccagtttggagctaaaatrcctgtgccaaagttttctggagacttcactctctcctgtgactgggatccattacagaatcacccttgtgttggtcaaggccaagcttggtcacactgaggtcccttgtgctctttgtggcttgagtggggaatagtgtaacctgtggatttcctaggcaggcaaggttgcttggatagtttatgcaacccttccatgcctcagtttcctcattgacaaaatggaataacaatagtaactatcttgtgatggggcagtgaggattaatgagttaaaatacataaaatactgagaacagagtctggcatggagtgaacatgcaataaatattagttaatgctaacatattaattacaattcctagtcatcatgcaggtgctgcagctaaactgccctggtccatggtctttttgagctttctttctttctgatgacgcagtgatacttctaggcacggttaaactgagactcaactcacagtccatgttttggctcgcttgttcttttattacttataggaaaataaaccatgatcattaaccaatctcttttgtgccca

SEQ ID NO: 594894 - DNA, 562 bp, Homo sapiens
atcagtgttccactgccgtatctcgtagggatctccaagaatgttaatgagactgaaggaaggatcgattgggatctccagagactgacagtcctggatccaacactctataagctgtagaagggggaaagcttacttgagtagagtcaggaacactcagtaaacgagggcacatgcaaaatgtggtgggcagtggtaagtcagtggctgaagagctaagccctcccagtctccacagatgtgcttgcatcagagcatgggacacaggaagtagaccaaaatcaggaggcctaggtactctgactataccattagttagatgtgactttggaaacatcattccctctatttggacctcagttgtctcatgtgtaaatgacygggttgtcgcagtggttttcaaccaggtttgtattttccctgttgggagagtctgaaagcatatggagaagtttcgggttatcacaatgactgagggtgtacaagcaatcagtagatgagggatagggatgttggcatatgacctccttcaatgagtggtgcagtcatgcagaagagagag

SEQ ID NO: 594895 - DNA, 551 bp, Homo sapiens
ctacctcaaaataaaataaaacaaaattgcaatataaatcacagtaagttttttgaaggaaagggatataatgytgaggcaatgcttgttgggggaacctaacttagtctgtgagtcagagaagatttggccaaggaagtggcacttgcagtggagagctggaaggtgatagtagcagaagacaaggccataggggtgaaggaagcaggtgcatttctggcaaagggaagagtgtgtgccaattcctttggtaggaagaagaatctgaagaccaagaggaaggcactcttgatcccagatctaaagcaccaaggcttgaggtggacaagtccctgtctctacgtgaatcagttccaataaacaacggcttactatatacaaggtattaagcttagcaggggccataaaaatgagggagatggaggtcaggagctcagagtctaacatgaaggaatgcaacacaagatgagcacatcaacagctctgattcaagaaagaatgtgaaggccataaagacacacagtgctccatgagggtgaaagaggagctca

SEQ ID NO: 594896 - DNA, 583 bp, Homo sapiens
gtgcatttctggcaaagggaagagtgtgtgccaattcctttggtaggaagaagaatctgaagaccaagaggaaggcactcttgatcccagatctaaagcaccaaggcttgaggtggacaagtccctgtctctacgtgaatcagttccaataaacaacggcttactatatacaaggtattaagcttagcaggggccataaaaatgagggagatggaggtcaggagctcagagtctaacatgaaggaatgcaacacaagatgagcacatcaacagctctgattcaagaaagaatgtgaaggccataaagacacacagtgctccatgagggtgaaagaggagctcacactggaaatgggggtttaaggaaaggccctgtgagcaaggctatttgsagatgggccttgaaggagtaggaagattataagggaagagctggagagcagggcccttccaggtagaggacaccatcacaaaggcatgccgtgggggatatgggtgccttcagaagacagcaagccttatgcctcagtgggactgtggggcatgtgcagggagcagcaaaagaccctcggatcagagcagc

SEQ ID NO: 594897 - DNA, 653 bp, Homo sapiens
gaggacaccatcacaaaggcatgccgtgggggatatgggtgcmttcagaagacagcaagccttatgcctcagtgggactgtggggcatgtgcagggagcagcaaaagaccctcggatcagagcagccattcacagccatatgtgggagcctcagagtgccagggagaggcatttccatgtgatttgtttggcagagaggagccactgagcgctggcctggtgggaggtttggcagtcattcccttcccaccctcatccccatggcactgagtcaggggaattctaaacctgcaaagggcacgtgatattctctcctcactgcgttgttgggaagataaagttagataaacttatttggaaagtaaaaagccttatatgcaaaagactgctttgtttataaagataaagttcccaggaactgaatatgcgttcatcttgcatccggggctccctgtgttggtgaccaaggcccctttctcgagacctactacctgtgaccccatcagttttcacctctgcacagcctgaccctctcttcagtctccatttatccctctgcctcttacactcatcttattttttcacttcaaagaatgtttatgccttgtttaagctctcattttgatagacagaaagtgctctacctggatttc

SEQ ID NO: 594898 - DNA, 619 bp, Homo sapiens
acagaaattttctccagaacagaaatgggacagttaacctaggttcccccttctccctcttgactctataccccacctgtgatggttaatactgaatatcaacttgattggattgaaggatacaaagtattgatcctgggtgtgtctgtgagagtgttgccaaaggaaactaacttttgagtcagtgggctgagaaaggcagaatcacccttaaccaacccttaattgtgggcacaatctaatcagctgcccatgcagctagactataaggaggcagaaaagtgtgaaaaragagtggcctagccttccagactacatcttcctcccagcctacatctttctcccatgctggatgcttcctgcccttgaacatcggactccaagttctccagttttggaggttggactggctgtccttgctcctcagcctgcagacagcctattgtgggacgtcgggatcatgtgagttaatacttaataaactcccttttatgtatatatgtctatcccattagttctgtccctctagagaaccctgactaacacaccaccagtcctgctgatctgccttctggcttctaaacctttctgaccacacacattagcacaggaggctcga

SEQ ID NO: 594899 - DNA, 598 bp, Homo sapiens
cccaggcccctgcaggaagatgtggtcctggtcaagacgtccacgttgtcatgccaggtggccccttatcctcactgtcagggcacaagatggtggcctctctccagcaaggagtgaacctttctctgtctcagccacactcactgccctcagcaaccatgtggcttaggcatgaatgaggaacatcattttctttccatagtaggaagaggaagaatgccaaagtttcctttcataaatgtcatcacagtaccctcacagggaaaccagattagatattcaaaagcatcctgatcacatcaaagggaaatccagtgcagtggggctgcacaatgccacatttaaatgaatatacacactcattagaaaaaggaatgagtgatagcagaggaaagagaaacccgatgggcaaatagccatgtccytgtggttgggattactacaggaggtgattccaaggcaaactgagtgctccactccatcctgtggccccctggaagccaagcagcaggaaggggtggggggtaaggaaggggtctaagataaacctttgtaagaatttggggcccccaccagaaaatagactggcatctgttgc

SEQ ID NO: 594900 - DNA, 577 bp, Homo sapiens
tttcagaaccaaagagatattctaatcagcactatcttagcaaaaagttttaatttagtttcatgccaaaatccatcttggctactcttcaagccaatatatggaaagagtcatagaaagatccaaatttcttttagaatatttttttggggaaacggtgaagtcctgtttacgtggattctccaaaaccaagaagcccaaatcatcaatattcctccctccattctactttaacaaaaaaccccaaatagtcaaggataccaytgctgtatcaggtataagtgaacaggccagaggggatgagctgatctctatcaactgtcttttgggcatgcaaactcctctgcccaattcttatccaaccagtgcagtggcagcccccaaaataccaagggataaagcataaaagcccctaaacacaaacgctggccctctaattcatatagtatcaactccaagaatgtgttcagaaactggcaaactttggaacaattcccaggatcaatatagattcagcataatattcttcctgcaaaagtgctaaacgctaaacaaaattcctctcagaaataatatt

SEQ ID NO: 594901 - DNA, 603 bp, Homo sapiens
tttagtataaaatatggagcagacatttaaaaaatacattaattagcaaagaagcaagatatgggataatttatcttgttatctactaaaaatattattctcttcaaaacagagcagttaataattcccccccatgccctgtgaagagttatgagaaggtggaggagcagtgaagggaatcctactttgaccaccatctgattaatctagggtagagctacttggaatgtggctggagtggggaagtggcactatcttggaatacgtgatagcagagggggagaatgctggatatgatcagccacattccctggagtttagaaaagcagatttttttgaagtgccaaggaaaggtggatttggtccgacaatcagaggctcagtgcatttggggagttatttggggctttgtgtaaagttctgaaaatgaaattagatcaggaaggctaggctgcaaaaggagctgaacccttaggggartgcccaagttaataaaaggagctagtaacgctatgttcatagaaggaaaaagaagtagaagtggatagatcagtatttagagcaagtcatgtaatatttaacaaaagaggatgaaaaggcagg

SEQ ID NO: 594902 - DNA, 539 bp, Homo sapiens
gcgcctcactaggtgtcgctttacagcaatgatgtatgactgaaggctacctctatcataaatgtagcatcctcaactacattcttttcaaagtgttcttggaaacccatcatcatcccttgagggtggattttttttctttttggagaaagccaaagccactgggctcatgcctggtgcatgacatgggtaatcagtttcaggtttcaaatcatgtgttttcacacacattcgtttgtcttttccttgtgtgtttccttacttggtacaaatagtttgaacaataacagccacaattcactggttaacttaaatatattaggcaggtgttagaataaggagctgcaatgtacggactactttgaaggacaacagtatttggatgtataacgttcaacatattcattttaaagtaaygttactgctatatccttaggcacggtaagctgaggatattgtgagtgttcgcaaatatacagagaccaccctcacatgtagaaccgtagaatcctagagttggggaaaagaggtcttggggg

SEQ ID NO: 594903 - DNA, 557 bp, Homo sapiens
cagactcaatccactgtgaaaggtgatatgagaaaagctttgtttttgagctggttctacaaaaacaaaaatacacaaaacaaaatcaaacaataaacctggacgtaaaaaaagtaagaggkttcttcaacttcttgattttttgaaaaacgttataaagcaaaagcttttaacacctaaatagaggagcacagtaatgttttaacttcagtaggagaataagaactggatataaattggcaggaattgcatttcagctctaactctcatgtatatcccatttagtctttaatatttggcaacaatcacctggaaagaattgacatcttccaggaaatttcatcacactagagatcctgatgaaaattagattcgtgatagcaacatgtcccataaagtatctcattcaaaaactaatggcgtgttatttttatgaagtgtattttgggagtctcactcctatttgggaaatttttattcttcaatgtcctcaatcagagatttctccattaaaattcacatataaaaatttgtatatgaaccacagaaagtgatcg

SEQ ID NO: 594904 - DNA, 601 bp, Homo sapiens
atgcaggtagaattgggtagaactgggaatccaaccaaggaattttgagttcaagctctttcatataaccttttcactaccatatgagtagaaagagtttataaatatatctcatgttttcataaaataatagagacataactttatagaattggagggatatcatcttattttgtgcaactctgaactcatttcaaagaatgactatttcatttacctcragatttatgtacaactctttatgaattggttttatttctattatgccctatcatttatgtttggcatatgattcttgtctgcttcatgttttccttgtatttttatgaggctgtaaatcttatttataaagggaacaaatgtaaaatagtccagttaacagatttattcaaggatttctcagcctttcacacttagactattccttaacaacatttcattgtctagagacaaatttcctaagaaagaatgaaaaaatattcagaatagaaatattcatgaggtttggagattgatgaagacattctgcttggcaagaggcttttgttaagtagatggaacttacaaatagagagatggatggtataagtgggtcgatatc

SEQ ID NO: 594905 - DNA, 561 bp, Homo sapiens
ttcatagaactcagcaaagctgttgttctcatggttacagtttattacaacaaaggatatagattcaaatcagccaaaggaagaggtccatagagcaggggccaggagaaatccaggcatgagcttccagttatccttccctggtagagcctcgcaaacagtgctaatatttccctgaaaygatgtgtgacaacatgtgtggggtgttgacacagggaagcttactcaatccttggtgtccagttttattgaagtgtggccatatagacatgattgaccactcatatggctgattttagactccagccccttcagaggtcaagttgatatcatgtatatcaaggcctcaaccataaatcacgttgttagtgtaggatatttggcatggtccaagattccaaggtacacaaaaacaatgtgattaggcaggaccttccaaggacatagaggtacctcccaggaatggaaggcaaaggtcaaacctctgtttgggcaagattaattctttgtcacacaccacaaaacttttaaattccagtcatatttcctttggaggaagtc

SEQ ID NO: 594906 - DNA, 561 bp, Homo sapiens
ttcatagaactcagcaaagctgttgttctcatggttacagtttattacaacaaaggatatagattcaaatcagccaaaggaagaggtccatagagcaggggccaggagaaatccaggcatgagcttccagttatccttccctggtagagcctcgcaaacagtgctaatatttccctgaaatgatgtgtgacaacatgtgtggggtgttgacacagggaagcttactcaatccttggtgtccagttttattgaagtgtggccatatagacatgattgaccactcatatggctgattttagactccagccccttcagaggtcaagttgatatcatgtatatcaaggcctcaaccataaatcacgttgttagtgtaggatatttggcatggtccaagattccaaggtacacaaaaacaatgtgattaggcaggaccttccaaggacatagaggtacctcccaggaatggaaggcaaaggtcaaacctctgtttgggcaagattaattytttgtcacacaccacaaaacttttaaattccagtcatatttcctttggaggaagtc

SEQ ID NO: 594907 - DNA, 578 bp, Homo sapiens
gccgcgtcatgcactgtggaagaacgccgggtgggtttctttctcctttttgatacccacactcactgcctccctcaataataaaactgcatccattacaggccgaattcctgctcctggagaagacgggcacggatgggtgcaaggggcattcaggaaggggctgacccagggggccggagacagacagcaggggcactcaaggcgatgcgcccaggttcccaggggcactgaggatgggagcctggcgagtgagcacccaagcccagcaaggtctacccttcctcccctggcctggaggctgtggaccaccaccacacaggcccatggcgtcagggctctcgggcttgcaacaggacatggagaaaagactgagaagcccagcccacartgggggtttctggaatgttcccttgggaatggaaggaacagggacctctgcaaaggctgatttgattttgttgccaagccttttatataagcctttctcagtccccccacagcccccctacacttgaatttctgcttctggatatgtgtgcacagatggataaaaatcaaacatagaatgtgatgtc

SEQ ID NO: 594908 - DNA, 578 bp, Homo sapiens
gccgcgtcatgcactgtggaagaacgccgggtgggtttctttctcctttttgatacccacactcactgcctccctcaataataaaactgcatccattacaggccgaattcctgctcctggagaagacgggcacggatgggtgcaaggggcattcaggaaggggctgacccagggggccggagacagacagcaggggcactcaaggcgatgcgcccaggttcccaggggcactgaggatgggagcctggcgagtgagcacccaagcccagcaaggtctacccttcctcccctggcctggaggctgtggaccaccaccacacaggcccatggcgtcagggctctcgggcttgcaacaggacatggagaaaagactgagaagcccagcccacagtgggggtttctggaatgttcccttgggaatggaaggaacagggacctctgcaaaggctgatttgattttgttgccaagccttttatataagcctttctcagtccccccacagcccccctacacttgaatttctgcttctggatatgtgtgyacagatggataaaaatcaaacatagaatgtgatgtc

SEQ ID NO: 594909 - DNA, 414 bp, Homo sapiens
gacatgtccctcctaaatgtttggacatacatttccaagcacgagaatttctctcctcaaatcacaatgctattatcataagctaacaagggtctctgaaacctatttaaaaacaaaaggccgggtgtggtggcttggctgggtgcagtggctcacgcctgtaatcccagcactttgggaggctgaggtgggtggatcacctgaggtcaggagytcgagaccagcctggccaacacggcgaaaccccatctctactaaaaatacaaaaattagctgggcatggtggcgcacacctataatctgagctacttaggaggctgaggcaggaggcaggagaattgcttgaacctgggaggcagaggttgcagtgagctgagattgcaccattgtactccagcctgggcaacaagagca

SEQ ID NO: 594910 - DNA, 418 bp, Homo sapiens
tttcttttagcactttaaaaatatcattccactttttccatggtttctaatgaaaaatcacagttaatcttattaagaatgccttttttaattgaggtaaagaacatacacaatttgctatcttagtcattttaagygtacaattcagtagtgttaactatatacaaactgttgcacaacagatctctataattttttatctttcaaaactgaaactccatggtcgttgaacaacaactccactcttcctctcttctttccccggaaatgactgttcctctttctgattctaggagtttgattactttagttaactcatgtagttagaatcaaacagtatttctcttttttgtgacaggcttatttcactttgcataatgtccttgagggttatccatgttgtagcatatgacagaat

SEQ ID NO: 594911 - DNA, 402 bp, Homo sapiens
aaagataaacttaattctgtcattttaaagtgygttttctgtaagacttagagctttcttgtctgaatttcctgcaatactcttttcctttgtttttatttaatttttttttgtagtgaaacagtcaaatttctttctcattttcttttgtgtatattctgtaactatcttttgtgtggttaacataggaattagattttaaattctaaagctaaaacacactagtttggatttatacctgcttaacttcagtatatacagaatctttgcccctttacatccctttcaccacttcttacagttgctgatgtcacaaaattacattgtgtgtccaaaacataaaccaacaatttttaaaatgcattagtctcttaaattatgtacaaaataaaatgtggagtt

SEQ ID NO: 594912 - DNA, 634 bp, Homo sapiens
ccaaacctgatctttctcttgtttttcatattcatgtatttccatttctccaaggtgtgtttcatagagtactaatgtaacttgagatcttaataggttatttgtggagaagagagagtggaaagaaagttctgataatattagcttctaaaataatttcaataaatataaactaaacaaaaaattaatgttttataatactctccccttataaatgctgtaccctatctgtaaaggaccagaagccatataaattaccacatcaaaatatatgaactgttaactttggatctgtacattgacccaaaggcaatgtatttccgttaaatttacattgatgtgtgttgtctgttagatgttgttctacttcatragatgtcaaagttactttttgatgttttattacagcttaatgaaatttacatattacattaacacatgtacatttggaaataaagaaagaaaaaagcaaagacttataatcagaagggcttctgttaagttttggactcagctacttacttgctttgtggtcttttcctctttttaatttttgtggctagatagtagtgcatatttttatgtggtacatgagatgttttgatacaggcatgcaatgcgaaataagcacatc

SEQ ID NO: 594913 - DNA, 634 bp, Homo sapiens
ccaaacctgatctttctcttgtttttcatattcatgtatttccatttctccaaggtgtgtttcatagagtactaatgtaacttgagatcttaataggttatttgtggagaagagagagtggaaagaaagttctgataatattagcttctaaaataatttcaataaatataaactaaacaaaaaattaatgttttataatactctccccttataaatgctgtaccctatctgtaaaggaccagaagccatataaattaccacatcaaaatatatgaactgttaactttggatctgtacattgacccaaaggcaatgtatttccgttaaatttacattgatgtgtgttgtctgttagatgttgttctacttcatgagatgtcaaagttamtttttgatgttttattacagcttaatgaaatttacatattacattaacacatgtacatttggaaataaagaaagaaaaaagcaaagacttataatcagaagggcttctgttaagttttggactcagctacttacttgctttgtggtcttttcctctttttaatttttgtggctagatagtagtgcatatttttatgtggtacatgagatgttttgatacaggcatgcaatgcgaaataagcacatc

SEQ ID NO: 594914 - DNA, 402 bp, Homo sapiens
aattacaacgatctcatctgaagaccaaagaaaagggatgaaaaataaacagactccagaacctgatggaaatgcgaaggacctaaaatagctacacagttttgagaaagaacaaagatagaagagttatactacctgattcaaactatcctatagagccatagtaatgaagacagtgaactattggtggagcaataagactattgattaatgtaagagaattgaaactccagaagtaaatccttgtatttatggttaattgattttgacagtttcccaaacaatttaatgaggaaatgataatttcaacaaatggtcgaatggctgaagagaacattgatattaaagagaaaattttgatacatcaaaaattaactyaaaatgggtcatagaccgaaacat

SEQ ID NO: 594915 - DNA, 535 bp, Homo sapiens
acaaaagaagtattttccaaataatgcattaagactcatgcacgaatacctattttcataaatcttagaaagagaggtctatgatatcttctaaatatatttttacrtatacttttaagaaaggatattgtaggggaaataattttcaaatttttaatctatatttaatagaatattttgaaggaactaattatgtatcacttttaaatctgtctataaactggaaaaaatgtcactatgtctgatacaaatagttttatgaacatgattgtgacaacaaaagagcaaccaaaattatttgggaaatgtactttaatgtttactaaacaatttactttcctctaacacattgtggatagcacatcaacatcccagaacttgtctttttctcacagcctggggaagcaatagattccacagcaaacattagacataaacttagtaaaaactgcttaatggaaacacttaaaaatatttatttcttctatatatttcttttagtgactgtatttatgaattccatcccatctttttt

SEQ ID NO: 594916 - DNA, 576 bp, Homo sapiens
gttcttgtgccatggttttcagctccatcaggtcatttaaggtcttctctatgctgtttattctagttagccatttgtctaatcttttttcaaggtttttagcttccttgcgatgggttcaaacatcctcctttagctccgaggagcttgttattaccgatctcctgaagtctacttctgtcaacttgtcaaagtcattctctgtccagctttgttccatctctggygaggagctgtgatcctttggaggagaagaggcactctggtttttagaattttcagctcttctgctctggtttctccccatctttgtggttttatctacttttggtctttgatgatggtgacctacagatggggttttggtgtggatctcctttttgttgatgttgatgctattcctttctgtttgttagttttccttctaacagtcagaaccctcagctgcaggtctgttggagtttgctggaggtccactccagaccctgtttgtctgggtatcaccagcggaggctgcagaacagcaaatattgcagaacagcaaatgtcactgcctgatccttcctctggaagctt

SEQ ID NO: 594917 - DNA, 576 bp, Homo sapiens
gttcttgtgccatggttttcagctccatcaggtcatttaaggtcttctctatgctgtttattctagttagccatttgtctaatcttttttcaaggtttttagcttccttgcgatgggttcaaacatcctcctttagctccgaggagcttgttattaccgatctcctgaagtctacttctgtcaacttgtcaaagtcattctctgtccagctttgttccatctctggtgaggagctgtgatcctttggaggagaagaggcactctggtttttagaattttcagctcttctgctctggtttctccccatctttgtggttttatctacttttggtctttgatgatggtgacctacagatggggttttggtgtggatctcctttttgttgatgttgatgctattcctttctgtttgttagttttccttctaacagtcagraccctcagctgcaggtctgttggagtttgctggaggtccactccagaccctgtttgtctgggtatcaccagcggaggctgcagaacagcaaatattgcagaacagcaaatgtcactgcctgatccttcctctggaagctt

SEQ ID NO: 594918 - DNA, 479 bp, Homo sapiens
attaagacattgttcttgacctaaacagagcttacatctacaaaagacaaaatatactaacatgaaatgcttattaggcatccgccacaatgttcatgcaaaatatatttagattcagacagacctcttttgagctctaccactctttggacttyggtcagttttcctgtttttctgagcctatatttcactggtaacctgaaattacctaactagcatggttgttagatgatttgaatgagatccagtaggaaagacaaaatgcaaaaatacaaagtattgttttaggtgccaaatgggtagactagatcagaggttggcaaactttttctataaaaaaccagattgtaagcattttaggctttgcaggccacatgatctctatcccaactactcagctttgctattgtagcacaaaagcagccttagacgatatgtaaatgaataagcatggctgaattctaataacattttattta

SEQ ID NO: 594919 - DNA, 513 bp, Homo sapiens
ccagagcagaactctgaaaattgctgccaagtggccgtcacccaagagaccatagaattcctggcaccaggcagaatctgtggctgtggccaagtgattgttgctgaacttacctgtgtcgaaaggtcagccttccagtgctaaggctgggcacaggcgctaaggcaaattggattgtgaatggaggccctgaggcatgttctgcactttgcaactggtctggcaggctccactcctccaccttctaagtctgccacaggcatgggaaacacctgggcagcgacaaaggtggttaaggcagcttcgccaaggtacagtatcaaccgcctttgctttgcacacaaaatgtacggtaatgaccacattcttagcaggcgattttccaatacagtgtcttgatgaaaaagccctaaatctttgcatgwgacgttggcttcaatactgccgcactaaaatcacatgttatttgagtagatattttacccatttgtaactcaaatataaattttacca

SEQ ID NO: 594920 - DNA, 645 bp, Homo sapiens
ctgtttgactccaagcctattcttgtttctccctacaccccccaggaaattctgactgctttctcagcagtattgtttttgtctaatgtgattcctcatggaacagtcacaggatcacatctaatttcattttaaagtcattgtaacaggctcagtatgaaatattaatgttatttttagtttacatttattgaacacctgctatgtgccaagcatgtgacattttgaattatctcaagtttgttctggtaaaagatggaatatagaaayagtaattcactattctagtccttagaacaagtctggtagagttatatattcttatctttcactagcacattatcaaaggtgggattcactaccttaataatatcctaaaaccgtgttctttctactgtgcatacttacattctttgctataaagagcttcacattttaagattgtttaaataattaactcacataaacaatggctaaatagtggcttcttatttggtcctttctatcccaaatcatgattttaaatttctagagatgaagtcaacattaaaatcctcagactccaattaaaaaaaatctattcaggacttctgagttaccagaaatatttccaagatttcttttctgaatttctttctcccatat

SEQ ID NO: 594921 - DNA, 645 bp, Homo sapiens
ctgtttgactccaagcctattcttgtttctccctacaccccccaggaaattctgactgctttctcagcagtattgtttttgtctaatgtgattcctcatggaacagtcacaggatcacatctaatttcattttaaagtcattgtaacaggctcagtatgaaatattaatgttatttttagtttacatttattgaacacctgctatgtgccaagcatgtgacattttgaattatctcaagtttgttctggtaaaagatggaatatagaaacagtaattcactattctagtccttagaacaagtctggtagagttatatattcttatctttcamtagcacattatcaaaggtgggattcactaccttaataatatcctaaaaccgtgttctttctactgtgcatacttacattctttgctataaagagcttcacattttaagattgtttaaataattaactcacataaacaatggctaaatagtggcttcttatttggtcctttctatcccaaatcatgattttaaatttctagagatgaagtcaacattaaaatcctcagactccaattaaaaaaaatctattcaggacttctgagttaccagaaatatttccaagatttcttttctgaatttctttctcccatat

SEQ ID NO: 594922 - DNA, 645 bp, Homo sapiens
ctgtttgactccaagcctattcttgtttctccctacaccccccaggaaattctgactgctttctcagcagtattgtttttgtctaatgtgattcctcatggaacagtcacaggatcacatctaatttcattttaaagtcattgtaacaggctcagtatgaaatattaatgttatttttagtttacatttattgaacacctgctatgtgccaagcatgtgacattttgaattatctcaagtttgttctggtaaaagatggaatatagaaacagtaattcactattctagtccttagaacaagtctggtagagttatatattcttatctttcactagcacattatcaaaggtgggattcactaccttaataatatcctaaaaccrtgttctttctactgtgcatacttacattctttgctataaagagcttcacattttaagattgtttaaataattaactcacataaacaatggctaaatagtggcttcttatttggtcctttctatcccaaatcatgattttaaatttctagagatgaagtcaacattaaaatcctcagactccaattaaaaaaaatctattcaggacttctgagttaccagaaatatttccaagatttcttttctgaatttctttctcccatat

SEQ ID NO: 594923 - DNA, 584 bp, Homo sapiens
ttttaagcaggagagtgacataaattaatttacatatttaaacgtctctcagggtgctgcatggaagtaaattataggagaataagtaagggtgaaaacacagaaagcagttaggaagctactaaaatagcccagctgagaggtggtggtggcctggatgggtttatcttgaagctaatgaaaggtcccttgcttacatagacctcttcttaggctaggagaagagccttagtgatgtattcatgggtcatatgtcttcgtgatatttgcaaaaacaagacattttagytgctaactgttaagacagctgttcctttctattctgactctgctacccacccatgcttccacttgggtggggtgatagtggagtggctgtgggtatttttgggatcctgtcaagggtgaggtgagtcagccatatatcattgtaactatgatttgcaaagatgctatggaacagttccattaaacaaagaaagtgaacttacttgataatctttacatttactggagagccaaagaaatatagattgggaagtaatgagatataaaacaaagatataaaacattcagaagtgaat

SEQ ID NO: 594924 - DNA, 534 bp, Homo sapiens
cctccatgaaccttctttgtacatgtcttcaggaacacatgtgtgaaggtttctctagctttgattgtgcaatagaatcagctggagtgattgtgacaacacagattgctggcccctccctgagacctcctgattcaaatggaatgtrtgggcccaagaatctaaatttctaacaaaccctcaggatatgcaaatactggtgcagagaccaaactttgagaattgctgcactagggttgatatccatgggtgaaattcttggccatctgatgtgtatatgttttccactttactaggaattcctaaactgctctccagggctgttggcactaatataggcgcccaccatcagctgtattccgatttcttactaccttgccaaaaattgatgttgtaagtctttaaaattgtcaatccaagtgatatctctttttattttttttaattaatattgacattgggtgtcaatatttctgatgtttaatggtctttgctttttcttttctgtgagttacatatactttgttttgttcc

SEQ ID NO: 594925 - DNA, 581 bp, Homo sapiens
aaaagagtgggagagaggaactaaaaagagctgaactcaaataacagaactgaatttttagcttaaatgtaagcatctatagtaaacttcaattaataagcacctttaactgcaatgttgatctgaatttaattctattccatyttaccattagggaattaattttatccaaagtatttgcctttaattctttttcctttttcattgtctggaattcatgctagatcaagagctaaaatattaaaggcaaagaatttggagtctttgtgtctgtaattatttaaagctgaattttcagcataggagaattcactaccagattttctgtagttctaatttacattttctgattcaatttacaattagcaaggcaaaatgagcagagcatactgtgacccatcccattcagtgtttggtaaacagattaattccaaggcatctaagaatcagctagggatcatgtttataacgccaacttctgctccttcccactccaacaccaccaaaagagaccctactgcagtgggttttgggctagacccaggcagagagtccccaaaccaccctttgaatgatatgaa

SEQ ID NO: 594926 - DNA, 549 bp, Homo sapiens
gactaattattatgcccattaggaaaagagagcacagaagtcacctgaaatgaaagtaaaaggaaaacggaagaactaaacctgaaaatgttatcctagaaaaacttgccaaataaatgccatcaaaggaatgtatttttagcttgctatgcatgaactccagtgggctacccgacggtgaaagacactactgaattatatgcaaaattatgtttcaaagrgggtgtgtacatttttccccctggagagagtaaaattaccaaaagagtacataactccaaagcatcaataattatttttcagacacatgaatatgtttctgaaacatgctcatgaaagtcattcaagatctttagacataaaaaaacaatgaacatgactccctgattatccacagtacctatgtataatatttaaagtttggttcactatgagtgacagaaaactccacctcatggtaaacaagatagaaggtaggagtttctttctttctcattgtgttagttcaggttcttcaggatgtggacaccaaaaatgagattaaatgtg

SEQ ID NO: 594927 - DNA, 603 bp, Homo sapiens
catgactttttataatcttttcccaaagattagttaagtcacatgaactaaaaggcattacactttttacttttctgacaaaatgttttatttaagcrcttattatttttaagccagttaaagcccttttatatcacacacaccacacacataaatacacagacaaacaaaagaagatccagtagttgtaagatttttcatttgctagtttttaagtttctatttcaagcatacactttctagggcctaataagcaggcatagctggaaggcaaaataaatccccccaaattaagggtcccatttttataccagatcctagatcccaaaaaatgagaaatgctacggaacaagacagtacaatgattttactgtgcattttttacaaagcaacccaaagctaatcagcccattctgtgattagcccatcccccaggggaatcttatttctcagtggtagtgggaggtaaggacatttccataccttccaggtggccaagagcatgcttttctgatccaaacatgcaaacagccgagtatccccaccataactgccattagctatccccagaagcatatttcctaccaaattattacaccccaa

SEQ ID NO: 594928 - DNA, 527 bp, Homo sapiens
tttaccaattttgttgatctttttaaataatcaccttttggtttcrttattttctatgtttttttctatttccttgatgttcatgtaaatccatattatttcctttttctttttgtttttgggtttaggttgctcttatttttctagttagctaaagaggaagcttgaattattgactggagactatttttctttttgtaaactataaacttccttttaagcactgttttaaatgcatgatatacatattttgatttttttgtttttaattcagctcaaaatattttgcaattttctctcactcatgggtgttagaagtgtgttgtttaatttccaaatatttggggattcatcagatctctttctttcattgatttctgacttaattccgttgtagtcatagaacacactttatattatttcaatcctttaaatttattgaggcttgctttatagcctagcatagagatcagcaaatgatagcttgtggttatgcatcttaagtaattacaatttactttatcata

SEQ ID NO: 594929 - DNA, 495 bp, Homo sapiens
tttaaaactgctctgagaagccctgagggttttagagaggtgcctccaggacctcaaagggagataggggaagacctaagtgcccactcccagtttttgagaccatattggctcctcccatctattttacatggagtctttagtgtacttgaggaaagcgttccacagatctgcccatattgcatattggcaatgcatcacagatgcgataacaatcatgatacttygtctgttagctaaccattttctttttctttttctttttaaaaatataatttatttttagtttaagttccaggatacatgtgcaggacgtgcaggtttgttacataggtaaatgcgtgccacgagggtttgctgcacctatcaatgatttacttttccaaaacacttaggtgttagaccctacagctgagatgtttgagtccctggcaggcagacatgtgttgaaattcccagtactgggcactatgtctgatacaaaataggctctca

SEQ ID NO: 594930 - DNA, 598 bp, Homo sapiens
agtatattatgacatgaaagttgacaccacatacagaaatactaaatactacatatgcttsaggggtacaagttattgttgctatgggagccgtaagttctgaatggcgataaaaatggagtacctgaacagccttggatcatgcctttatgaaaaccctgtgcattcatacacttgacaaatctttattgagtgcctactatgtgtaaagaattgtgctacaggctgcgggaaaatatggcccctgcctccagtagctaataaaaaagtatccagtgggaccttacagttttacaaggactgagggaatttctccctctgtagccaaacaatatattccacatttttcaaatgtcatgtaaagaagcctgtataggggagatgctattaggatctatcccaaaatgccttctacttaactccagcatctgactcctaaagaacatagcccattgctatgttctccactgttgagtcattaagcataattgttggtctactctttcttcccttgccctcttccaactcacccttatatcaactaatgtgattaacaacagctgggtgcagtggctcacgcctgtaatcccagcacttt

SEQ ID NO: 594931 - DNA, 598 bp, Homo sapiens
agtatattatgacatgaaagttgacaccacatacagaaatactaaatactacatatgcttgaggggtacaagttattgttgctatgggagcygtaagttctgaatggcgataaaaatggagtacctgaacagccttggatcatgcctttatgaaaaccctgtgcattcatacacttgacaaatctttattgagtgcctactatgtgtaaagaattgtgctacaggctgcgggaaaatatggcccctgcctccagtagctaataaaaaagtatccagtgggaccttacagttttacaaggactgagggaatttctccctctgtagccaaacaatatattccacatttttcaaatgtcatgtaaagaagcctgtataggggagatgctattaggatctatcccaaaatgccttctacttaactccagcatctgactcctaaagaacatagcccattgctatgttctccactgttgagtcattaagcataattgttggtctactctttcttcccttgccctcttccaactcacccttatatcaactaatgtgattaacaacagctgggtgcagtggctcacgcctgtaatcccagcacttt

SEQ ID NO: 594932 - DNA, 598 bp, Homo sapiens
agtatattatgacatgaaagttgacaccacatacagaaatactaaatactacatatgcttgaggggtacaagttattgttgctatgggagccgtaagttctgaatggcgataaaaatggagtacctgaacagccttggatcatgcctttatgaaaaccctgtgcattcatacacttgacaaatctttattgagtgcctactatgtgtaaagaattgtgctacaggctgcgggaaaatatggcccctgcctccagtagctaataaaaaagtatccagtgggaccttacagttttacaaggactgagggaatttctccctctgtagccaaacartatattccacatttttcaaatgtcatgtaaagaagcctgtataggggagatgctattaggatctatcccaaaatgccttctacttaactccagcatctgactcctaaagaacatagcccattgctatgttctccactgttgagtcattaagcataattgttggtctactctttcttcccttgccctcttccaactcacccttatatcaactaatgtgattaacaacagctgggtgcagtggctcacgcctgtaatcccagcacttt

SEQ ID NO: 594933 - DNA, 518 bp, Homo sapiens
cattgggacctgagcactgcaaccctatcttcctgacttgttaaaattcactcaagtacactttaatcgcataggacagctgaaactagaatgtacstgatagagaacatgggagaagattccctccaccaccccaatcttgggaacttgcaaggtctaggagatgtcacaggtaatttattaactgcaatgaggagtaaagcaataattaagtgcatatattgttcacatgactgttgaaaaggggcttgaggagagataaatagaggagggaaagataaaagacttgatcatttaaaaattcttcggagaaaataaatgtacatataaaaagaattttgcaaagaatattctctgtttttcccatttttctaaaccaacaagatcttatgcttagagaccagtcaaaagtggcttgagagttgtgatgtaagtgcccagagaacaggactcaggactcttccaggtttggccactgcctttgaacaaatcagttaatctctttgaattaaaacaag

SEQ ID NO: 594934 - DNA, 612 bp, Homo sapiens
tggtcaaggctgcaagtggatgaaagaatagatagaaataatagttggagttactaaagctgatgggaatactgaagaaagagaagaacctgtgagcaaaccttgggaatgactctggagagaaggaggatgcaatagcaagttaaataaatagaagagaggtaagaaaactgggagtagaaggttagggtcaaaaaagccaagcccagctgggtgcagtggctcacatctataatcccagcactgtgggaggccgaggcgggcagatcacctsaagtcgggagtttgagaccagcctggccaacatggtgaaaccccatctttactaaaaataccaaaaattagccaggcatagtggcagccacctgtaatcctagctactcaggaggctgagacaggagaatcgcttgaaccagggaggtggaggttgcagtgagccgagatcgcgccattccactccagcctgggcaacaagagcaaaattctgtctaaaaaaaaaaaaaagccaagccccttactaaggagcttcaagaagcatgaccagcaatatctcgcacaaaaggcaaagatggatgagcacttccatttcttccacaaggaaagtttaagtac

SEQ ID NO: 594935 - DNA, 612 bp, Homo sapiens
tggtcaaggctgcaagtggatgaaagaatagatagaaataatagttggagttactaaagctgatgggaatactgaagaaagagaagaacctgtgagcaaaccttgggaatgactctggagagaaggaggatgcaatagcaagttaaataaatagaagagaggtaagaaaactgggagtagaaggttagggtcaaaaaagccaagcccagctgggtgcagtggctcacatctataatcccagcactgtgggaggccgaggcgggcagatcacctgaagtcgggagtttgagaccagcctggccaacatggtgaaaccccatctttactaaaaataccaaaaattagccaggcatagtggcagccacctgtaatcctagctactcaggaggctgagacaggagaatcgcttgaaccagggaggtggaggttgcagtgagccgagatcgcgccattccactccagcctgggcaacaagagcaaaattctgtctaaaaaaaaaaaaaagccaagccccttactaaggagcttcaagaagcatgaccagcaatatctygcacaaaaggcaaagatggatgagcacttccatttcttccacaaggaaagtttaagtac

SEQ ID NO: 594936 - DNA, 436 bp, Homo sapiens
ctcaaccaagttgagaggagtattttaagtaaacatctgtcataattttttcaggtactaagattgaaaacagagacaaaatatttttagattattagaggttaaatagtcaagtattcccaaaatgtttaaagtatgtctgtgagtgtgcgtgtgtgttaatgaattagattgctagactgcctcattttcatttttactctaaattctttcgtcactaggaatctagatataggtttgtttacaaatgaaaaaagttttcagaaaagaaatcacaactttagttcttgaattgaggattaatatattacctakgaacaatgtaggactgtttgggatttgagccatattagccttcgttcccagaaaccttctgaatattactacaaacacctcttgtattagcagttctagaaatacaccaagaaatgcacct

SEQ ID NO: 594937 - DNA, 518 bp, Homo sapiens
gatggcttagcttccacggtgtaatatactgcaggagctggaggcagatgcaggacccttggaaatacatgaatctacaagcagtgttcgggggcttttaggaaagggagaatgaatgctgggtggaaagaaagtctactacgacaacccctgagaattcacagacattttgcaaatccatgcaagaggcacaataaaagagtttttagttcgttttaactaaatctcaaaggataggttgacctggtggttgatgacctggtagttattttgagtattaagagaaaatgttcatgaatactgattacagcgcatgaaataacagtagatccatacacatcataattcccttcttcttctactttccttcttctttttctctccagaatataayatatataatttgaagtttaaacaatagtgccgaattttgaagcacgatgttcttaaattagaaagaagattataaattataaaacaacatttaaaaatggtggccatcttggtagagacatggc

SEQ ID NO: 594938 - DNA, 518 bp, Homo sapiens
gatggcttagcttccacggtgtaatatactgcaggagctggaggcagatgcaggacccttggaaatacatgaatctacaagcagtgttcgggggcttttaggaaagggagaatgaatgctgggtggaaagaaagtctactacgacaacccctgagaattcacagacattttgcaaatccatgcaagaggcacaataaaagagtttttagttcgttttaactaaatctcaaaggataggttgacctggtggttgatgacctggtagttattttgagtattaagagaaaatgttcatgaatactgattacagcgcatgaaataacagtagatccatacacatcataattcccttcttcttctactttccttcttctttttctctccagaatataatatayataatttgaagtttaaacaatagtgccgaattttgaagcacgatgttcttaaattagaaagaagattataaattataaaacaacatttaaaaatggtggccatcttggtagagacatggc

SEQ ID NO: 594939 - DNA, 566 bp, Homo sapiens
atgataataatgataattaaacaaatgaaaaatggtactaaaccttaaagaaagaagaaagccagtgaaaaagaacaatgtcaaagaatcaaatagatcctttagtaataaaaaatataaccaaaataaaaactcaatgtatcactaaatagcaaggtttatgcaaagaaagtgaagtgcagagaggtggrtgaactgaaagataagcctcagactctttaaccagaatagctcaaggagacagaggggtggaaattacataaagagtttaagaaagatggagtatagcaaaagacgtctaacatatgtccaatacatgagaagccttgctgaaagggctactaaagggtgtacttcaggaaaaagaaagttgaacccagactgaaggatacaagaaccaatataagtaaaacaaaagaaaacaatttttaaaaacctaaactgaaacaatattaacaaatatgtctataaatctaaataagcaggggctggaggagggagaaagtaagatatcattaatgaggtataaaactaaggtggaattaattactaaataacaacaattt

SEQ ID NO: 594940 - DNA, 566 bp, Homo sapiens
atgataataatgataattaaacaaatgaaaaatggtactaaaccttaaagaaagaagaaagccagtgaaaaagaacaatgtcaaagaatcaaatagatcctttagtaataaaaaatataaccaaaataaaaactcaatgtatcactaaatagcaaggtttatgcaaagaaagtgaagtgcagagaggtggatgaactgaaagataagcctcagactctttaaccagaatagctcaaggagacagaggggtggarattacataaagagtttaagaaagatggagtatagcaaaagacgtctaacatatgtccaatacatgagaagccttgctgaaagggctactaaagggtgtacttcaggaaaaagaaagttgaacccagactgaaggatacaagaaccaatataagtaaaacaaaagaaaacaatttttaaaaacctaaactgaaacaatattaacaaatatgtctataaatctaaataagcaggggctggaggagggagaaagtaagatatcattaatgaggtataaaactaaggtggaattaattactaaataacaacaattt

SEQ ID NO: 594941 - DNA, 431 bp, Homo sapiens
acttctctgcctacaatctttcattgattcttcattgctgttaggttaaaatacaattgatttatattcactrcctctccagccccatatgccaccacactttctgccactctcttctccagccacacagaatcacttggcctgccctaaaggtccaactatctctaatatctgagggtttgctttatctaaaagaatctcactctcccctctctgccatcccactccatacttgattgataaagcctcaggcttcagaactgtcatccattattgccttaacaatggcaataaaaattacctattaaaccaaaacaaaaagagacaaatgaaactacatcaaactaaaaagttcctgcatgacaaaggaaacagtcaacagcttgaatatataacctgcagaatgggagaaaatatttgcaaactattca

SEQ ID NO: 594942 - DNA, 489 bp, Homo sapiens
actaagtgcaaaagtcagaggttatttctggaagtctttaaagagacttttctcacttgcagcttgggagcatgttgagcyggtgaaccataggccttagttgtgacaagagcaaaacttcagaaaagcctaaattcatgcctaggtaagactctggatgccataataaggcagatgtgcttcagagagtgggagttaagccatgcagattcagtggcttgccacatatacgatgcttttagggatccagtggtctggtgcatactcgaacatcccttccaaggtaaagggcaaagttatggcatcttttgtatactaccattaaaaaagaagtaaaacacagcacatacaacacttgggaatactacaatgaatgatttagcaagtgctgtggaaagttccccgttttcagtgaggccctgagcaagaaagggcatgttcaggccatatagcacaagctgtcctaccacatggcttatgtggcccaac

SEQ ID NO: 594943 - DNA, 489 bp, Homo sapiens
actaagtgcaaaagtcagaggttatttctggaagtctttaaagagacttttctcacttgcagcttgggagcatgttgagccggtgaaccataggccttagttgtgacaagagcaaaacttcagaaaagcctaaattcatgcctaggtaagactctggatgccataataaggcagatgtgcttcagagagtgggagttaagccatgcagattcagtggcttgccacatatacgatgcttttagggatccagtggtctggtgcatactcgaacatcccttccaaggtaaagggcaaagttatggcatcttttgtatactaccattaaaaaagaagtaaaacacagcacatacaacacttgggaatactacaatgaatgatttagcaagtgctgtggaaagtkccccgttttcagtgaggccctgagcaagaaagggcatgttcaggccatatagcacaagctgtcctaccacatggcttatgtggcccaac

SEQ ID NO: 594944 - DNA, 489 bp, Homo sapiens
actaagtgcaaaagtcagaggttatttctggaagtctttaaagagacttttctcacttgcagcttgggagcatgttgagccggtgaaccataggccttagttgtgacaagagcaaaacttcagaaaagcctaaattcatgcctaggtaagactctggatgccataataaggcagatgtgcttcagagagtgggagttaagccatgcagattcagtggcttgccacatatacgatgcttttagggatccagtggtctggtgcatactcgaacatcccttccaaggtaaagggcaaagttatggcatcttttgtatactaccattaaaaaagaagtaaaacacagcacatacaacacttgggaatactacaatgaatgatttagcaagtgctgtggaaagttcccmgttttcagtgaggccctgagcaagaaagggcatgttcaggccatatagcacaagctgtcctaccacatggcttatgtggcccaac

SEQ ID NO: 594945 - DNA, 578 bp, Homo sapiens
agcgggcccctagtggtgaggttcagagtgtgacccataaggaggtggactacacttgaaaagaaatgtttgagttctctaattaatgtaaacagaaatctggggaacaggcatgggaatggatattaagggtatgggaaaatggtggaaggaacacagaattggatcaggctgaatttattgatttgggcccactaagtagggactctgcatagaaagagcctgtgtagccaaagcaagaccaagcaaaaagaacaaatctggaggcatcacactacctgatttcaaactatactataaggccacagtcaccaaaacagcatggtactggtataaaaatagacacatagaccaatggaacagcatagagaagccagaaataaacccaaacacttacagccaactgatcttcaacaaagcaaacaaaaacatagagtgggaaaaggacacctgtttcaacaaatgatgctgggataattggctagtcacatgtaggagaatgaaactggatsctcatctctcatctaataataaaattaactcaagatggattaaggacttaaatctaaaacctgaaa

SEQ ID NO: 594946 - DNA, 523 bp, Homo sapiens
cagctccaccgattttgagaacgacagcgacttccgtcccagccgtgccaggtgctgcctcagattcaggttatgccgctcaattcgctgcgtatatcgcttgctgattacgtgcagctttcccttcaggcgggattcatacagcggccagccatccgtcatccatatcaccacgtcaaagggtgacagcaggctcataagacgccccagcgtcgccatagtgcgttcaccgaatacgtgcgcaacaaccgtcttccggagactgtcatacgcgtaaaacagccagcgctggcgcgatttagccccgacatagccccactgttcgtccatttccgcgcagacgatgacgtcactgcccggctgtatgcgcgaggttaccgactgcggcctgagttttttacaatggcgkaaaatcgtgttgaggccaacgcccataatgcgggccgttgccggcatccaacgccattcatggccatatcactcacttcctggtgcgtacgggttgacaagcggtgtcagtcaa

SEQ ID NO: 594947 - DNA, 415 bp, Homo sapiens
acattagacaatctggcagaagggttctgattattcaaggctgcttttgacttcttttacaacatgagcccttctgtgatatggacactaaaactaaagaaggattggtaccatatatggaggctgggaagtcccaagatcaagctgccaaagagggctggttcctcataaatgatgctttctaaatgtgtctcacagtctccctccagctctgttttttgagacggagtcttgctctgacgcccaggctggagtgcagtgtcgcgatctcagctcactgcaacctccrcctcctgtattcaagcgattctcttgcctcagcctcctgaatacctgggactacaggcatgtgccaccacgcccagctaattttttaatatttttcgtagagatgtggtttcaccatgtttgccag

SEQ ID NO: 594948 - DNA, 364 bp, Homo sapiens
agactctgtctcaaaaaaaaaaaaaaggaaaaaaaggagaaagagggaagaagaaacatgcaaagactcataagacaatgtggtagatgctaagatggaagtcagtagagtatagagagagctgtgaaaccactgaaaatgtgacttacttctacatggaggtgagattgggctgtctcagattccttaattaaactagctgtcgaatagtgaattgaaaytaatgaatcaggaacaagaatattctaagctaagagatatttcatggagggggaaagctgagaaagaataatatgtgtggttcagcacaagtagtttcacagcatgcacatgcgtgctcaattgcagaagctgcttggggtga

SEQ ID NO: 594949 - DNA, 594 bp, Homo sapiens
atagagatgcgagaactgagatgtaattaaatatatgtcattcttttattaaatttctgggttgctgatgaaaggctcatcttacctggtagtttagaatttcagawtttttttaggttattagaacacattatgtggagaagaggcaagagttgaagaaatgtactttatgacagaaaacaaacatgatagagaccaatgcaaaatcgaccaattagacatttttataagagttcataaaatgttacaaaaaaggtaacattttgtaaaagaagtagaaaatctatttgttgttttgaattaattgtgtaccaaaattgtgaaaaagttggctaagtacatccaagatgcttaccaatgacatggacttagcttaattatacaggagaagagaaatgaacatttatcgagtgtttacaatagaccatacattatactaggtgatttcacatgtcttgttttacttctaatactcctgttataaatgttatgaatctcagttattcaggagattaagtcatcagagaagtttccaagtaattaagtcacaaagctagtaggttatggatgttggatttaactaccctcaccact

SEQ ID NO: 594950 - DNA, 444 bp, Homo sapiens
ttttatcacatgcaaatttgtgtaactactacctcttcaagtaaaatgcagaactgctcccccaccaaacagatctctctggtgagacctctgtgtagccatacccactctctccccatcaacaactaatgtgtctccatcgctatcattttgaggaggctgagttttaaatcaacttccgaccctctcagcagtgtgaccttggataagtcatttgtccttttctggatgttgatcttctcagctaaagtaagacaaggttggctcacatcaacattcctcttgaatttccacaggctgatatgatctgaaaatgctacrgagattatgagaaagaaaatggggttttatggtgaaataaactagggaaatgatgctttccataaatacataatgcttctttaccgtgaattctcagccctttaatacactaaggtgaactgt

SEQ ID NO: 594951 - DNA, 557 bp, Homo sapiens
tttttttctgtctctttctctcttcttccctccttccgtccctccctccctcccttgcttccttccctcatacctttcatttttctttctttctctccccttcctcccttcctccctccctgccttcctgccttccttccgtccctctttctctcttcctccctccctccctccctcctttccttccttcgtattttttttctttctttgtctctccttccttccttccttcttcctacctttccttcttttttctttctttctttcttttctctttctttcataatgacagggtctctctctgtcacccaggctggaatgcagtggcatgawcatggctcactgcagcctggacctcctaagctcaagcaatcctgctgtctcaagcgagcctcttgagtatctgggactaaaggcatataccaccatgccaagctaacgttttttttttttatttttatttttagagatggggtcttactatattgcccaggctggtcttgaactcctgggctcaagaaatcctcccaccttggcctaccaaagtgctgggattg

SEQ ID NO: 594952 - DNA, 505 bp, Homo sapiens
tgcacaggacaaagaccatgtgaggacacagtgagaaggcagccatctgcaagccaggaagaggccctcaccagaaaccaaatatgttggcgacttaatcatagatttttagcctccaccactgtgagataataaatgccttttgtttagggctcccagtctctggtgttttgttattcagcatgagctgactaaaatacttattaagtgtcacctcttttttttacctcaagcacctcagagtgactcctatgggacaaaggacagaaagcctcatcatgaaatgagtggggaagggtctggattttagaggatgaggcgctcactactcagaacattcacccatgaagtccctctcacccttgctggtcccagagacccttagctctagctttgtctaactcttcacagttttgaggtratgcacaaaaacagatgcacacagaagaggtaaacctctgtgttcatcattcttgcattgctataacgaaatacctgagactgg

SEQ ID NO: 594953 - DNA, 517 bp, Homo sapiens
gtgacccattatgtggactttactgggatttctccattcttttttccctgctttttcctccctgcttcgctcgatggttctttactgttgggaattgacagtccctgggccgaggctactcttcgtgggattctgaagccctagagaagggatacctgtctgtcgttgcccttagggttcttgtctattttcagactgccagtgaactagtttgagtaccctttggcaattgagggtttctggccgaggsgactcccccacgttacctgaaggcgaagacaaaagagtgaatttgctattgcctgttagggtagcaagtccactttcacttaacactctgtaaactgtgccttggaaacgggcagcagtgatctcacctctgcgcggacgcactccactgtttgcagacccacttttggattcaactctgtcataggcactagatcccaagttacagatgagttctccatcacattaggtttgagctgaccactcaaacaagggcacgcctggtctg

SEQ ID NO: 594954 - DNA, 517 bp, Homo sapiens
gtgacccattatgtggactttactgggatttctccattcttttttccctgctttttcctccctgcttcgctcgatggttctttactgttgggaattgacagtccctgggccgaggctactcttcgtgggattctgaagccctagagaagggatacctgtctgtcgttgcccttagggttcttgtctattttcagactgccagtgaactagtttgagtaccctttggcaattgagggtttctggccgaggcsactcccccacgttacctgaaggcgaagacaaaagagtgaatttgctattgcctgttagggtagcaagtccactttcacttaacactctgtaaactgtgccttggaaacgggcagcagtgatctcacctctgcgcggacgcactccactgtttgcagacccacttttggattcaactctgtcataggcactagatcccaagttacagatgagttctccatcacattaggtttgagctgaccactcaaacaagggcacgcctggtctg

SEQ ID NO: 594955 - DNA, 469 bp, Homo sapiens
cagaatggataaaaatgcatgatccaaatatgcgctgtttataagagattcactttaaatccaaagatagaaataggtttaacataaaaggacggaaaaagatattccatgaaaatagtaaccaaaaggtggctttactaatatcagaaaaaatagactttatatcaaagaaggttataagaacaaagaaggacattatacrttaataaatggtttgatacagcaggaagataattatagacatttacatacttaataacagaccatcaaatataggaagcaaaaactgacagaattgaagggagaaatagacagaataactcaatgatataggtgcaattattcacatttcagaaataggaaaactgtggcttagaaagaaagacaaagtcatttgcccaaagttgtgcagctagtaaatgatgaagccagggtttggattcaagaattttgattcttgaatgtagac

SEQ ID NO: 594956 - DNA, 423 bp, Homo sapiens
agctgggattacaggcgactgccaccatgcccagstaatttttttttttttttttgagactcgctctgtcacccaggctagagtgcagtggcatgatcttggctcactgaaagctccgcctcttgggttcatgccattctcctgcctcagcctccagagtagctgggactacaggcgcccgccaccacgcccagctattttttttttttgtatttttagtagagacggggtttcactgtgttggccaggctggtcctgaactcctaaccctaggtaatccacctgcctcagcctcccaaagtgctgggattacaggcgtgagccaccgcactcagcaaaaataacattttttaagtcaggtgcacaccactgtaacagtattagatatgtggttttccttgaaccttcaagcatggtgactta

SEQ ID NO: 594957 - DNA, 423 bp, Homo sapiens
agctgggattacaggcgactgccaccatgcccaggtaatttttttttttttttttgagactcgctctgtcacccaggctagagtgcagtgscatgatcttggctcactgaaagctccgcctcttgggttcatgccattctcctgcctcagcctccagagtagctgggactacaggcgcccgccaccacgcccagctattttttttttttgtatttttagtagagacggggtttcactgtgttggccaggctggtcctgaactcctaaccctaggtaatccacctgcctcagcctcccaaagtgctgggattacaggcgtgagccaccgcactcagcaaaaataacattttttaagtcaggtgcacaccactgtaacagtattagatatgtggttttccttgaaccttcaagcatggtgactta

SEQ ID NO: 594958 - DNA, 637 bp, Homo sapiens
cagaagctttgagacccatcatgtggttccatcatcacattctttcctctactgcaagaccatccccaagactagcatatcccagaaaaagtgtattcccttagcctggctcctggaacaaaaacaacatagagcagagacatgaaggacacaaatgtgagtgagaaataaacctcagtggtcttcagcctctgagatttgggagtcatttgttactgcagtagaacctggtcagatgtcttctacactctgtaatctccagtgcatcttattttcctttctactcaaaacagcatytcatataattctttgcctgtggtacacattcaataaaaactggctaaatagaatttttattttgtggccaggcgtggtggctcatgcctgtaatcccagcactttgggaggccaaggcaggtggatcacctgaggtcaggagtttgagactagcctggccaacatggtgaaaccccgtcactactaaaaatacaaaaattagccaggcatggtggcacatgcctgtaattccagctatccaggaggctgaggcaggagaattgcttgaacccaggaggtggaggatgcagtgagccaagattgtgccattgcactccagactgggcgacaacagtgaaac

SEQ ID NO: 594959 - DNA, 611 bp, Homo sapiens
atttttccattttaatatttgtctaatagttgttttgtgtatagaatttctcatttttatagatctgctggtctttatagttttttctgttatttctagtataggaaaacttcccccttgtagaagttttataaataaatatccatgttttcgtcaaatgtttctactgttaaatttttaaatatttaaatgtttaaccaatctagaattcactttggtgtgtggaataaagtgagaaatcaaagtttttgtatttctaggcattcatctcatcaccatttattgaataatttgttcctgctcaagggtttaataagcttcctatggcataatagattcttatgtaaaatagagtcaatttatgaatctcaaaaacaaaatgtcctagacaaatttttcttcaagcatgtgctacatgttattaatttgctacaagggctccaggaaagtgacagaaacatgtgtgmcccgtataaaagtggaggggttatacagtgagagacagaaggcttgcataagtaagcagtttttttaaaaaaattagaaagattccatttttattttacaaagtcatgaaaatatcatgttcatatcagctgtgaaaaaggaac

SEQ ID NO: 594960 - DNA, 538 bp, Homo sapiens
tttgatacggattatattaaaccactttcttggcctctaagactctgtgctctccaggttctctcctatttcattagctgccttctttcagtcttctctgctggatcttctttcttgtcccaaattcttcatgttggtgagccccaggattctctctgcattctctccgtsgatgacctcatccaatcctctggctgtacattccatctatctgttgatggcccaacatgtttctatgagtttcatgatcttttagcaactgcctactcaacatcaccacttccacttggagtctaacagacatttcaaacttaacatgtgttaagactcctggtttcaatctccagctcctgctcctttcccagtcttccccagtgaagcaattagcaccgtgatctaaccagtaacttcaggacaaaaatcaagggaccaacctggattcctcccatcggtcccacccttcatacccaacccatcagcaaatcttttatgtctatctccaaaatctatctgaaatctacttctggttctttccacc

SEQ ID NO: 594961 - DNA, 538 bp, Homo sapiens
tttgatacggattatattaaaccactttcttggcctctaagactctgtgctctccaggttctctcctatttcattagctgccttctttcagtcttctctgctggatcttctttcttgtcccaaattcttcatgttggtgagccccaggattctctctgcattctctccgtcgatgacctcatccaatcctctggctgtasattccatctatctgttgatggcccaacatgtttctatgagtttcatgatcttttagcaactgcctactcaacatcaccacttccacttggagtctaacagacatttcaaacttaacatgtgttaagactcctggtttcaatctccagctcctgctcctttcccagtcttccccagtgaagcaattagcaccgtgatctaaccagtaacttcaggacaaaaatcaagggaccaacctggattcctcccatcggtcccacccttcatacccaacccatcagcaaatcttttatgtctatctccaaaatctatctgaaatctacttctggttctttccacc

SEQ ID NO: 594962 - DNA, 524 bp, Homo sapiens
tagcatgttggggcctttgcatttgctgttccctctgcaagaaatactgctctcccagatagccacacggctctctcctacactttattcaagtatctgttccaatgttactccctcaaagaccttccctgaccacatcccccttctttcattctctatcccttaaccctattttatttttattcaatgcacatatcgttacctgacactatactatattaaggctttatttgtttgttgtgccaactcckcaagaattgaaacaccaggaggcagagcctttgtgttgttcatgactgtatccctagtacctagcattttgcttggtatacagtgggtgctcaataaatacttgttgaatgtcttggttaaacctacattatttggaaaatatttaaatatttatatcaacatctttctgcccaggaacatagtgtatttttccattttctcaaactttaataaatatatcttaataaaattttgttcttttctttgactatttgaaagacattatgcattaa

SEQ ID NO: 594963 - DNA, 573 bp, Homo sapiens
atgcattctattggagaaagggtattagagctctgataattgctcctacataacttaatatttacattgttatgaaaatgaagtgcaaattgtacagtaaaatckgcatctgcaattttatccactcaagagcatttggttagagtaaatccataacattacaaacactatatacattgtaggtgcattataggtaattgttgactgaatgataagctcacattcttgaaagggaagttgcatataagtgacctcagcttcttcaaaacttcaaaaatgattctaaaaattcgattgaagtcattagatgggaagattcaactttacccatttattttattatttattagtaagctgcttttttttttttgtttgtttgtttgttttgagacgggagtctcaatctgttgccaggctggagtgcagaggtgtgatcttggttcactgcaacctccgccccctgggttcaagcgattctactgcctcagtctccaacaagtagctgagatgataggcacccgccaccacacctaatttttatatttttagcagagatgaggtttcaccatgttg

SEQ ID NO: 594964 - DNA, 651 bp, Homo sapiens
ttgagtctgcagctttcattcatttagctcatttacatttaactgaaacacatttaaaaattcattttttccttttgcaaaagctaggcatgcctactataaaagtttgcaacttttcaaagcatgaaatatgtagagttgataccctcatttattatattttactaattcctgtagagatgagcaacaaaattgtcctttatgaaagctgtcattctctaaaattcgatatagtaggaaagttggtgtgtaaccttatttaacaaggcttgcaactgataacttttgttgagacaggcatgggggcccttcttttggtgttgacataatatctttttgtctttcttattcatcaaggttagtagaaagttgtcaagtttctattcttaagctctagaaytatcctggtctttatctatgaaagaagcataaactttgtcaaaggaatgatttactcataataagtcaatgtgaagcccattcataactatacctttttgttttgcttttctcatttctctgagtcattacttaaagctggtgctttataatttgacttaatcacatatggtgtgattcttttagcacacatactgttgtttttaaatcattacattttaaacttctttatatctagaatttttacactgc

SEQ ID NO: 594965 - DNA, 651 bp, Homo sapiens
ttgagtctgcagctttcattcatttagctcatttacatttaactgaaacacatttaaaaattcattttttccttttgcaaaagctaggcatgcctactataaaagtttgcaacttttcaaagcatgaaatatgtagagttgataccctcatttattatattttactaattcctgtagagatgagcaacaaaattgtcctttatgaaagctgtcattctctaaaattcgatatagtaggaaagttggtgtgtaaccttatttaacaaggcttgcaactgataacttttgttgagacaggcatgggggcccttcttttggtgttgacataatatctttttgtctttcttattcatcaaggttagtagaaagttgtcaagtttctattcttaagctctagaactatcctggtctttatctatgaaagaagcataaactttgtcaaaggaatgatttactcataataagtcaatgtraagcccattcataactatacctttttgttttgcttttctcatttctctgagtcattacttaaagctggtgctttataatttgacttaatcacatatggtgtgattcttttagcacacatactgttgtttttaaatcattacattttaaacttctttatatctagaatttttacactgc

SEQ ID NO: 594966 - DNA, 649 bp, Homo sapiens
gcagctggtgactttaatttgaaaccattgctcacctaccattccgaaaatcctagggcccttaagaattatgtgaaatctattctatctgtgctcaataaatggaacaacaaagcctggatgacagcacacctgtttgcagcatgatttaatgaatattttaagctcaatgttgagacctactgctcagaaaaaaagattcttttcaaaatattactgctattgacaatgtactggtcaaccaagagctctgatggagagtaatgctattttcatgcctactaactcagtatccattcttcagcccatggatcgagatgatatyttgattttcaagtcttattatttaagaaatgtttcataaagctatagctgctaaagatagtaattcctttgatggatttgggcaaagtaagttgaaaagcttctggaaatgattcactgctctagatgctattaagagcattcttgattaatggcaggaggtcaaaatagtgacatttacaggagtttggaagaagttgattcctaccctcatggatcattttgcggggttcaagagttcagtgaaggaaataactacagctgtggtggaaatggcaagagaagtagaattagaagtggagcctgaggatgggaatgaattgct

SEQ ID NO: 594967 - DNA, 337 bp, Homo sapiens
gggcagtggtaaacattctgttgcattttgtgttctggacaaatagctttctgattttgatcttataaggttgcaatgaattttttatgcatatcttttactgtaacaaatgattgtgttttgttaggataggtttctctgtgtatgtgctggatcaaaggttatayattgcgaggtggctttccagaaaggctgtcccaatgtctactcctatagcatatgagaacactcatctcgccatactctgattagccttgaattttataatttttatatctttgttaatttgagcattttatgcatcagtgattacttgtaagaattttttgttatattt

SEQ ID NO: 594968 - DNA, 337 bp, Homo sapiens
gggcagtggtaaacattctgttgcattttgtgttctggacaaatagctttctgattttgatcttataaggttgcaatgaattttttatgcatatcttttactgtaacaaatgattgtgttttgttaggataggtttctctgtgtatgtgctggatcaaaggttatacattgcgaggtggctttccagaaaggctgtcccaatgtctactcctatagcatatgagaacactcatctcgccayactctgattagccttgaattttataatttttatatctttgttaatttgagcattttatgcatcagtgattacttgtaagaattttttgttatattt

SEQ ID NO: 594969 - DNA, 539 bp, Homo sapiens
ttgccaccactctgtattcctgttttaacgtgacaaaacttacaaaggatacactcagacaaaatgaggaaatcgccccaagaagaaaacaaataaaccaaaccaaaacaaacaaacaaaaaaggcaaaaacaaacgaataacacaaaacttccatgagatccaagcaacagggattctaaactaggagcaaagcaaatacccagcatgatggctgtgcagcaggcctagaaagcatgtctccagaagagaggtcaccaaggaccaaggaacaatattagaagtgatagcctgctgaatgtgactggctttgtggaaaattgtactgtcaggtcactggaaaatgtgggagggattagcaataggtgcaaagaaaactaggcatataaaaataaggcaatyattaatttcaggtaaaacaaacacataggaaacaaaattacagtaaacctcagtttttagctggtaataatgtttggacaagcaaaataatgtcaacactgtatatgtatttacctaaaattcaatggcgaagcaggg

SEQ ID NO: 594970 - DNA, 544 bp, Homo sapiens
atataagtaaaaaaatatggattttggattaaggtagacaaagctccattgctcactagccatgagcgcttgggcaaggattgtcttcatcatccctaaactttgcctgatacacaggttttccatcatctgactctggctcacctccccaggaggcatctccccacttcacacttcatatgttatttatctataaaaatgaaccaattattaatcctctgagtggtcactgcctctgtcgcatccagacctctacattttacttttttttaccttaaatatcctcctgctcctttcctccagcctccactaattttctccatcccacctagttaacttctactgaccatccagacctgggtgcaaacactttccaaaaccatggtaccttccccaaggcatcccatagtttcccctaccatggctattggtgtttcattgytgctatcataaataaccacaaactttgtggtaaaaaacaacacaagtttattatcttacagttttgtcagtgatcaacacgggtctccactagactaaaatc

SEQ ID NO: 594971 - DNA, 607 bp, Homo sapiens
gtaaatagataatgaacatgaaggcacattaatctctcagcaggtttttatgttcactgatgaagtaaggtcacatattatttttcatctacatgtacagctccctgtatttagaggtagttaaggttgagtatgtggttttttagaagacactgaatggagtggtgtattttcgaccggttgaattttgtattttttactctcaaacatttccccacctttttttcacaggagaaccctgctctccttggacaattaaatcctgaagtgatccagggcaatggagatttactttaacatgatctgattgttgagatgtgtgtattttaaggtcaactcttggattccctcagtttctctcaataaccaactcatacatagattgtttgaaccatggagctcagagtcatgaccctctagtctgcaagttagaattcccacttratcatatgagttgtctcttcttggcttcatgagaaagtcttggttagattagtacagaaactgtgtgaaggttgaggtttaatggagaaaaatggcgtatgtagatgggtttgcctccatctaaccctctctatggatgctgtaggtgtgtttcctgggagct

SEQ ID NO: 594972 - DNA, 607 bp, Homo sapiens
gtaaatagataatgaacatgaaggcacattaatctctcagcaggtttttatgttcactgatgaagtaaggtcacatattatttttcatctacatgtacagctccctgtatttagaggtagttaaggttgagtatgtggttttttagaagacactgaatggagtggtgtattttcgaccggttgaattttgtattttttactctcaaacatttccccacctttttttcacaggagaaccctgctctccttggacaattaaatcctgaagtgatccagggcaatggagatttactttaacatgatctgattgttgagatgtgtgtattttaaggtcaactcttggattccctcagtttctctcaataaccaactcatacatagattgtttgaaccatggagctcagagtcatgaccctctagtctgcaagttagaattcccacttgatcatatgagttgtctcttcttggcttcatgagaaagtcttggttagwttagtacagaaactgtgtgaaggttgaggtttaatggagaaaaatggcgtatgtagatgggtttgcctccatctaaccctctctatggatgctgtaggtgtgtttcctgggagct

SEQ ID NO: 594973 - DNA, 541 bp, Homo sapiens
ctcaccactgagtgaaccccaggctttgggtcttcccaaccaaggctttagatattgtcgaatagagggaacagacaagatgcccctgctgtgtcccatttgaatttctaacctatcaaacatgtgagtaaaataacatggctgttttatgacactaagtttgttatgatgatggtaaatggaacagatttaccagttgctcagaacaacttgtactcatctttagcttctccctgtttctcatacccaccttaaatctgttagcaaaccctatgaagtccagctctttctttgaaatacatccaggatcctacgacttcataccatcatatcttttgtctggactattgcagtagcctcttagccttcatgttttcaccttccctcccttattgtctactctcaacacaatagaaagagtmcttctctaaaagtataaatcagttatgtcacttcaatgctcaaaactgtccaatggcttcctttatgatatagattaaaagcttaagtccttaatggcctagaaggcccttcatcctct

SEQ ID NO: 594974 - DNA, 496 bp, Homo sapiens
gggggagtggggagggatagcattaggagatatacctaatgtaaatgacgacttaatgtgtgcagcacaccaacatggcacatgtatacatatgtaacaaacctgcacattgtgcacatgtaccctagaacttaaagtatattaaaaaaataaataaaaatacattccagagactaaaaaaaaaaagttaataattttactccttcatcaaaggcattcttaagtgaaactggtatgtattttttctcatgacagtatatgatggggatgaaaacaatgactattagttcaacttggtgctactgctttgatttgtacaaagacaccaggagttgtcccaccattgcttttgtaccatcaatgccagtattgacagagtaaaaatgacaaatttcttagcattctaataaaaatagttttgacctcaaataccccttgagattgttttggaaatacccaggggtttatwgactccacttagaaaactgcttcccta

SEQ ID NO: 594975 - DNA, 473 bp, Homo sapiens
gtctgaaaccatttccactgctatcctaattgctatcctaattacttcacatcacgacatatgcgctcagtgcctactctctatagaaagttgatggaagaataaaagctcatgaacacacaatctagagattaaggtgtatacacattattttacaaaagctaaggtttttttttctgataaaactaatacatgtctttgtttacagaacaataccaatgaatacatatgtgtataaagtacaaatttcaagtcccaccagaacaaaccattttggcctaacatcatgattttttgtgcgtttgtgtatgtttktgtttgtcttatttctatgcctgtataaatgtgtttgtgtgtgtgtgtgtactcagatatatgcgtgtgtgtgtgtatgcaaatgtaatcaagttatacattttgtttaggaactgcttatgtgatttattatggacatgttcccatgttgttctagt

SEQ ID NO: 594976 - DNA, 594 bp, Homo sapiens
ggtgttaataaaaaaagtgacaagattatacttaattatccttctgaaactagcagcctgagggccaaatggactcagctgaacagccagcgactgatgaaagccattcttcaataaattcaatacaattaggttcccccagagtggcacccttgcttgccacacacaccaggctaacactgattayggggcaatatttgagtatacgtggtatgtggctgtgtatttcttttgggtaaattttattgtggtaaaagcacttaccatgagatatactctctcaacagatttttaagtgtaggatacattattgttgagtataggtacaatgttatatgtcagatttctgaatttctagatcttattcatcttgcttatctgaaactttatgcctgcagattagtaactcttcattttcccctctgtaaactcctggcaaccaccattctaccctttgattccattgatttgactattttagatacctcatgtaagtgaaatcatgtaatattggttcgtctttgtgtgactagcttatttcacttagcataatgtcctcaagttcatccacgttgttgcatattgcaggatttc

SEQ ID NO: 594977 - DNA, 603 bp, Homo sapiens
tcctgaccaggttcctcttctatctgaaatctacttttaaaattttcttttctcccactctttttatctattgcttgttttccttcttttacacctttggcttgtgtcttctacctgccaagtactgcacagatgcctttaactcccttcacaagctcgttctccccaccctacctggcaccccacacctgactggggtaggggatgggaagaaatcaggactacactttcattgacttcacactaatacctaatttgtaaatcacaagatttgactaatgcaagctgctgtgctcttaccattttgctgcttgagataagagagsgtcagagagctagaggggatctgagagagacttcagcagcctcctcttagaacaacgaaaggataattagacaatctctcagtttcgggtcattctttctccctctccctacaacctacacaaagtcctcgtccaagaaagtaatcaggtctttacaagaagtaatttcaaagcttctgtgggttctttgtgtagctaggtgaacagccattaagaggtacatggatcggcaaagaggtctattcctcaccctggtcaggccaagggggcacagtgt

SEQ ID NO: 594978 - DNA, 603 bp, Homo sapiens
tcctgaccaggttcctcttctatctgaaatctacttttaaaattttcttttctcccactctttttatctattgcttgttttccttcttttacacctttggcttgtgtcttctacctgccaagtactgcacagatgcctttaactcccttcacaagctcgttctccccaccctacctggcaccccacacctgactggggtaggggatgggaagaaatcaggactacactttcattgacttcacactaatacctaatttgtaaatcacaagatttgactaatgcaagctgctgtgctcttaccattttgctgcttgagataagagagcstcagagagctagaggggatctgagagagacttcagcagcctcctcttagaacaacgaaaggataattagacaatctctcagtttcgggtcattctttctccctctccctacaacctacacaaagtcctcgtccaagaaagtaatcaggtctttacaagaagtaatttcaaagcttctgtgggttctttgtgtagctaggtgaacagccattaagaggtacatggatcggcaaagaggtctattcctcaccctggtcaggccaagggggcacagtgt

SEQ ID NO: 594979 - DNA, 607 bp, Homo sapiens
gggttgttttcttgctattgagttgttttaagttccttatatattttggatattaccccttacagaatatagtttgcaaatattttctcctattccctaggttatctctttgctctgtagattgtttcctttgctgcacagaagcattttagtttggtataatcccagttgtttatttttgcttttgttgcctgtgcttttaaggtcatggccaaaaaattgttgcccagaccaatgtcatggagactttccctgatgttttcttctagtattttcacagatcccagttttacatttaagtctttaatccattttgcctttatttttgtatatggtaagagataaaggtctaatttcattactttgtttgtggatattcagctttctcaacaccaattattgaaaacactgttctttcctcacagtgtcttccaggcrtctttattgataatcaactggctgttaatgtgtggattcatttttaagctctttgttctgtttcattggtctacatgtctgtttttatgccaataccatgctgtttgggttactacagctttgtagtatatttcaaagtcaggtagtgtgatgcctccaggattattct

SEQ ID NO: 594980 - DNA, 602 bp, Homo sapiens
cccgcgccaagcctgtatgatcttaattcatttatttctctctgtgtgtttgcttccatgtctgtcttctttttttatttcgcttacttctattttcaaatttttcctatgagcacatactactgtataaccttttttataatttttatttttatttttagctgttttttaagagatggggtctcaccatgttgaccaaactggtctcaaactcctggcctcaagtgatcctcccatctcagcttcccaaagtgctgggattacaggcgtgagccaccatgcctggccctattgtataatcttttaaagcatttttcagttactttaaatttccaaaaagtaaaaagttggattctatattgttgttttttttwaaaaaaaaaagaagttgtggaaacaccgacaaaagtactatgcactgtccaccagagaaaagaaggaagctgtatcccctgagtgggcatttcactgctgtgagctaagaagactgtcctctaaaatacctcagccatggcattcactctggcaatgcccaagcatatcactgccttctgagaacaagacaaaagaaaccaacatttcctggctctcggtgttccaca

SEQ ID NO: 594981 - DNA, 542 bp, Homo sapiens
agccacactggccttctttctgtcccatcaccacatctctggtcccttctgccagaaaggcttccctgtggatgttgggtggacggcctccttcccattgcttggacctccactgaaatatcacttcttccacagggtcttccatgacagagcagacagagcagtatcctctccactcccaacccctggccactccctagcccattgccctacttcatcttcagagcatttgtcagtccttgaagtaatttgtttgaattattactgcattgtccctcttcctcaacacagaactcaagatgctcaagggagaagacaccatctagttccattcagcatccctgtatttttttttaataaaaacagctttattaaaacattggctagatgtggaggctcatgcctgtaatctcagcactttgggaggccaaaacaggtggatcacttgaggtcaggagttcaagaccagcctggycaatatggtgaaaccctgtctctactaaaaatacaaaaattagctgggcgtggtggtgcaagcctgt

SEQ ID NO: 594982 - DNA, 526 bp, Homo sapiens
aaaagcctaaatgttagtttaaccaagtgccttccatgtctgtttttcagaaagagaagaaaacaaaaacaaaatctgtctgggaaatatgtgatcaggaggaacacattctgtttctaagggggaaaaaaaatctaactgttcaacgtttatctgacgatttccaatayatttctttagaaaatgttagcattaatggcctgccaaaaaatgctcaacttagaacttctaaaaaataacatttgattgatgattcaaaaaatttaaagatacttctgagttcagtgacctaacttactggcttcatgagtatcccttcatttatttattttaaatcaagtattccctgaacttctattgtgcatcaggttagactgtcattatataatgcaattgagccatgaccccttgtctaagaaggcaatttggttgcttttatttcaccagggagagttctagaaggccctccatgatatggctactcggttgcttttatttcaccagtgtgttctagatgcctgacaat

SEQ ID NO: 594983 - DNA, 523 bp, Homo sapiens
gtctcaaaaaaaaaaaaaaatgaaaagaaaagaaaaaaattgggtaaagaaagactggaaagtgttctgtgtaaaagaaactctagaaattagagtttatgaggtgaagaaaggcaaggaagattcttcatgtggcacaacaacacggaggtgtgagctagtgttgtgtgggtgagaaaatgcatgccagtacattagactggraagtcaaaaggaagcagagtatcaacaaatggtgccagtgcaggtgaggagccttgggtgtaaggggatccatgagggggactcggcatttacatgcatccctgctctgctaagtggaggtggagttgaagtgggcattggaggcagtggtctcgctcaggaggctgtggcagcagatcaaacgtgatatattgaactggatatccaaccttaggattatggtcatgggatggagaaaacaggcatagatttgagatacaattgtcagggctgaatatttgtttttaatatggaggatgaacatcttatttatactcca

SEQ ID NO: 594984 - DNA, 523 bp, Homo sapiens
gtctcaaaaaaaaaaaaaaatgaaaagaaaagaaaaaaattgggtaaagaaagactggaaagtgttctgtgtaaaagaaactctagaaattagagtttatgaggtgaagaaaggcaaggaagattcttcatgtggcacaacracacggaggtgtgagctagtgttgtgtgggtgagaaaatgcatgccagtacattagactgggaagtcaaaaggaagcagagtatcaacaaatggtgccagtgcaggtgaggagccttgggtgtaaggggatccatgagggggactcggcatttacatgcatccctgctctgctaagtggaggtggagttgaagtgggcattggaggcagtggtctcgctcaggaggctgtggcagcagatcaaacgtgatatattgaactggatatccaaccttaggattatggtcatgggatggagaaaacaggcatagatttgagatacaattgtcagggctgaatatttgtttttaatatggaggatgaacatcttatttatactcca

SEQ ID NO: 594985 - DNA, 523 bp, Homo sapiens
gtggggtgcagtttcctctaccctcagaagaagtctgaggacaggaaggctcagaaacgagggataaagattttttggtctgcattttactcacctttcctcgttccccaaacaggctaccaaaatgatgcaggatttttttttttttgcttctcagctcagctaaaatctgagttcctgtctcatgaccaggaaaaattaggcacacagacaaattgaaagttgaggagagtagaattyattaaaagaaagctctcagcaaagaaagggggtcctgccaacaggctctcacctcacatattgaatatcagaccaccacacaggagctgaagaggacaggcttctccctgcataaagagtgaattcctggtgtctccaccctgttctcccagtgtacatacaggtgggtccttagtctgagccattccacattgatttatttcccttactgcatatgtgttaggaaatgaaatttttcaccttgggtatgtttaagcaagcctcctgtgcacagtgccctggt

SEQ ID NO: 594986 - DNA, 562 bp, Homo sapiens
taaaggcttgccctggtctcatgggaattggaggatgaggggtagatattggtagacactcattttagtgaaggtaaattagcagttatggatagatgacagtgttgattcaaaagcgagggggcatggttcagtggctacaagaaggtgctctgacttatgatggggcttatgtcctgataaacccatctttaagttaagttgaagatgtcataagtagaaaatacatttaacatacttaacctgcttaacatcatacgttcgcctagcctgccttaaatctgcttagaacacttgcattagcctataattgggcaaaaccatctaacacaaagcctgttttataataaaagtgttgaatgtttcatgtaatttactgaatactgacagtgaaaaatagaatgatkgtgtagttacttgaagtgctgtttctactgaatgtgtatcgatcttgcaccattacaaagtttagaaactgttaagtcaaaccatgtaagttggggactatttgcatacctaaggttcagattccaggaaaagattgggtggcagcaatgagagg

SEQ ID NO: 594987 - DNA, 306 bp, Homo sapiens
ggagagaaaactctgcccccatgaaagtccccattctgtttcagttggggaatactggggcttaatctcttggagggggttgttccataccaagggtccttccataggtatttctaatgggagcttctgcctggcagcarttttggcctcagcatctgcccagcggtttccttctgccttttctccttcacctttctgatggctttggcagtgtaagactgccacctccttgggtttttgcattgcatgcaataactccgtaatttccttgtggtatttaatgggggttccccagaggttaggaac

SEQ ID NO: 594988 - DNA, 600 bp, Homo sapiens
agtcaattgttgtggttataataaatgaatgttcaattaaatcacttctgcaactagagtaaaacatgtaattaaagcatttcatatttcaagtcagattcagaacttagatcctagattacagaattgttattgayggaagaaacattaacactcaactcattcttgtgttttcattgagtagactaagttcctgaaaatgttccttttgaaatcatgtgtgagctttgaattgccaactccaaggacattttccgactttcctctgcttgattttttcagctgaacctgaccttcttgacattctcacatttgacttgtcctgactgcttcttctgagtttcctttcttaatcttccttttccatttctctctttccctatcagggacttgtatgctagtatttccccaaatttccacttttaaccccccgccttttatagccacataatattatggttaaagatagctatttgtattactttggttataaccaatgcccatttataacaaagaaaacaaagtctctgttttttgttttttgtttttttaaattttctcctcttgaaatatatgacagttcattgaccttgactggca

SEQ ID NO: 594989 - DNA, 535 bp, Homo sapiens
tccatgtaacattttttaaaacctatatttttctatcagatttatttaaatttttacatttcattttctataaaaagctgagcatttctcatccaaatatttgaaatcccaaatgttccaaaatctgaaactttactgaaacgtgaaacactactatcataccacaagtataaaattctacacataagtacctagcataaactctacctcattaaacaaataatttaaaatattgtatagaattaccttcagsctatatgtttaaggtgtatatgaaacataaataaattttgtgcttagagttgggtctcgtaatcaaactatctccttatgtatatacaaattttccaaaatcttaaaaaaaaacaaaacaaaacccaaacacttcttgtcccaagcattttgaataacaggtattcaacctgtataagcaataactattatttattttttattagttattaataactattattatttattgtagaaatgcaaatactaaatgatcaaattactgatcatttaaacaagacca

SEQ ID NO: 594990 - DNA, 535 bp, Homo sapiens
tccatgtaacattttttaaaacctatatttttctatcagatttatttaaatttttacatttcattttctataaaaagctgagcatttctcatccaaatatttgaaatcccaaatgttccaaaatctgaaactttactgaaacgtgaaacactactatcataccacaagtataaaattctacacataagtacctagcataaactctacctcattaaacaaataatttaaaatattgtatagaattaccttcagcctatatgtttaaggtgtatatgaaacataaataaattttgtgcttagagttgggtctcgtaatcaaactatctccttatgtatatacaaattttccaaaatcttaaaaaaaaamaaaacaaaacccaaacacttcttgtcccaagcattttgaataacaggtattcaacctgtataagcaataactattatttattttttattagttattaataactattattatttattgtagaaatgcaaatactaaatgatcaaattactgatcatttaaacaagacca

SEQ ID NO: 594991 - DNA, 535 bp, Homo sapiens
tccatgtaacattttttaaaacctatatttttctatcagatttatttaaatttttacatttcattttctataaaaagctgagcatttctcatccaaatatttgaaatcccaaatgttccaaaatctgaaactttactgaaacgtgaaacactactatcataccacaagtataaaattctacacataagtacctagcataaactctacctcattaaacaaataatttaaaatattgtatagaattaccttcagcctatatgtttaaggtgtatatgaaacataaataaattttgtgcttagagttgggtctcgtaatcaaactatctccttatgtatatacaaattttccaaaatcttaaaaaaaaacaaaacaaaacccaaacacttcttgtcccargcattttgaataacaggtattcaacctgtataagcaataactattatttattttttattagttattaataactattattatttattgtagaaatgcaaatactaaatgatcaaattactgatcatttaaacaagacca

SEQ ID NO: 594992 - DNA, 525 bp, Homo sapiens
agaattccatttaatcatacaagattgatcagacacaataattgtggcagacaataggggaatatatataatggataattataaagctatttaaacaaaaatttagcaagaattgactccaaaaaaaaaacttattactagaaataaaacaatttcagtacacaggtgactgagctgtgaacaatgtttaygtagttaaaataacataaacgctaaatatttgcgaaggcaaaaaatatagtataactatattagaagtgtgagagaagtctacatttttaacatagtaatagagactgtcaagtttttatattttctaaagaaaatcaatagataatatttaaatttaaaaataaaaaagcatcagaaaaactatgtcacctagaaagaggaatttaaaattttaagagtcagataaaaataaaaagagtcagataaagaaaagaaaaaccaagagtcagataaaaatataaaatatatttaactctgaaaataggtatctgctgaggattgaggcagaagaca

SEQ ID NO: 594993 - DNA, 525 bp, Homo sapiens
agaattccatttaatcatacaagattgatcagacacaataattgtggcagacaataggggaatatatataatggataattataaagctatttaaacaaaaatttagcaagaattgactccaaaaaaaaaacttattactagaaataaaacaatttcagtacacaggtgactgagctgtgaacaatgtttatgtagttaaaataacataaacgctaaatatttgygaaggcaaaaaatatagtataactatattagaagtgtgagagaagtctacatttttaacatagtaatagagactgtcaagtttttatattttctaaagaaaatcaatagataatatttaaatttaaaaataaaaaagcatcagaaaaactatgtcacctagaaagaggaatttaaaattttaagagtcagataaaaataaaaagagtcagataaagaaaagaaaaaccaagagtcagataaaaatataaaatatatttaactctgaaaataggtatctgctgaggattgaggcagaagaca

SEQ ID NO: 594994 - DNA, 482 bp, Homo sapiens
ggaaaaatcatttttatttctgtctctctggtggttgctggcattcactggcttgtagacaaataaccccaatctccgccttcatgttcacatggcattctccctttgtgcatgtctgtctctgtgtctaatgcttttccctttcaagagcacattagtcatattgaattatgacccactccaatgaccttattttaatgtttgcttatttgcatgtttactacttcataaaaattctgtctccaaataaggttattttctgaggtaatggaatttaggactccaatccatgtttttttggggagcacaagtcaacccatactattgcctttctacactacagaacatgagtctttatctttgggaagggcaagagcaaytgctgtccttagagcactggcaaaaattcactacatttggaaagggaataggaggagaaaacatcctattcctgctgaggggcaacattatgtgctgaacct

SEQ ID NO: 594995 - DNA, 576 bp, Homo sapiens
tgtacagattatttcatcacccagatattaagtctagtacctattagttattttcctaattttctgtctccttccattctccaccctccaataggcccagtgtgtgttgttcccttatttgtgtccatttgttcttatcatttagcttccacttataartgataacatgcagtctttggttgtctgtttatgcattagtttgctaagaataatggcctccagctccatccatgtctctgaaaaggacatattcttgttcttttttatggcttcatagtattccatggaatatatgtaccaaatgttcttttcccagtttatcattgatggacatttaggttgattctatgtctttgctattgtgaataatgcctccagaaacatatgtatgcatatgtctttataatagaatgatttttattccattggatgtatagccagtaatgggattcctggaccgaatggcatttctgcctttaggcctttgaagaatcaagacactatccttcaaaatgttttaactaatttacactcccaccaacggtgtaaaagtgttcccttttttccccaaatctc

SEQ ID NO: 594996 - DNA, 575 bp, Homo sapiens
tttagcaaatattatgcatatattttacacatggaatattaataactagaatttttttgtatgtcaagttttcacaaaaagaacacaatggatcatgagatccaattctgtatactgaatgctgtaaatgtatagattagtatcttaaattaattctgttttttcgccttacggatrtgcatacacttgttcctatgtatttacaatttttttatcatttgagtcaatgcttaaaagagtaagagttagctaattagacgaatgcaattctggaaagcagacactataagagttcaaacttattaatgaaagaaaatgtagaattcagttttaaatattacagccatgtaaaaatatgtgttaaatagaaacatgcaagcttgtggttttgttatattgtcaccttagaaaatcccatttagcaaaatgtatttattaagtagtaattctaaaaataattgcattaaatattatctcatgaagaattcataagacctagttaacattcttgtttttgaaaggcaagttttttcatgctggtttataatgattttgcaaaatagaaataataaact

SEQ ID NO: 594997 - DNA, 575 bp, Homo sapiens
tttagcaaatattatgcatatattttacacatggaatattaataactagaatttttttgtatgtcaagttttcacaaaaagaacacaatggatcatgagatccaattctgtatactgaatgctgtaaatgtatagattagtatcttaaattaattctgttttttcgccttacggatatgcatacacttgttcctatgtatttacaatttttttatcatttgagtcaatgcttaaaagagtaagagttagctaattagacgaatgcaattctggaaagcagacactataagagttcaaacttattaatgaaagaaaatgtagaattcagttttaaatattacagccatgtaaaaatatgtgttaaatagaaacatgcaagcttgtggttttgttatattgtcaccttagaaaatcccatttagcaaaatgtatttattaagtagtaattctaaaaataattgmattaaatattatctcatgaagaattcataagacctagttaacattcttgtttttgaaaggcaagttttttcatgctggtttataatgattttgcaaaatagaaataataaact

SEQ ID NO: 594998 - DNA, 566 bp, Homo sapiens
ctcaaaagcaggaattatcaatttatattcaggtctgataagtgcatatcttagcaatagtcattaacaggaggattttattatgatggaaaatccctgccacattaacaaatctgttcttagtcagacaatgtggttactttctagaatgaataatggactttgggttagtcttgttgttgtagtcacagcatacacagtgtgagggcagaaagtcagtattctcattaagaggtgaaaatgtagccatgttcagtcattatgcatgaggggtcactgcttattaagactcatagcaacccttatgatgmtagttttcaacttattgactcatcatagccggacgttatggctttctttctctcaaatgagacctgatttttctatttcattacagaaatttcagattggatagttgaacttcttggcttagtatcagtacgctccttctcagaactgacattcctcaaaccacctcctttttaatgcttaagaactatagacatgatgatagaatgttcattgaaagtgttaaattcagtaaagtgtattcattatggcacaaa

SEQ ID NO: 594999 - DNA, 572 bp, Homo sapiens
tattattagattggtgtttcataatttctttctgtcttaagagagcaatattttagttatttaaactttccagactataaataaatactgtattttttgtaattgtatctaataaacctagagtgacctattgcatcatttgattttacttaytatattgtccctgctattctttatcattatttgttcatacattttgctcacacatttgtttagttgtttcctttctccctacttaacaattaagttcaatgttctcttccctgaaaatgcttcttcaaacaatatggtttcagtgaaagttatacatattattacctgtctcaccaattatcatctcctgccctcagtcatcaagataaacacagaatataaaaagggcaagtaaaatactataatctttccctaagctatgccaatttagtgctgatttgctggaaggattatctctctgcttcctctttcttacaacttcagctacttgaatttgttttctattatttacaattagagaaacctgactggtataacatctaacaccctttcaatttcatcaccacttcaatgccaat

SEQ ID NO: 595000 - DNA, 572 bp, Homo sapiens
tattattagattggtgtttcataatttctttctgtcttaagagagcaatattttagttatttaaactttccagactataaataaatactgtattttttgtaattgtatctaataaacctagagtgacctattgcatcatttgattttacttattatattgtccctgctattctttatcattatttgttcatacattttgctcacayatttgtttagttgtttcctttctccctacttaacaattaagttcaatgttctcttccctgaaaatgcttcttcaaacaatatggtttcagtgaaagttatacatattattacctgtctcaccaattatcatctcctgccctcagtcatcaagataaacacagaatataaaaagggcaagtaaaatactataatctttccctaagctatgccaatttagtgctgatttgctggaaggattatctctctgcttcctctttcttacaacttcagctacttgaatttgttttctattatttacaattagagaaacctgactggtataacatctaacaccctttcaatttcatcaccacttcaatgccaat

SEQ ID NO: 595001 - DNA, 588 bp, Homo sapiens
taaagttatttcctgtcaattatctttatttattatgtaatttttatgcatttgtaaagttttggaaatcttttcctaaaataataacattataagttatattgaaactcatgctaatatatttgagtactctctgttgcttaaaataatcatttgaacatgtgggttatgtttgcaaaaacaaacaactcatggaaaatgaagatcctttaaaaatatatcacaaaaataattttctctctccttttttttaatgaagacaagatctgcttttgttggccaggctggtcttgaactcctgggactcaagctatcctccaccttggccttccaaagtgctggaattacaggcatgagccatggcgcccagcccacagaagaaattttattggcttcatttcctctycaaatactaatatcattcaagatattttaagaagtcatttgccatgactccattctgtctactctgtttaaacacatcaacatggtacttttattttctctttttctggcttacctatttaactatcttggcagtttgatatggattttatatctccaagtatcaaacacaccaataatatc

SEQ ID NO: 595002 - DNA, 648 bp, Homo sapiens
caagaaacaacattcctggagatattagaaattatataccttcatctaagagtttggaaagtttataaaatcctgaaaatgtattctccagtcaaaaacacatatgtgtgaagtgacatttgaatttgaacatatcaacaggcgattctgcataggtctctgtgggtgtgcatttctgtgagaagcagcattaacagtctttgtttgaatcctctttgttctagaaccttttcaaaaacttttatacagtaaatgtctttggaaaatagaaataatatctcactccagagaaatggtaggtttatttactatacagtcaaataataataatatctctctctggggcaaaattcaggcaaacttactgcccagggcttaaactctgagttctcctgtgatatcaacccctgagtgtgcaggcatcacttttccctctttaatcactggggctttggaaatcagtgcaaatatcaattctccagctactgcttgtgctaggggtaatatggtttttgtctatagcacaagagtctcatatgttttgttagcatccacaaaactgtggcatgataaattgtaaatktgagattaaggtaaatttttagaccattttgatcttggtgaaatagtcaatgctttattatttgt

SEQ ID NO: 595003 - DNA, 486 bp, Homo sapiens
tttttaggtctacaatagctacacatttttggataatgtccaataactttggatatggaattagaacagatggctatataaacacaataataaattcctagctacctaggcacaaccactaataaatttagcatatattaatataattaatttttagattttaattgagcatagtcatggacaatattttgatcacttaaaattacatagttaattacaaatgcacagtactagctggtatagcttttacatattatcaaacttgtatttaactgccaagcaattataagagatagaatgtgaatagaagatctataaagtkccagatcacaataagaagtagtttcttcagtgtattctgaaattaaacaaatatcctggctaatacttaatattaattgatttttaaagtcatatgatttataaagcaaatcaaaatctatgaacaattaaaaattactattccaaatatttttattgtcataa

SEQ ID NO: 595004 - DNA, 404 bp, Homo sapiens
caaaaacaaagttcaccgtgttgtaggagtatgttgaaacccaatgcaaggaaaataaaaatcatgatacattgcaggagctgacagacaaaatagccagtacagagaagaatgtaactaatctgaaagagctaaaaaacacactacaaaaatttcataattcagtcacaagcattaacagtagaatagaccaagtggaagaaagaatctcagagcttaaagactgcctttctaaaataagacaggcagactagaataaagaatacagaatgaaagaaaatgaataatacattaggwttatgtcaagagacaatatatgactgattggtgtacctgaaaaagatggggaaaacagaaccaacttgaaaaatatatttcaggctatcatccatgagaatgtcccc

SEQ ID NO: 595005 - DNA, 590 bp, Homo sapiens
tttcactctattgcttctattttgtttcctcagtgctagggttttaacataaatctatgttattatgtgtataactagctagttgcttctgatacatactatttcatgrcatgccttgaccacatttaaattattcattcttctaaggatagacaaaagttgtataagtccttgtacatactttcaatggacttatatgaaaatatcttgggctcatttactcaaaatttaattcctgtattaatagttatgtagatttatttaaccacgtggaatcaactgctcttaagaatagctacaccagcaggccaccagcgactctgcatccccataactcacagaactggaattgttctattgataaaagttaatgggatatctaagtattctcactctcctttatcttattcctaatacattacaaaatatcttcatatatttcttagcttatgagctttctcttctgtacattgcctatttgtctccttggttcattttcctgtttggagtgctatcaattgatttatagtcattagtatattttagtaaaatctctacgtgctaaatgttaatccttatcagttttatgc

SEQ ID NO: 595006 - DNA, 536 bp, Homo sapiens
tctacatatctattgtgatgccagtatcatgctgttttgattaatatagctttatgatatattttgaagttagtgtgacatctccagttatgttctttctctcaagattgctttggttattcagtctatcatggtttcatatacatttaggatggcttttactatatcagtagtattttattggtgtattcataggtattgcattgaatctgtagatttgagtagtatagtcattttaataatactcattttataatccatgaatgtgggccatattttcatcattgtgtcttcttccaatcttcaattgatgttttatagttttcagtgtacaggtctttaacctctttggttaaatttattcctatgcattttactagtattttgtttttgatactattgtaaatagaattgttctcttgatttatttctcagatagttcattgttagtgtatygaaaaattactgatgtttatgtgttgagtttgtatcctgcaactttactgaatttattagttctaatagttttttggtag

SEQ ID NO: 595007 - DNA, 607 bp, Homo sapiens
attccacagtgcttgtatcattcctacgttctgatttcagaatgttctttactccaataaagcagatcagtacatggttgtcattttcttcctccatacttacataaagacacttgggtaataaaaaatgatgaatggtttttgtgtagatcatcacccttattaacatgggcaaaaacaatcaatattttattcacaggttaaagtagtagctggttttgagagacccagctttctgttgtatttcatttttctctagtccatagttgaaaactgagtgsgtagtgattttgcttaacagtctatcaatgggaatagagtaactttcaaagtggagaggctgtcgatttttctttcttcctgtaattttccaaatgtgctgtataggaagctaaattttatatttgctgaagtttaataatatagcatagtggctagaaccacaaaaactatgctggttgggtttgtatcttaccagctattgatcttggcaacactcactcttacaatgcctcagtttcttcacctatgataaggcaggtgtgagaaatacaggaattaatagttataaagtggataagatagaacctactatttaaacattagc

SEQ ID NO: 595008 - DNA, 628 bp, Homo sapiens
ctctagataaacattgaacagtttctaggatcgttgcttttgctcttggatcttgaggtgtccttgtacatccactcaacacttgaagtgatgaatggttgtaattttacatgagtaggaagaagttggcatagtttattgcacctagcaagttaccttcacctcttttgacgtttgtgaggaggcggtgagtatggattggacaaggctacttggtgttctcttccttaccttagtccagtagcaatactgggggatttctgatgctcacttccaacaaatttcatcacttggagttcggcctgtgttttgcagtggtgttaaatsagtctcctggcctccagatgttctcctccttctgcataccacagccaacatcatcttttaaaaatgcccaccttcagtagctcccattggatataagctgtctccctggtgtggtacgccagcccttctgccctgcattcccacttcccttccagacttgcctgttttcattctcacatggtccaggcatgtggaattatttattctgcctacacttatggaatatgctctttcttgcctctgggctttttcccttctgacctctttctcattttctggaatactggctgccaccaacccc

SEQ ID NO: 595009 - DNA, 603 bp, Homo sapiens
tccagttccctccaatagcatcaaatctcttaggcagccagcctgtaccttttccaaagggtaaattccttcctagaatcaagctttctatgagttgtaatagatatgtggctagaaactagacaaatgccacttatgatataattagtgcatttcattgttatctttcttcacatattttatagcccccaccgtttttttttcaaaattaacataagaagtttattgccttatgtattcttactttgtactgtctcacagaaaccagtacattaccaacaaattaagaaaaaataatagacattccattccatttttcattattttattgagcaattaacactgwtattcaatgaagaaagccaaaatgcaatctggtttgcataaatatttcaacagagtgggacagaagaaaagtcagatcccacatcatgagtgtccccagttcattgtgaaatacacccacacagatgaagacatattcttcgtctatggtgtccccatggacttccagacatatggactagctaaaaacttttggaagccaatcaaatctcaagtctcaaagctgtactctacttgcattggctttctctgtctgca

SEQ ID NO: 595010 - DNA, 603 bp, Homo sapiens
tccagttccctccaatagcatcaaatctcttaggcagccagcctgtaccttttccaaagggtaaattccttcctagaatcaagctttctatgagttgtaatagatatgtggctagaaactagacaaatgccacttatgatataattagtgcatttcattgttatctttcttcacatattttatagcccccaccgtttttttttcaaaattaacataagaagtttattgccttatgtattcttactttgtactgtctcacagaaaccagtacattaccaacaaattaagaaaaaataatagacattccattccatttttcattattttattgagcaattaacactgttattcaatgaagaaagccaaaatgcaatctggtttgcataaatatttcaacagagtgggacagaagaaaagtcagatcccacatcatgagtgtycccagttcattgtgaaatacacccacacagatgaagacatattcttcgtctatggtgtccccatggacttccagacatatggactagctaaaaacttttggaagccaatcaaatctcaagtctcaaagctgtactctacttgcattggctttctctgtctgca

SEQ ID NO: 595011 - DNA, 579 bp, Homo sapiens
  misc_feature 1: n = A,T,C or G
nggctatgggctggtacattgggtcaggtgtgcaaggtgtgcaactatgggctgctactcacattgggtcaggtgtgcaacgtgtgcagttgtgggctggtaytcacatggggtcagatgtgcaatgcatgcagctatgggttggtactcacattaggtcaggtatgtgaggcttgcagctttaggctagtactcacattgggtcaggtgtgtgaggcatgcagctataggctggtactcacattgggccaggtgtacaaggcatgcagctatgggctggcactcacattgggtcaggtgtgcaaggcatgcagctatgggctgctactcacattgggtcaggtgtgcaacgtgtgaagttgtgggctgctactcacattgggtcaggtgtgcaatgtgtgcagctatgggctggtactcacattacatcaggtatgtgaggcatgcagctatgggctgctactcacattgggccaggtgtgcaagaagactcatgcatctctagtgccttttgttcccttggtgacttaatgttctcattttgtgatgttattttgtatagaattaaaatcaaacatt

SEQ ID NO: 595012 - DNA, 648 bp, Homo sapiens
tcccccagtgaggtcacaaatgagctgatgtgaaccctcagctggacagcaaaaccacacctgcagaatatgggtcagtctcttaaatgaaagagactggggccaaaaagatcattgcaagaattcacaatcagtaacacaaccagagagcaaatactgcaggaagaagacatccctgccgaatccagcatggacagcccacagcctggaccgccagacagtcctggtgcaaccaacagactccaaaacccagccccttccttgtggaaaagcaatacccacaggacagagctctcttggcttgggggaaaacacagcttcctacagagtttgatgtctaaacaggaaatcagtctcagcagcaggattcgaaggtgtccaccgcgaaagggttgttactgtgcctgtgtttacataaatagtgaaaaagatattttaacagcctggggsgttgtcagccaagtgagccatgttgggactttctgctcctgagggtcagcccttgcctggggaagacagggtgctcaccaacacacccatgtgtgcctgggaacgtgcactcaggaacagaaatgatagtgacaaagcagaggccttgagttggagccaagctagaggaacagacaatgattcttgcaggtccagaag

SEQ ID NO: 595013 - DNA, 648 bp, Homo sapiens
tcccccagtgaggtcacaaatgagctgatgtgaaccctcagctggacagcaaaaccacacctgcagaatatgggtcagtctcttaaatgaaagagactggggccaaaaagatcattgcaagaattcacaatcagtaacacaaccagagagcaaatactgcaggaagaagacatccctgccgaatccagcatggacagcccacagcctggaccgccagacagtcctggtgcaaccaacagactccaaaacccagccccttccttgtggaaaagcaatacccacaggacagagctctcttggcttgggggaaaacacagcttcctacagagtttgatgtctaaacaggaaatcagtctcagcagcaggattcgaaggtgtccaccgcgaaagggttgttactgtgcctgtgtttacataaatagtgaaaaagatattttaacagcctggggcsttgtcagccaagtgagccatgttgggactttctgctcctgagggtcagcccttgcctggggaagacagggtgctcaccaacacacccatgtgtgcctgggaacgtgcactcaggaacagaaatgatagtgacaaagcagaggccttgagttggagccaagctagaggaacagacaatgattcttgcaggtccagaag

SEQ ID NO: 595014 - DNA, 588 bp, Homo sapiens
cattctcctgcctcagcctccccagtagctgggagtacaagcgcccgccaccatgcctggctaatttttttgtatttttaattgagtgttttatattattctattttgtctcctttattagcttgtcagttatacttccttctgtttttacttttcttagtggttgctctgagcttgcaatacacatttacagctactccaagatcattttcaaataacactaaactgctttgtgggtagtggaactaccgttaataacaaaataatactaatttccacctcccattttatgtattattgctgcccatttctcataagcacatataagcctgtgtatgtgtgtgtatgtgtgtatatacacatagttgaatccattgtcactactattttgaataaattgtaacctgttagatcaatttagagtaatagaataagtttttattttaactttatttartcattctctgatgcttctcccttctttatttagatttaagtttcttcctgtattactttccttctctctggaaaacttcttttaacatgtcttgcaagacaggtctactggcaatgaataccctcaatttg

SEQ ID NO: 595015 - DNA, 542 bp, Homo sapiens
tcattggtagtttgataaaaatagtgwtgaatctataaattgctttgagcagcagggctatttagataatattgattctttctatccattagtatggaaagtttttccatttgtgttatctctgatttctttgagcagtgttttgtaattctcactgcagagatctttcacctccctggttagctatatttctaggtactttactctttttgtggcaattgtgaatgggattgcattcctgatttggcttttggcttgtctcttgttggtgtatagaaatgctagtaatttttgttcattgagttcgtgtcctgagactttgctgaagttgtttatcagcggaaggagcttctggatcaagacgatgggatttctagatatagaattatgtcctctgcaaacgtggatagtttgacttcctagttgaatggtgttaatttagtttccttgcctgattgctctggccaggactttcaatagaatgtttactaagggtggtgagggagagcatgtgtcttgtgctagttttcaatgggaattct

SEQ ID NO: 595016 - DNA, 508 bp, Homo sapiens
gcattgtttaaaaatgttaccttttttcctcatgcatttatagtctatatctaggttatttaattaaactatatccatttatttataataatacatattatgtactgcactgtttgcttattttatgcactggagcaaacaatttatatatgtttttctcgatgcattcttacaacaagcctatgaaataagtactattatcctttttttcatagataaggagaatgagatgattatatcactcaccaagggtcakctgggtagtatgggggttgaggagggataagggtgaaagattcaaacacaggtttttctaataccagggctataagccactatgtttctcaaaatctagtgtgcatcagagccaattggaaggcttgttagaacacagaacactcttttctcccccgacttgagcttctgactctgcaggtctgtggcagagcctaagaatctgcacttctaacaagttcccagcagatgatgcttctggcatgaaggccac

SEQ ID NO: 595017 - DNA, 607 bp, Homo sapiens
taaactggcattctggctacatagatcagtctctttgaactctttgtaccttccaccattagtgtgatttctaaggctgcaagccagacactgcccaagacccagcactggactctggtgagttcttccagctgttgccaccccaggagcctctgggagcccctgggaaccatccagcttgctctctgtctctacatttcagggtgtgggtttcagggcattcacaacattcctgcaacagaagagttttgggaacacccccagcaggatgtgggtgatttgaatgtatgtcagagatgtggttgtaactgagaaatcttaagcctagtgaattttattccacttgacttaaagaaagagcacgtgaaagaaggggayctgaggacatctatgaagcagggccccgagggcatgaacttactagtgtttatatgactagtgtttatctgggcctgtctagtctggagaacctgactctggtgtacccaagctttgcagtggctgtagaggttgctcttttggagggagaagataattcattcctccaacacctgaatgagggtagattaacccacctccttcagctgcaatttggcaaatttctctt

SEQ ID NO: 595018 - DNA, 615 bp, Homo sapiens
cttggacctactttaattaaaaaaaaaaaaaaaaaaaaaaagcctggatgtggtgactcacacctgtaattctagcactttgggagaccgaagcaagtggatcacctgaggcctggagtctgagaccagcctgggcaacatggtgaaaccctgtctcaactaaaaatacaaaaattagcctggcattgtggcacatgcctatagtcctagctacttgggaggctgaggcaggagaatcrcttgaacccacaaggtggaggatgcagtgagccaagatcgcaccactgcactccaacctgagtgacagagcgggactctgtttcaaaaacaaaatccctgtctagactctagcaaacaatgttttcattcatgaacttagataacactatatataaaaatacttttagctccctaaaaacatattctgagaatgattatttacaatcataaatctaatgccacattaaatacttcaaatacatttaattcaacaaaaatctagtgagtacctattaagctcaagaatttattctagatatcacagaaatgaacacacaaacctatgtaaaaacccatattaaaattataaaagaaacatctttaagctgaaactga

SEQ ID NO: 595019 - DNA, 615 bp, Homo sapiens
cttggacctactttaattaaaaaaaaaaaaaaaaaaaaaaagcctggatgtggtgactcacacctgtaattctagcactttgggagaccgaagcaagtggatcacctgaggcctggagtctgagaccagcctgggcaacatggtgaaaccctgtctcaactaaaaatacaaaaattagcctggcattgtggcacatgcctatagtcctagctacttgggaggctgaggcaggagaatcacttgaacccacaaggtggaggatgcagtgagccaagatcgcaccactgcactccaacctgagtgacagagcgggactctgtttcaaaaacaaaatccctgtctagactctagcaaacaatgttttcattcatgaacttagataacactatatataaaaatacttttagctccctaaaaacatattctgagaatgattatttacaatcataaatctaatgccacattaaatacttcaaatacatttaattcaacaaaaatctagtgagtacctattaagctcaagaatttattctagatatcacagaaatgaacacayaaacctatgtaaaaacccatattaaaattataaaagaaacatctttaagctgaaactga

SEQ ID NO: 595020 - DNA, 539 bp, Homo sapiens
aactggtcggttgtggtagctcatgcctgtaatcctaacactttgggagaccaagatgggaggatcatttgagccctggagttcaaaaccagcctgggcaacatagtgagaccctatctctgaaaaaaaaaaaaaaaattaagtccaggtrcagtggctcaggcctgtaatcccaacactggaaagccatggcaggtgaatcacttgagctctggagttcaagaccggcctgggcaatgtagcaaaacctatctctaccaaaaacacaaaaaattagccaggcatggtggcatgcacctgtggtcccagctacacaggaagccaaggtgggagaatcacttgagcctggaaggtggaggctacagtgagcagagatggcgctactgcactccaacctgagtaacagaatcagaccccatctcaaacaaaaaaattagctgggcttggcaccgtgcatctgtaccagttagtaccagctacctgggaggctgaggcaggagaatgacttgagcccaggagttctaggctgctgtgagcta

SEQ ID NO: 595021 - DNA, 539 bp, Homo sapiens
aactggtcggttgtggtagctcatgcctgtaatcctaacactttgggagaccaagatgggaggatcatttgagccctggagttcaaaaccagcctgggcaacatagtgagaccctatctctgaaaaaaaaaaaaaaaattaagtccaggtgcagtggctcaggcctgtaatcccaacactggaaagccatggcaggtgaatcacttgagctctggagttcaagaccggcctgggcaatgtagcaaaacctatctctaccaaaaacacaaaaaattagccaggcatggtggcatgcacctgtrgtcccagctacacaggaagccaaggtgggagaatcacttgagcctggaaggtggaggctacagtgagcagagatggcgctactgcactccaacctgagtaacagaatcagaccccatctcaaacaaaaaaattagctgggcttggcaccgtgcatctgtaccagttagtaccagctacctgggaggctgaggcaggagaatgacttgagcccaggagttctaggctgctgtgagcta

SEQ ID NO: 595022 - DNA, 601 bp, Homo sapiens
cttttctgaaagccacgttcagaacattcgtatttgactttggtgctttaccaacgtgagatgttaaatttttgtctgattttctttcttcctgcctacacatgttatttctctggttaaacctgcagagcactctttgttacgtgagtgtttcctgttgaggaaaattctggaagttagaaaatgagtaggccttagttcacttgtgaacycatatcaaggtgagaagaaagtgaagtaactatactaaacttttttcttcactgtcactaaggctactcttccatctctagtaatgctacattgtaaccagtgtctctgcgtcttctgtagaggattgagttgaccacaggttttaattgcattttaaagtgaataagaagttttaggtttgttctgttcgttatgacctgatttgtgtactctgtaaacataggggtgttgtggttgtttgagaaggtattttagtattgagaggttctgattaggcccctttgcgagtaaagcttagttaccttgttatatcaggcaagcaatttttttttttttttttttttttttgaggcagggtctcgttctgtcgcccatgctggagtgcagt

SEQ ID NO: 595023 - DNA, 400 bp, Homo sapiens
catattagctttgtcctatcaacttctggaatttatctaattattgcttttaaaagtttcctgcctttcaacgtttccctgctatgcaaaacctttcccagaccttggtttcttaaaagaaagatgttgctacagttcccaattctttcttattacaggctcaggtgtacaggttattctggcttaattttatctaatgaagcccattcctttttgtacatgaagatgtcacttaaacctatgtttacaaactaaagagactaatcactcaatatgaaaacatgaaaacatttttgcttaaaatattaagatggaaatasttaaatatggattattttgtccttttactttttaaaaaaagttacatattgtatgcactgtgctgatgcaagaattctac

SEQ ID NO: 595024 - DNA, 658 bp, Homo sapiens
aatgcctgctacatgctgggatgctagggatccagtggttaagaaagatacaatccttgtcttgccctcatggggaatatagattagagagagattaatatttaagcaggtaattacatagatgatatatttatgattgttgtgggtgctacaggaacaaagttcagagtgatctgagggtgcatattggatatatctaggcagcatgtgatggggatgtgatggtgagtcttctgaaggaagtgacatgtaagctgagacctgaaggataagaaggaattggtgggtgagaaggggctttgctgctcattgaggaaacaagacatgctaaggtcctggaaatggaaggtgcttgactctcaaagaacagagcaaagtatagtgtattttacaagtagtgagaaatgagaccagagaggtagctagttgccagatcatacagatggccttgttgattatataaagttaaaatttttattgtgaagccattgacatggcttacrtgatttgtatttttcagaccccgcttgtgtggagaaggggaatagaggtgaatttaggctaaccagttagctgaatggtggactcagcctttggcaggaaagatttaagagaattggttattggaagtaggggtgatgagggcttgtgactgatt

SEQ ID NO: 595025 - DNA, 578 bp, Homo sapiens
tgcaaaggccctaagatgggactgagcccggtttgttggattttcatcagtaagcccggggtggcaggagcatgcatrctgatccagctatagaatgagtggtagaaggtgagatcaggagccctgtaagctgttgtaagcatcgttgttttaatttggtagaaacttagttataactcattcttaaatatttagctttatgcttaaaataatttagaaataaccttggacttccatctttttagaaatagctggaaggttagcactcagtatgttgtattacttctctgtgaaaggatctacagtagactgaacttgtctatgttatgagactgctcatgtctttattctttatattcataatgctgaacacaagatactcgtgttttttttttttttgacagaatagggatcttgcagttaacttagctgttcttaaatttctgtttataaaagccataatgcataataatttactgtagtcgttattcctagttttcccaggtaggcagtggtaacatctatttcacaagataaggaagcagaaatttaacaacaatggcagaatcaggatgtca

SEQ ID NO: 595026 - DNA, 578 bp, Homo sapiens
tgcaaaggccctaagatgggactgagcccggtttgttggattttcatcagtaagcccggggtggcaggagcatgcatactgatccagstatagaatgagtggtagaaggtgagatcaggagccctgtaagctgttgtaagcatcgttgttttaatttggtagaaacttagttataactcattcttaaatatttagctttatgcttaaaataatttagaaataaccttggacttccatctttttagaaatagctggaaggttagcactcagtatgttgtattacttctctgtgaaaggatctacagtagactgaacttgtctatgttatgagactgctcatgtctttattctttatattcataatgctgaacacaagatactcgtgttttttttttttttgacagaatagggatcttgcagttaacttagctgttcttaaatttctgtttataaaagccataatgcataataatttactgtagtcgttattcctagttttcccaggtaggcagtggtaacatctatttcacaagataaggaagcagaaatttaacaacaatggcagaatcaggatgtca

SEQ ID NO: 595027 - DNA, 578 bp, Homo sapiens
tgcaaaggccctaagatgggactgagcccggtttgttggattttcatcagtaagcccggggtggcaggagcatgcatactgatccagctatagaatgagtggtagaaggtgagatcaggagccctgtaagctgttgtaagcatcgttgttttaatttggtagaaactyagttataactcattcttaaatatttagctttatgcttaaaataatttagaaataaccttggacttccatctttttagaaatagctggaaggttagcactcagtatgttgtattacttctctgtgaaaggatctacagtagactgaacttgtctatgttatgagactgctcatgtctttattctttatattcataatgctgaacacaagatactcgtgttttttttttttttgacagaatagggatcttgcagttaacttagctgttcttaaatttctgtttataaaagccataatgcataataatttactgtagtcgttattcctagttttcccaggtaggcagtggtaacatctatttcacaagataaggaagcagaaatttaacaacaatggcagaatcaggatgtca

SEQ ID NO: 595028 - DNA, 578 bp, Homo sapiens
tgcaaaggccctaagatgggactgagcccggtttgttggattttcatcagtaagcccggggtggcaggagcatgcatactgatccagctatagaatgagtggtagaaggtgagatcaggagccctgtaagctgttgtaagcatcgttgttttaatttggtagaaacttagttataactcattcttaaatatttagctttatgcttaaaataatttagaaataaccttggacttccatctttttagaaatagctggaaggttagcactcagtatgttgtattacttctctgtgaaaggatctacagtagactgaacttgtctatgttatgagactgctcatgtctttattctttatattcataatgctgaacacaagatactcgtgttttttttttttttgacagaatagggatcttgcagttaacttagctgttcttaaatttctgtttataaaagccataatgcataataatttactgtagtcgttattcctagttttcccaggtaggcagtggtaacatctrtttcacaagataaggaagcagaaatttaacaacaatggcagaatcaggatgtca

SEQ ID NO: 595029 - DNA, 658 bp, Homo sapiens
tttctctctctctctgcctctttctctctcgctctctttttttttttttttttttttaaaaagagtctcactctgtcacccaggctggaggggttagtggtatgatctctgcccactacaccctctgcctcctagtctcaagcaattcttctatctcagcctcccgagtagctggcactacaggcgcatgctaccacatctggctaatttttgtawtttttgtagagacaggatcttgccaccttgcccacactggtcgtgaactcctgaactcaagtgatccacccaccttggccttccaaagtgctgggattacaggcatgagccaccaccccagtctggttgacgtttttcacctccttctctttacagcatattcagaaattttaaaccagtaatacgaaatacatatattggttgatttttgttgtattttaagcatattgactttttaaatcggatcatatttttgcatgcaagtactatggcttttcaaggtcattctgatttgaaacaacacatttcttagtcaattcattggctctttacccccttttaaaattttttattttttatgtgatttatttatttacttatttttagtgatggagtctcactgtgttgctcaggctgggctcaagcagttcttctgcctcag

SEQ ID NO: 595030 - DNA, 658 bp, Homo sapiens
tttctctctctctctgcctctttctctctcgctctctttttttttttttttttttttaaaaagagtctcactctgtcacccaggctggaggggttagtggtatgatctctgcccactacaccctctgcctcctagtctcaagcaattcttctatctcagcctcccgagtagctggcactacaggcgcatgctaccacatctggctaatttttgtaatttttgtagagacaggatcttgccaccttgcccacactggtcgtgaactcctgaactcaagtgatccacccaccttggccttccaaagtgctgggwttacaggcatgagccaccaccccagtctggttgacgtttttcacctccttctctttacagcatattcagaaattttaaaccagtaatacgaaatacatatattggttgatttttgttgtattttaagcatattgactttttaaatcggatcatatttttgcatgcaagtactatggcttttcaaggtcattctgatttgaaacaacacatttcttagtcaattcattggctctttacccccttttaaaattttttattttttatgtgatttatttatttacttatttttagtgatggagtctcactgtgttgctcaggctgggctcaagcagttcttctgcctcag

SEQ ID NO: 595031 - DNA, 511 bp, Homo sapiens
cacactagttgtttctttaggagatgtctttagctgctagagtagagaacaaaagaatgagtaaagaggcttcagaaaagctagtatgggctggcrcggtggctcacacctgtaatcccagcactttgagggggccaaggtgggaggatcacttgaggtcaggaatttgagaccagcctagccaacatggtgaaaccctgtctctactaaaaatacaaaaaatagctgagtgtcatggttgacgcctgtaatcccagctactcgggaggctgaggcaggagaatcccttgaactcaggaggtggaggttggagtgaaccaggattgcatcactacactccagcctgggtgacagagagtcactcctctcaagaaaaaaacaaggaaaagctagtatggatggagcacctccatgctcatttcttagagcttatgttttgttgtttgatttcctagttcataacagaaggggttttgtaagctgacctagcttgacaatcctttttgggttt

SEQ ID NO: 595032 - DNA, 511 bp, Homo sapiens
cacactagttgtttctttaggagatgtctttagctgctagagtagagaacaaaagaatgagtaaagaggcttcagaaaagctagtatgggctggcgcggtggctcacacctgtaatcccagcactttgagggggccaaggtgggaggatcacttgaggtcaggaatttgagaccagcctagccaacatggtgaaaccctgtctctactaaaaatacaaaaaatagctgagtgtcatggtygacgcctgtaatcccagctactcgggaggctgaggcaggagaatcccttgaactcaggaggtggaggttggagtgaaccaggattgcatcactacactccagcctgggtgacagagagtcactcctctcaagaaaaaaacaaggaaaagctagtatggatggagcacctccatgctcatttcttagagcttatgttttgttgtttgatttcctagttcataacagaaggggttttgtaagctgacctagcttgacaatcctttttgggttt

SEQ ID NO: 595033 - DNA, 619 bp, Homo sapiens
tctccgtggcttttcattgtgtagatcgggttaaaagcagaatataagaagcaagtttttggatgagatgatagaacttacgtagtacttgtctgtcaatcctaaaagaattatttgtggccaaatcctctcctctaaccaccaaataaggagcttgacttcattctcactgttaagaatcagaaacccagtttagaatatccaaytcctggtgaacttttaaaaattaatatatatcttgatactttataatctattgtgtggcatccaacgaatgtgaggtaatctggggagttagaaatgccttgcatttcgtgtggaaaaggtgtagtcgtaagtttggcctgggaaggttaacactgtctttgcacatagaaagctaagggcagtgtcatcatcattcgtttgtgaggaggggactgaaaaagcaaaatcatcactactagcctattctaaaggatcttaatcccattccatttttcagattttttttttattatgtagtatcccctggatataatatttttggtgaagggggatgtctctaatttccacgtggtaccccctgtcatatacaggttatgtatctggcagtctacagctgcaattcatggctgtt

SEQ ID NO: 595034 - DNA, 536 bp, Homo sapiens
aattttcaatttaaaatgtttagttcttacataacttagttttgtaaagagaaatacaagtactttagttaattgttgagtacattgtcttttttttttttttaaacaaacaggatcaatcactgttctgggaatgctttatctgaatttctgatcctttatgcatcctcagcatttaacacataaagtagccctgtgtataactttttgaggaactgcctgttttccattttatattaccattttgtattaccatgagcgatatttgtgggttccattctctccacattcttgccaatrcttctaattgtctttttaattatagccatgctagtcaatgtgaagtggtatctcattgtggttttgattttaatttctctaatggctaatgatgctgataatcatttcaggtgcttaattggtcatttgtatatcttctttggagatcctttgctcatttctaaagttatttggtttttaaaaattgttgaattgtgatttttgtatatattctggagaccagtgtcttgtcaaat

SEQ ID NO: 595035 - DNA, 536 bp, Homo sapiens
aattttcaatttaaaatgtttagttcttacataacttagttttgtaaagagaaatacaagtactttagttaattgttgagtacattgtcttttttttttttttaaacaaacaggatcaatcactgttctgggaatgctttatctgaatttctgatcctttatgcatcctcagcatttaacacataaagtagccctgtgtataactttttgaggaactgcctgttttccattttatattaccattttgtattaccatgagcgatatttgtgggttccattctctccacattcttgccaatacttctaattgtctttttaattatagccatgctagtcaatgtgaagtggtatctcattgtggttttgattttaatttctctaatggctaatgatgctgataatcrtttcaggtgcttaattggtcatttgtatatcttctttggagatcctttgctcatttctaaagttatttggtttttaaaaattgttgaattgtgatttttgtatatattctggagaccagtgtcttgtcaaat

SEQ ID NO: 595036 - DNA, 536 bp, Homo sapiens
aattttcaatttaaaatgtttagttcttacataacttagttttgtaaagagaaatacaagtactttagttaattgttgagtacattgtcttttttttttttttaaacaaacaggatcaatcactgttctgggaatgctttatctgaatttctgatcctttatgcatcctcagcatttaacacataaagtagccctgtgtataactttttgaggaactgcctgttttccattttatattaccattttgtattaccatgagcgatatttgtgggttccattctctccacattcttgccaatacttctaattgtctttttaattatagccatgctagtcaatgtgaagtggtatctcattgtggttttgattttaatttctctaatggctaatgatgctgataatcatttcaggtgcttaattggtcatttgtatatcttctttggagatcctttgctcatttctaaagttatttggtttttaaaaattgttgaattgtgwtttttgtatatattctggagaccagtgtcttgtcaaat

SEQ ID NO: 595037 - DNA, 599 bp, Homo sapiens
gtgcagtggcgtgattttggctcactgcaagctccacctcctgggttcacgccattctcctgcctcagcctcctgagtagctgggactacaggcgcccgccaccacgcctggccaattttttgtattttttttttagtagagacggggtttcaccrtgatctcgatctcctgaccttgtgatcagcctgccttggcctcccaaagtgctgggattacaggcatgagctaccgcgcccggcgaaacagttttcaaaacagaaagatggaagtgacattatcaaattaagtgcacactgaaaacttttatgacagttgtatcgagggggtacatgtatttttcaatagatattgattggctgctatagtaaggatttttgctgggctctgagaatcattttctaagtttgaggatgctaactaaatcatacgtaagttgtatgtgataaatatggggcagaaataggtatgcactctaaaagtagtaatagcttctggtttaaagaagtgggagatcataacaagttggaatatctggaaatatttaagaaaatgctttagcatgaagtattattttgactatcatttcagagaatgagga

SEQ ID NO: 595038 - DNA, 599 bp, Homo sapiens
gtgcagtggcgtgattttggctcactgcaagctccacctcctgggttcacgccattctcctgcctcagcctcctgagtagctgggactacaggcgcccgccaccacgcctggccaattttttgtattttttttttagtagagacggggtttcaccgtgatctcgatctcctgaccttgtgatcagcctgccttggcctcccaaagtgctgggattacaggcatgagctaccgcgcccggcgaaacagttttcaaaacagaaagatggaagtgacattatcaaattaagtgcacactgaaaacttttatgacarttgtatcgagggggtacatgtatttttcaatagatattgattggctgctatagtaaggatttttgctgggctctgagaatcattttctaagtttgaggatgctaactaaatcatacgtaagttgtatgtgataaatatggggcagaaataggtatgcactctaaaagtagtaatagcttctggtttaaagaagtgggagatcataacaagttggaatatctggaaatatttaagaaaatgctttagcatgaagtattattttgactatcatttcagagaatgagga

SEQ ID NO: 595039 - DNA, 599 bp, Homo sapiens
gtgcagtggcgtgattttggctcactgcaagctccacctcctgggttcacgccattctcctgcctcagcctcctgagtagctgggactacaggcgcccgccaccacgcctggccaattttttgtattttttttttagtagagacggggtttcaccgtgatctcgatctcctgaccttgtgatcagcctgccttggcctcccaaagtgctgggattacaggcatgagctaccgcgcccggcgaaacagttttcaaaacagaaagatggaagtgacattatcaaattaagtgcacactgaaaacttttatgacagttgtatcgagggggtacatgtatttttcaatagatattgattggctgctatagtaaggatttttgctgggctstgagaatcattttctaagtttgaggatgctaactaaatcatacgtaagttgtatgtgataaatatggggcagaaataggtatgcactctaaaagtagtaatagcttctggtttaaagaagtgggagatcataacaagttggaatatctggaaatatttaagaaaatgctttagcatgaagtattattttgactatcatttcagagaatgagga

SEQ ID NO: 595040 - DNA, 599 bp, Homo sapiens
gtgcagtggcgtgattttggctcactgcaagctccacctcctgggttcacgccattctcctgcctcagcctcctgagtagctgggactacaggcgcccgccaccacgcctggccaattttttgtattttttttttagtagagacggggtttcaccgtgatctcgatctcctgaccttgtgatcagcctgccttggcctcccaaagtgctgggattacaggcatgagctaccgcgcccggcgaaacagttttcaaaacagaaagatggaagtgacattatcaaattaagtgcacactgaaaacttttatgacagttgtatcgagggggtacatgtatttttcaatagatattgattggctgctatagtaaggatttttgctgggctcygagaatcattttctaagtttgaggatgctaactaaatcatacgtaagttgtatgtgataaatatggggcagaaataggtatgcactctaaaagtagtaatagcttctggtttaaagaagtgggagatcataacaagttggaatatctggaaatatttaagaaaatgctttagcatgaagtattattttgactatcatttcagagaatgagga

SEQ ID NO: 595041 - DNA, 634 bp, Homo sapiens
agagggagactccatctcaaaaaacaaacaaacaaacaaacaaacaaaaaacaaacaagcaaacaaaacacataagcacagactagggaaggtttaaaaacaaacagatkctgagagtataatctggttcagtcttttaaatagcacatactgtaacccaacaatccaatcccactcctaggaacctaccctacagaaacaccagcttaagtgactaaagatacatctctagcacatttaagacagcactgtctgtaaaagcaaaaagggcctgaattctaggcaaataaatattatcagcaaatgcagttatgtgttaataaagaagggggcacttcatgcctttaccttacagagggtcctgaccttctgcgcatgtaaatttgtgacccttgccataaacaatttccactgttaggtttcttccaagacagagaagattcacaactcatgccattaaggcagttaaggacaaccaatatacctggaagacggtaatcttccaagttacagaggatcagaaatccaatgcatttcacctggataattcagactcaaaagttcaaatatttatctgaaattacagtaaagccactttaaaactttttattctttgcgcagcactttgaaagca

SEQ ID NO: 595042 - DNA, 634 bp, Homo sapiens
agagggagactccatctcaaaaaacaaacaaacaaacaaacaaacaaaaaacaaacaagcaaacaaaacacataagcacagactagggaaggtttaaaaacaaacagattctgagagtataatctggttcagtcttttaaatagcacayactgtaacccaacaatccaatcccactcctaggaacctaccctacagaaacaccagcttaagtgactaaagatacatctctagcacatttaagacagcactgtctgtaaaagcaaaaagggcctgaattctaggcaaataaatattatcagcaaatgcagttatgtgttaataaagaagggggcacttcatgcctttaccttacagagggtcctgaccttctgcgcatgtaaatttgtgacccttgccataaacaatttccactgttaggtttcttccaagacagagaagattcacaactcatgccattaaggcagttaaggacaaccaatatacctggaagacggtaatcttccaagttacagaggatcagaaatccaatgcatttcacctggataattcagactcaaaagttcaaatatttatctgaaattacagtaaagccactttaaaactttttattctttgcgcagcactttgaaagca

SEQ ID NO: 595043 - DNA, 634 bp, Homo sapiens
agagggagactccatctcaaaaaacaaacaaacaaacaaacaaacaaaaaacaaacaagcaaacaaaacacataagcacagactagggaaggtttaaaaacaaacagattctgagagtataatctggttcagtcttttaaatagcacatactgtaacccaacaatccaatcccactcctaggaacctaccctacagaaacaccagcttaagtgactaaagatacatctctagcayatttaagacagcactgtctgtaaaagcaaaaagggcctgaattctaggcaaataaatattatcagcaaatgcagttatgtgttaataaagaagggggcacttcatgcctttaccttacagagggtcctgaccttctgcgcatgtaaatttgtgacccttgccataaacaatttccactgttaggtttcttccaagacagagaagattcacaactcatgccattaaggcagttaaggacaaccaatatacctggaagacggtaatcttccaagttacagaggatcagaaatccaatgcatttcacctggataattcagactcaaaagttcaaatatttatctgaaattacagtaaagccactttaaaactttttattctttgcgcagcactttgaaagca

SEQ ID NO: 595044 - DNA, 634 bp, Homo sapiens
agagggagactccatctcaaaaaacaaacaaacaaacaaacaaacaaaaaacaaacaagcaaacaaaacacataagcacagactagggaaggtttaaaaacaaacagattctgagagtataatctggttcagtcttttaaatagcacatactgtaacccaacaatccaatcccactcctaggaacctaccctacagaaacaccagcttaagtgactaaagatacatctctagcacatttaagacagcactgtctgtaaaagcaaaaagggcctgaattctaggcaaataaatattatcagcaaatgcagttatgtgttaataaagaagggggcacttcatgcctttaccttacagagggtcctgaccttctgcgcatgtaaatttgtgacccttgccataaacaatttccactgttaggtttcttccragacagagaagattcacaactcatgccattaaggcagttaaggacaaccaatatacctggaagacggtaatcttccaagttacagaggatcagaaatccaatgcatttcacctggataattcagactcaaaagttcaaatatttatctgaaattacagtaaagccactttaaaactttttattctttgcgcagcactttgaaagca

SEQ ID NO: 595045 - DNA, 481 bp, Homo sapiens
cattaccttaagtaatgacactgcttttatttagtaaccaagctaaaaatctcagtcatttgcctctgtttgatcccccttgatctatgtggtctgggagccaaaggaaacatacgtaaagaactaagccagttgttmtttaaagtgtggtctctggacttctggggatctcacaggctattttggaggttcgtgaaatcaaaggtattttcatagcaatactagaatattatctgccttttacactgtgttgacatttgcaatcagagtacaaaaacaaaggtgaacaaaactgctggtacattattagcacaaatcaaggaagaggcaccaaactatactaatagtcattatactctccactcagtttttctttttttaagggagttccacttaagatgtccttgatgaacagcaaaaattatgaattatcttgagcctttagtgcattttttaaaaatattctttgtgatgaaaggga

SEQ ID NO: 595046 - DNA, 562 bp, Homo sapiens
ccccatctccactaaaaatacaaaaattagctgggcgtggtggcacggacctgtagtcctagctactcrggaggctgaggcaggagaaccgcttgaacccgggaggaggagactgcagtgagccgagatcacgccactgctctccagactggcgacagactgtctcaaaaaaaaaaaaaaaaaaaagaaaaagaaaaaagaaaagaaaaaaattccatacatagaattctgtgtggcattttagagaaaatcatggtgactagagacaccaggtgaaatttttttttttttttttttggtgacacaaccccaggagatcctgtgaacatgtgtcccttgaccaggtgaatttcaggagcttgcactagtcccaggttagctggcaccaggttggccctagtttgagtgccttccacataccaggtactgtgctggagaagtaacatcaaaaaggaaaatcaaatttcatcttcaataagcaatcacaatacactgtgatgagagttagggtgaaggaggttcaggttaccatgggcttatattaggagggcaaattctgtct

SEQ ID NO: 595047 - DNA, 578 bp, Homo sapiens
acatggtgaaaccccatctccactaaaaatacaaaaattagctgggcgtggtggcacggacctgtagtcctagctactcaggaggctgaggcaggagaaccgcttgaacccgggaggaggagactgcagtgagccgagatcacgccactgcwctccagactggcgacagactgtctcaaaaaaaaaaaaaaaaaaaagaaaaagaaaaaagaaaagaaaaaaattccatacatagaattctgtgtggcattttagagaaaatcatggtgactagagacaccaggtgaaatttttttttttttttttttggtgacacaaccccaggagatcctgtgaacatgtgtcccttgaccaggtgaatttcaggagcttgcactagtcccaggttagctggcaccaggttggccctagtttgagtgccttccacataccaggtactgtgctggagaagtaacatcaaaaaggaaaatcaaatttcatcttcaataagcaatcacaatacactgtgatgagagttagggtgaaggaggttcaggttaccatgggcttatattaggagggcaaattctgtcttcaag

SEQ ID NO: 595048 - DNA, 578 bp, Homo sapiens
acatggtgaaaccccatctccactaaaaatacaaaaattagctgggcgtggtggcacggacctgtagtcctagctactcaggaggctgaggcaggagaaccgcttgaacccgggaggaggagactgcagtgagccgagatcacgccactgctctccagactggcgacagactgtctcaaaaaaaaaaaaaaraaaaagaaaaagaaaaaagaaaagaaaaaaattccatacatagaattctgtgtggcattttagagaaaatcatggtgactagagacaccaggtgaaatttttttttttttttttttggtgacacaaccccaggagatcctgtgaacatgtgtcccttgaccaggtgaatttcaggagcttgcactagtcccaggttagctggcaccaggttggccctagtttgagtgccttccacataccaggtactgtgctggagaagtaacatcaaaaaggaaaatcaaatttcatcttcaataagcaatcacaatacactgtgatgagagttagggtgaaggaggttcaggttaccatgggcttatattaggagggcaaattctgtcttcaag

SEQ ID NO: 595049 - DNA, 578 bp, Homo sapiens
acatggtgaaaccccatctccactaaaaatacaaaaattagctgggcgtggtggcacggacctgtagtcctagctactcaggaggctgaggcaggagaaccgcttgaacccgggaggaggagactgcagtgagccgagatcacgccactgctctccagactggcgacagactgtctcaaaaaaaaaaaaaaaaaaaagaaaaagaaaaaagaaaagaaaaaaattccatacatagaattctgtgtggcattttagagaaaatcatggtgactagagacaccaggtgaaatttttttttttttttttttggtgacacaaccccaggagatcctgtgaacatgtgtcccttgaccaggtgaatttcaggagcttgcactagtcccaggttagctggcaccaggttggccctagtttgagtgccttccacataccaggtactgtgctggagaagtaacatcaaaaaggaaaatcaaatttcatcttcaataagyaatcacaatacactgtgatgagagttagggtgaaggaggttcaggttaccatgggcttatattaggagggcaaattctgtcttcaag

SEQ ID NO: 595050 - DNA, 602 bp, Homo sapiens
gttgcacatacttatagtggtgacattttaagaaagtgcaatgtttaaagtttaggctgttgagtcatattaactcaacaaatccttcatggaggggtctgaggattaattgtgagtcagatacagttttccagtagggcttggtaccaatgatttcaatgagactctgtcactgttcttagaattattcacacagtacaggaaagaatatccctgccaacagcttcctctacagggaagaatgaaataagcaaccaccaatatggtagagggaaaagcacacccaaaaacattgccttaaagggacttgggatttagcgctgccttcgtccctcacttaacataatctcagaaaagataggtaatcttcatgtgtttcagttttctcgccaacaggatggaggttatgatacctaccttgagaaattttggggacaaataaaggaagctaaaagactgtcactactgtgactggcccagggcctgaaagaggacattctccccatccccagaracaagaatgaggcaggacaggcctgtaattaaggatgattctgagggatgcaactaagaagcatcagtcactgtaagaacaggaggcc

SEQ ID NO: 595051 - DNA, 464 bp, Homo sapiens
tatctctaaatattgtagcatttgtcctgtaaaagtaaagtacttcttctatatttcacaatataattaccataatcaagaaatattaaatttattcaawgatatatggtgctaggtttcaggctatcagacccagataggaaatatttttacactttgtggttcaagatgcaaaatcaaggatatgatcaggtaactatacaacaaaatgaaaaacagttgcctaacattttatattgatgaaattaaaaaatataattgagtacttttttctaatacaggcctatgaaaaataatgatttttagggggagggtggggtaatatttcacttaatgggattcaaagattttctttcctgtcatcaaatcaattgtaaatgttcatctgttaatgctggcctgtagtaaagttttacacatttgatctttaaaaactttattttttacaattaggtactatcaaa

SEQ ID NO: 595052 - DNA, 618 bp, Homo sapiens
tccacgttgaaatgtaatcttcagtgttggaggtagggcctgatgggaagtgcttgagtcatggtgtggatccctcatgaatggcttggtgtcctccccttggtaatgaattcatatgagagctggttggttaaaagagcttggcatctgtattagtctggtctcacattgctataaatacctgagactgggtaaattatamagaggtttaattggtgtatggttcttcaggctatacaggatgcacagcaacttctccttctgaggaagcatcagggagcttttactcatagtggttgagcaaaggagcaggcatcttacatggcagaagcaggaccgagagagagagaataggtgccgtacacttttaagaaataagatttcataagaactccatattggtgatgacagcaccaagggggaatgtgttaaactatgagaagctgccccagtgattgaatcatctcccaccatgccccacctctagtattggggattacatttcagcatgacatttgggtggggacacagatccaaacaatattatttcacccctgacccctttcaaatctcctgtccttctcacattgcaaaatacaatctcctaatagtccccca

SEQ ID NO: 595053 - DNA, 620 bp, Homo sapiens
ggtttggctctgtttccactcaaatctcatcttgaattgtaactcccacaattcccacatgtcawgggaggaacccagtaggaggtgatttggattatgggattgagcctttcctgcactgttctcatgatagtgaatgagtctcttgaggtctcatagttttaaaaagaggggttccctgccgaaactctctctttgccttctgccatccatgtaagacatgacttgctcctccttgccttctcccatgactgtgaggctttcccagccacgtggaactgtaagtccaattaaacttctttcttttgtaaatttcccagtcttgggtatgtctctatcagcagcatgaaaacggactaatgcaaacatgtaggaatgggaagaaaggagtattgcaatgttatagtcagtgtctcaggaagacttcttcagcagggtggcattttagtcaaggcatagggcgatatggcagtaagtcctgtagatgtttgtaggaacagcattctacccagagggaacagtaaatgcacaggaagacacagggaacatttgaaaagagcagggagagacctgcatggctaagctgaacaaacaaagggaaggggcttggaaatggaatt

SEQ ID NO: 595054 - DNA, 620 bp, Homo sapiens
ggtttggctctgtttccactcaaatctcatcttgaattgtaactcccacaattcccacatgtcaagggaggaacccagtaggaggtgatttggattatgggattgagcctttcctgcactgttctcatgatagtgaatgagtctcttgaggtctcatagttttaaaaagaggggttccctgccgaaactctctctttgccttctgccatccatgtaagacatgacttgctcctccttgccttctcccatgactgtgaggctttcccagccacgtggaactgtaagtccaattaaacttctttcttttgtaaatttcccagtcttgggtatgtctctatcagcagcatgaaaacggactaatgcaaacatgtaggaatgggaagaaaggartattgcaatgttatagtcagtgtctcaggaagacttcttcagcagggtggcattttagtcaaggcatagggcgatatggcagtaagtcctgtagatgtttgtaggaacagcattctacccagagggaacagtaaatgcacaggaagacacagggaacatttgaaaagagcagggagagacctgcatggctaagctgaacaaacaaagggaaggggcttggaaatggaatt

SEQ ID NO: 595055 - DNA, 620 bp, Homo sapiens
ggtttggctctgtttccactcaaatctcatcttgaattgtaactcccacaattcccacatgtcaagggaggaacccagtaggaggtgatttggattatgggattgagcctttcctgcactgttctcatgatagtgaatgagtctcttgaggtctcatagttttaaaaagaggggttccctgccgaaactctctctttgccttctgccatccatgtaagacatgacttgctcctccttgccttctcccatgactgtgaggctttcccagccacgtggaactgtaagtccaattaaacttctttcttttgtaaatttcccagtcttgggtatgtctctatcagcagcatgaaaacggactaatgcaaacatgtaggaatgggaagaaaggagtattgcaatgttatagtcagtgtctcaggaagacttcttcagcagggtggcattttagtcaaggcatagggcgrtatggcagtaagtcctgtagatgtttgtaggaacagcattctacccagagggaacagtaaatgcacaggaagacacagggaacatttgaaaagagcagggagagacctgcatggctaagctgaacaaacaaagggaaggggcttggaaatggaatt

SEQ ID NO: 595056 - DNA, 539 bp, Homo sapiens
agtgcaaaagctgggatttgcactctagtagttggcatattaggttaaaggtattgaagaaaacataatcatttacttacaaatctaatacaaactatccctatccccatcttaaaagataaatgagttttgatatttccaacatataatgtatgtcagaaaaacatatggaggmtaagttttgctgtgataataagtaaaccctaaatttcatagtttaagatggtataggtttaattctcactcatgcaacagtataacacagattaggcagctctcttgggcaaaatattcttaagtggttatccatgtattcagacttgtatcttacaactctgccaatattgcagttattttcttacaggccaacagatagaagaaaggagtatggagaacatgtaccactatgttttgtctgagtcagggtgacatatggcttctgctcacgttccagttggaagacacttaattacgtggtctccacctgcataaaaagaagtctggaaaatgtagtctttctgtgtatccagggagagaaa

SEQ ID NO: 595057 - DNA, 371 bp, Homo sapiens
ccacaatgcatgggaattatgggagctacaagatgagatttgggtggggacacagagccaaaccatatcagaggtaaagatgaaaagaaagcatttcaggcttaggagcctaagtgcagtgatatgagtggacttatacttttttaataggtagtgaggctccagtgtccacaggtggaagtgagaaaatatagctggttgccagtggaactygtattctctggtgactggttggaaatagtgtttatttgtttctttttaagattattttcaatcctgaggtttggagatttggtaatgattttaaaaattataattctaatgaaggttacctgtcaggtactgagtatattagaaggaaaagcagccac

SEQ ID NO: 595058 - DNA, 548 bp, Homo sapiens
aggtgacacaattaaaacatggaaaaactagggtttgaaccaagttagggttgccaggtaaaatataggcagtccatttaaatttgaattccagataaactgtgtaactgaaaatatatatggtttttacataaaacgatataaaaaccatatgtatttatatatttaagactatttttatacatagcaacatatctagtttacatgtatagttttatatatagcttatatataaactagaaactagaaatagaatcatatataaatatatataactatatawagatatataaacaaatatataactatataaatacatagacatataactataaaactatataaactaggtatataagtatatatagtacaaaactatatatatataaactctctatatatacacacattatatgtatgtatgtatttttaatacagtaggcccatatatgtgcatatgtgtagatagatatagatagatagatagtaagaaccagctagagtaatttgtatatatacatatatgtgtatatatatatacacatata

SEQ ID NO: 595059 - DNA, 608 bp, Homo sapiens
atgcacatctgtctaactcatctgtccaggtgagtgacagtgaggaggcatctaaacccttgccaccacacggaattaaataaaagaccagaggcaagttttgctggagtgaagaagtctcaggatacaacagctgtctgacttcaagtcgggggaaaaaaatgataaaagctgaaatgctttgcttaaatggggagagaaggtgttccaaaaaaaagtgttcctaggcaagttaagctcctgaataactcaagaggcaacacagcttagagaggaagcagatggagactcatgatttccattgcctgagtttgcacctcagccttgccacccccaaggttggtgaatttaggcraacacctaggacttctgatggtgcatgcattttgttcaggtccgctgagaaccagtgccaagatgtgattaaactcataagacatttattagaagggtgttttagtcagcttttggtaccatactaaataccatagaccaggtggcttaaacaacagaaatttattttctcacacttctggaaactgggaaatccaaaatcaaggtgccagccaatttggtttctggtgagaactctcttcctaacttgcaaa

SEQ ID NO: 595060 - DNA, 543 bp, Homo sapiens
agttcattttcacgctgctgttaaagacatacctgagactgggtaattaataaagaaaaagaggtttaatagattcacagttccatgtggctggggaggcctcataatcatggcagaaggtgaaaggcaaatcttacatggcagcagggaagagagaataagaatgaagtgaaaagggtttccccttataaaactatcagatcttgtgagactcattcactaccatgagaatagtatgggggaaaccacctccatgattcaattatctcccaccgggtccctcccacaacacgtagggattatgggagctataattcaagatgagatttggatggggacacagccaaaccatatcaacaggtgaactgaagagacaggtctaagtataggatttaaaagacagcagaaacataatacctgttgcccttgtgagtatttggcaggtgtttttctataacacctgtttgccaacctatgtcctcayagttgctcttctctctgctgcgaatattattcctgctcttcacatctctggccgcttct

SEQ ID NO: 595061 - DNA, 504 bp, Homo sapiens
catccaggtgaccatagagtgcctgcatccaggtgaccatagaatgcttgcatccaggtgaccattgagtgcctgcatccaggtgaccataaagtgcctgcatccaggtgaccatagaatgcctgcatccaggtgaccattgagtgcctgcatccaggtgaccattgaatgcctgcatccaaytgactattgagtgcctgcatccaggtgaccattgaatgcctgcatccaattgactattgaatgcctgcatccaggtgaccattgaatgcctgcatccaattgactattgagtgcctgcatccaggtgaccattgaacacctgcatccaggtgaccattgagtgcctgcatccaggtggccattgaatgcctgcatccaggtggccattgaatgcctgcatccagatgaccatagaatgactgcatccaggtgaccattgagtgcctgcatccaggtgaccatagagtgcctgcatccaggtgaccatagagtgcctgcatc

SEQ ID NO: 595062 - DNA, 567 bp, Homo sapiens
aaccaaaaccgacaagcaaacagtagtctcgcaggttacttcctattgcgataagctacactaaatgttaccgaatttgattatacccgcaaaacrttgtacggtctgtcataatgttgggtgttaaattaatagttcatttgttttctctcaaaaaagcatataaggaacaaaacaatttgggcttagaaaagtgaactatatggaaagaaaatgtaatgaagtttgcataagctaaagactgtaagtgctgaatactgttttatgtgaaacagctgctaaaactatgttgagctgatgaaagagatggagttggtggaggtctatgtttaggataagaagggacatggtatttcatctccctctgtagcatatcaatagataatatcaaaggccataaagcaaatcatggccagtctgttctcctgcaacatgtgtctctggaataagaattgctttgtatgtgtttttcactcatatatgcagagattctgttggtccatgggagagtttttttcagtagttatttggaatttatcaaaggtaaactttcttaaaatttaagag

SEQ ID NO: 595063 - DNA, 575 bp, Homo sapiens
  misc_feature 542, 543, 544, 545, 546, 547, 548, 549, 550, 551, 552, 553,554, 555, 556, 557, 558, 559, 560, 561, 562, 563, 564, 565,566, 567, 568, 569, 570, 571, 572, 573, 574, 575: n = A,T,C or G
aaatagtgtggagattccttaaagaagtaaagatagaactaccatttgatccagtaatcccactactgagtcccacccagaggaaaagaagtcattatatgaaaaaacatacttgcacatgcatgtttatagcacaatttgcaattccactctatttattttgattgaaagagtttagtctgttgacattcaatgttattattgataagttaggacttactcctgtcattttgttatctcttttctggttgttttgttgtcttctcttccttctttctttctttctgccttccttttagtcaatgtgattttctcacatgatatgatttagtttcttgatttttttatattaattgtatttttttggtttgaggttagcatgagtattgcaaatgytatcttataacctattattttaacctgaaaacaacttaaagctgtttgtataaacaaacaagcaaaaggaaaactaataaaaactctacaccttaacttttccccacactttttaactttttgttgtttttatttatatcttattnnnnnnnnnnnnnnnnnnnnnnnnnnnnnnnnnn

SEQ ID NO: 595064 - DNA, 456 bp, Homo sapiens
atgaagttctttataatattaccttaaaggtaaataaagctatacatttccttgtagctagctagctgcatcccacaaataataaaatgtattttcactattatccagttggaaatattttcttatttcctttctgatttytttctatgacttattttttaagttagatacatatcatttatcattcaacttaaaaatattgtttctcctgaatatcttaatatatatttctaatataattccatcttgctaagagattacgtgagatggggtgatgtcagttattctaaattgataaggcacgttttatggttcagcatatggtctatgttggtaaacatatcatgctcagtttatagatatattttgtaattgttgtttaatgttctataaataccaaggatacagtagttgatagaattatccagattactaatattttatctgatttttttc

SEQ ID NO: 595065 - DNA, 657 bp, Homo sapiens
ttttgaacaaccatactattatttcaattactttaatatttataaaattatttagattttctatttcttattgtgccaactttggagggacatgttttctgagaattcatctattttgcctgtggtttgatatttattagttaaaaattgttcataatattctcatattttagtttatatgtccactttatccatagttctctcccatgtttcatttataatattatatatttgtaacttttttcttttttcctcaataagttttatcagaggtttggttactactaatctattaaaagaaataactttttggttttattgatctgcctagtccttcttcaccttgcagtttcttagaatatattttgtgttccttttctaactactttagtacttatgctctagatgatcttcctcacgaccccatgctcatctctctgacctcccctgcaactgcttttagtcctgctgactctgcttagaccwgcaattctccttgctgttcctaaaacgtaccaggcatgctggtgctgagggtctttgctctgttaactctgcctgcattgctttaccccgatcacctctaatataacttcctcattttaaagtctttctcatcctgtcttctcaatgagtcctttctcttctattaaatac

SEQ ID NO: 595066 - DNA, 552 bp, Homo sapiens
ttgtgccattacacgctaccttgggcaacaaaagcaaaactccgcttcaaaaaaaaaaaaggaaattctgcttcaatttccttattatttattagtccattcagattttctgtttcttcttgattcagtcttggtaagttgtatrtttgtggaaatgtttttatttcttctatgttatccaaattgttggcatacaaatgttcattatatgaacaattgtaatcctttgtattttagagttaagttgtattttctcactatttcatttctgatcttatttgttggaatagtcctttttctagttagtctagatacggattggttgattttgtttatcgccttaaaaagaagttcagtattaattctttccaatgggatacgcagatccacaatatctaatgccactgtaatcggagctatgatcttatctctgctaaggcttggcgttgtatctcatctagttcattgaggtataatgatttatttaactacattctataagttttggtatgttgtgttttcatttttgtgtgtcttaaaatacgtttttta

SEQ ID NO: 595067 - DNA, 552 bp, Homo sapiens
ttgtgccattacacgctaccttgggcaacaaaagcaaaactccgcttcaaaaaaaaaaaaggaaattctgcttcaatttccttattatttattagtccattcagattttctgtttcttcttgattcagtcttggtaagttgtatatttgtggaaatgtttttatttcttcyatgttatccaaattgttggcatacaaatgttcattatatgaacaattgtaatcctttgtattttagagttaagttgtattttctcactatttcatttctgatcttatttgttggaatagtcctttttctagttagtctagatacggattggttgattttgtttatcgccttaaaaagaagttcagtattaattctttccaatgggatacgcagatccacaatatctaatgccactgtaatcggagctatgatcttatctctgctaaggcttggcgttgtatctcatctagttcattgaggtataatgatttatttaactacattctataagttttggtatgttgtgttttcatttttgtgtgtcttaaaatacgtttttta

SEQ ID NO: 595068 - DNA, 552 bp, Homo sapiens
ttgtgccattacacgctaccttgggcaacaaaagcaaaactccgcttcaaaaaaaaaaaaggaaattctgcttcaatttccttattatttattagtccattcagattttctgtttcttcttgattcagtcttggtaagttgtatatttgtggaaatgtttttatttcttctatgttatccaaattgttggcatacaaatgttcattatatgaacaattgtaatcctttgtattttagagttaagttgtattttctcactatttcatttctgatcttatttgttggaatagtcctttttctagttagtctagatacggattggttgattttgtttatcgccttaaaaagaagttcagtattaattctttccaatgggatacgcagatccacaatatctaatgccactgtaatcggagctatgatcttatctctgctaaggcttggcgttgtatctcatctagttcattgaggtataatgattkatttaactacattctataagttttggtatgttgtgttttcatttttgtgtgtcttaaaatacgtttttta

SEQ ID NO: 595069 - DNA, 524 bp, Homo sapiens
tcagcccactcaaaatacagttctgtaatcagaatacaaaaacaaccaccaacaacatcagcccaactttctttactgtgtttcatttaatgctgaaatcagacaatgattagaacatgaaactttgtttgaaaaagtatattcaataaattttgtmtttaaaacagagctcttgacctataaagtataaaaagtaattacaatgaaatattcttcagtaaatctgacactttgggattccaggcaaaaggatcgcttgggtgccaagagttcaagaccagcctggtcaacatagtgagattctatctctgaaaaaaaaaaaagaacaaaaaacaaaagttaaacaaatcaataaatctgagatgcactggtataattcactggcttgcccagttggtactctcttagccatggctattcctgatgactaactggcagtaaaagccaggaaattatggaggtctactgaggagccccctctcgaagtgaagttttcccattatttacacttaagaaaaaattaa

SEQ ID NO: 595070 - DNA, 524 bp, Homo sapiens
tcagcccactcaaaatacagttctgtaatcagaatacaaaaacaaccaccaacaacatcagcccaactttctttactgtgtttcatttaatgctgaaatcagacaatgattagaacatgaaactttgtttgaaaaagtatattcaataaattttgtctttaaaacagagctcttgacctataaagtataaaaagtaattacaatgaaatattcttcagtaaatctgacactttgggattccaggcaaaaggatcgcttgggtgccaagagttcaagaccagcctggtcaacatagtgagattctatctctgaaaaaaaaaaaagaacaaaaaacaaaagttaaacaaatcartaaatctgagatgcactggtataattcactggcttgcccagttggtactctcttagccatggctattcctgatgactaactggcagtaaaagccaggaaattatggaggtctactgaggagccccctctcgaagtgaagttttcccattatttacacttaagaaaaaattaa

SEQ ID NO: 595071 - DNA, 518 bp, Homo sapiens
accaacatagattacaagaggaagactcaaagcttccagaatkattttctttctatctaaaatcattttctatctttcatcctatcagcactcataaattacacacactcataacctgccacaatttattgacagattgtgaagggggagcaggcatgtcacatagtgaaagcaggaacaagacagtgaggggggagataccacacacttttaaacaaccagatcttgcgagagctgacctgctatcatgaggagtaccaaggagatagtactaaaccattcatgagaaatccaccctcctaatccagtcacctccctccagaccccacctaccacactggggattacagttcaacatgagatttgggtggggacacagatccaaactatatcacaggggtttccctatgttgcttaggctggtctcaaactcctggcctcaagtgatcttcctgcctcaaccttccaacgtgctggaattagaggtatcagccaccatgcccagccagaaatttctt

SEQ ID NO: 595072 - DNA, 451 bp, Homo sapiens
ccacctaccacactggggattacagttcaacatgagatttgggtggggacacagatccaaactatatcacaggggtttccctatgttgcttaggctggtctcaaactcctggcctcaagtgatcttcctgcctcaaccttccaacgtgctggaattagaggtatcagccaccatgcccagccagaaatttctttctcaaggggcttttcatctcactkgaaattttagtttagggatctcccaacttacaaagggtttgtgttccaaaattttgtttctaagtcaggtaggctcactttcccacagaaagtgagaagaagccagtcccaaagcaagcaataaaagcctgttgcctcacaagtgaactatgatgttgctaaatccatcaggaatagttttacttttgctctttgttgaatgggctactgtgggcctgtgggggcacctaacc

SEQ ID NO: 595073 - DNA, 451 bp, Homo sapiens
ccacctaccacactggggattacagttcaacatgagatttgggtggggacacagatccaaactatatcacaggggtttccctatgttgcttaggctggtctcaaactcctggcctcaagtgatcttcctgcctcaaccttccaacgtgctggaattagaggtatcagccaccatgcccagccagaaatttctttctcaaggggcttttcatctcacttgaaattttagtttagggatctcccaacttacaaagggtttgtgttccaaaattttgtttctaagtcaggtaggctcactttccyacagaaagtgagaagaagccagtcccaaagcaagcaataaaagcctgttgcctcacaagtgaactatgatgttgctaaatccatcaggaatagttttacttttgctctttgttgaatgggctactgtgggcctgtgggggcacctaacc

SEQ ID NO: 595074 - DNA, 451 bp, Homo sapiens
ccacctaccacactggggattacagttcaacatgagatttgggtggggacacagatccaaactatatcacaggggtttccctatgttgcttaggctggtctcaaactcctggcctcaagtgatcttcctgcctcaaccttccaacgtgctggaattagaggtatcagccaccatgcccagccagaaatttctttctcaaggggcttttcatctcacttgaaattttagtttagggatctcccaacttacaaagggtttgtgttccaaaattttgtttctaagtcaggtaggctcactttcccacagaaartgagaagaagccagtcccaaagcaagcaataaaagcctgttgcctcacaagtgaactatgatgttgctaaatccatcaggaatagttttacttttgctctttgttgaatgggctactgtgggcctgtgggggcacctaacc

SEQ ID NO: 595075 - DNA, 451 bp, Homo sapiens
ccacctaccacactggggattacagttcaacatgagatttgggtggggacacagatccaaactatatcacaggggtttccctatgttgcttaggctggtctcaaactcctggcctcaagtgatcttcctgcctcaaccttccaacgtgctggaattagaggtatcagccaccatgcccagccagaaatttctttctcaaggggcttttcatctcacttgaaattttagtttagggatctcccaacttacaaagggtttgtgttccaaaattttgtttctaagtcaggtaggctcactttcccacagaaagtgagaagaagccagtcccaaagcaagcaataaaagcctgttgcctcacaagtgaactatgatgttgctaaatccatcaggartagttttacttttgctctttgttgaatgggctactgtgggcctgtgggggcacctaacc

SEQ ID NO: 595076 - DNA, 512 bp, Homo sapiens
aaattgttcttaagaatgtttatattaatttataattcaaccaacagagtataaaacagatatttttctttacccagaataattattttaaaaattatcagccgggtgcagtggctcatgactgtaatcccagcactttggtaggccgaggtgggcagatcacgaggtcaggagttcgagaccagtctgcccaacatagtgaaatgctatctctactaaaaatacaaaaaattagccaggygtggtggttgcacctgtaatcccagctactcaggaggctgaggcaggagaatcgcatgaacctgggaggcagaggttgcagtgagcagagattgcaccagtgcactccagcccagtgatagtaggagactccctctcaaaaaaaaaaaaagtatccagttttattcttaatatgtagggaataaaaagtaaaatggaaagtgattactgattagcttattcaacatctctctctctctgttatgtagataaaattaattcagttttatgct

SEQ ID NO: 595077 - DNA, 580 bp, Homo sapiens
atacactgaaaaaagggaacacaggctccatgaaatatacccttacaatttcaaacatggtatgatttgtcatgtgtcgaaacccaaaataaaaccgtgtcaatatcaatgtggatatgmtgagcgatgaggacaaatgtgatctgaaaacagaggagcaactcatacacgtgagaatcaatgtcaaaacaggtgctacatgatcccacatgtctttcatgcaacaaatcaaaaggatttacaccattatactaaaaacattcatcatgctctttaacttgcccaataactgagaaggcacacaattacgatgacactccagctgaacgtacacttaacatatcttcagtggaagtgtcctgaattgatcaccttggatatctgtttgctgatacctagtagataatattcattatctctcacacccatgtagtgtaataatttgcctaagtttcatgtatccactagtttaggcttccgaaagtttcttcatccactcttggcaccaaaggataatatattagcctcaataaaaatatcatcaattatcaactttgacatgcttctacaaagtgaaatg

SEQ ID NO: 595078 - DNA, 580 bp, Homo sapiens
atacactgaaaaaagggaacacaggctccatgaaatatacccttacaatttcaaacatggtatgatttgtcatgtgtcgaaacccaaaataaaaccgtgtcaatatcaatgtggatatgatgagygatgaggacaaatgtgatctgaaaacagaggagcaactcatacacgtgagaatcaatgtcaaaacaggtgctacatgatcccacatgtctttcatgcaacaaatcaaaaggatttacaccattatactaaaaacattcatcatgctctttaacttgcccaataactgagaaggcacacaattacgatgacactccagctgaacgtacacttaacatatcttcagtggaagtgtcctgaattgatcaccttggatatctgtttgctgatacctagtagataatattcattatctctcacacccatgtagtgtaataatttgcctaagtttcatgtatccactagtttaggcttccgaaagtttcttcatccactcttggcaccaaaggataatatattagcctcaataaaaatatcatcaattatcaactttgacatgcttctacaaagtgaaatg

SEQ ID NO: 595079 - DNA, 580 bp, Homo sapiens
atacactgaaaaaagggaacacaggctccatgaaatatacccttacaatttcaaacatggtatgatttgtcatgtgtcgaaacccaaaataaaaccgtgtcaatatcaatgtggatatgatgagcgatgaggacaaatgtgatctraaaacagaggagcaactcatacacgtgagaatcaatgtcaaaacaggtgctacatgatcccacatgtctttcatgcaacaaatcaaaaggatttacaccattatactaaaaacattcatcatgctctttaacttgcccaataactgagaaggcacacaattacgatgacactccagctgaacgtacacttaacatatcttcagtggaagtgtcctgaattgatcaccttggatatctgtttgctgatacctagtagataatattcattatctctcacacccatgtagtgtaataatttgcctaagtttcatgtatccactagtttaggcttccgaaagtttcttcatccactcttggcaccaaaggataatatattagcctcaataaaaatatcatcaattatcaactttgacatgcttctacaaagtgaaatg

SEQ ID NO: 595080 - DNA, 580 bp, Homo sapiens
atacactgaaaaaagggaacacaggctccatgaaatatacccttacaatttcaaacatggtatgatttgtcatgtgtcgaaacccaaaataaaaccgtgtcaatatcaatgtggatatgatgagcgatgaggacaaatgtgatctgaaaacagaggagcaactcatacacgtgagaatcaatgtcaaaacaggtgctacatgatcccacatgtctttcatgcaacaaatcaaaaggatttacaccattatactamaaacattcatcatgctctttaacttgcccaataactgagaaggcacacaattacgatgacactccagctgaacgtacacttaacatatcttcagtggaagtgtcctgaattgatcaccttggatatctgtttgctgatacctagtagataatattcattatctctcacacccatgtagtgtaataatttgcctaagtttcatgtatccactagtttaggcttccgaaagtttcttcatccactcttggcaccaaaggataatatattagcctcaataaaaatatcatcaattatcaactttgacatgcttctacaaagtgaaatg

SEQ ID NO: 595081 - DNA, 478 bp, Homo sapiens
gcgcaggagcaaggagctatctttgctgtttgtgcaacttagtcgttacagcccgcgggctctggagaatccatacctaccggggcagaagggatatatcatcagcacagcacagctactctacaaaatcttagaaggcagattcttttaccaggttcctgatccattcctccttactgggcaggacctcgacaactccttcccggggagaatgtaaatctctgtcagctygagaacaccggtggggtggtggaggccccaggtgggaggtcccacccagagaggaggaaagaatcagggatctgcgtaaagaatctgcctggccactatttggtagagcagttgtgatgtgctgggggatcccttccaccccaatcgttttggactctccaaagctggccccaccctctcccccaggccccagttggaaggactcccacagggtgggaactccagaactccctcccagggagaattc

SEQ ID NO: 595082 - DNA, 478 bp, Homo sapiens
gcgcaggagcaaggagctatctttgctgtttgtgcaacttagtcgttacagcccgcgggctctggagaatccatacctaccggggcagaagggatatatcatcagcacagcacagctactctacaaaatcttagaaggcagattcttttaccaggttcctgatccattcctccttactgggcaggacctcgacaactccttcccggggagaatgtaaatctctgtcagcttgagaacaccggtggggtggtggaggccccaggtgggaggtcccacccagagaggaggaaagaatcagggatctgygtaaagaatctgcctggccactatttggtagagcagttgtgatgtgctgggggatcccttccaccccaatcgttttggactctccaaagctggccccaccctctcccccaggccccagttggaaggactcccacagggtgggaactccagaactccctcccagggagaattc

SEQ ID NO: 595083 - DNA, 478 bp, Homo sapiens
gcgcaggagcaaggagctatctttgctgtttgtgcaacttagtcgttacagcccgcgggctctggagaatccatacctaccggggcagaagggatatatcatcagcacagcacagctactctacaaaatcttagaaggcagattcttttaccaggttcctgatccattcctccttactgggcaggacctcgacaactccttcccggggagaatgtaaatctctgtcagcttgagaacaccggtggggtggtggaggccccaggtgggaggtcccacccagagaggaggaaagaatcagggatctgcgtaaagaatctgcctggccactatttggtagagcagttgtgatgtgctgggggatcccttccaccccaatcgtttkggactctccaaagctggccccaccctctcccccaggccccagttggaaggactcccacagggtgggaactccagaactccctcccagggagaattc

SEQ ID NO: 595084 - DNA, 478 bp, Homo sapiens
gcgcaggagcaaggagctatctttgctgtttgtgcaacttagtcgttacagcccgcgggctctggagaatccatacctaccggggcagaagggatatatcatcagcacagcacagctactctacaaaatcttagaaggcagattcttttaccaggttcctgatccattcctccttactgggcaggacctcgacaactccttcccggggagaatgtaaatctctgtcagcttgagaacaccggtggggtggtggaggccccaggtgggaggtcccacccagagaggaggaaagaatcagggatctgcgtaaagaatctgcctggccactatttggtagagcagttgtgatgtgctgggggatcccttccaccccaatcgttttggactctccaaagctggccccaycctctcccccaggccccagttggaaggactcccacagggtgggaactccagaactccctcccagggagaattc

SEQ ID NO: 595085 - DNA, 573 bp, Homo sapiens
tgactcaacacactactgatttcacctacctttcaagggcattggcgggagcttgatttccagttcccacacctcctcctccctcttcctctccaataacattcctgcaatgctcacgttgactgcaacattggctgaaattcctcaccagtccccagatccactacctttgtcgtaagacattgcagttccccagcaccacaargacagaatgtatttccccgcctcttaactttgagctcatcatgtgacttgctttgttcaacagaaagtggtagaagcagtggcatgctggttcccagcccaggcctcaagggttccaagcccaggccttaaggggcctcgcatgctgctctggtgtgcctctgctattgccatgagaggaacacactcaggttagccaactgaccccaggggcaggatgagccatcccagctgagcccaacctggattagcatgctgctaagatattgtggttgtttcttgtgcagcattttatgagccatagggaactgctacaatttttattgtaggaaatttgattattatagaatagaatgaagaagaccaagt

SEQ ID NO: 595086 - DNA, 535 bp, Homo sapiens
cccagggcgggactgcagtagatgctcaacaaggcttctttcctcccaccagcctctccttcccgcaggggcgacaggacttgggggtgttgttggggtctaaacgacccaaaggaaagagacgctgaagtgggtgagctggcctcgcactgcacttcctgctggagttcaaagtcagccctgcccctggaactgccatggccagtttagattgttccagaatcccgctgcaggctgttcaaaaggctcccagctgctatcaggaaatagctcaggaaggtctccgttaaacactaagaaactgagatgcaatcagctggcctggaattcaggaaagtgctggttctgaaattgaggacagaaagracatgtctcggggcgagaagatgtgaacctgccaaccagcctgtgttcttcttccacctgtcctgccacgtgttctgccacgtccatgcctcctgtcccgccaacaccccaggagttggcagattgggaccctactccgtggggaagggaacgctcagtgactgctgcc

SEQ ID NO: 595087 - DNA, 535 bp, Homo sapiens
cccagggcgggactgcagtagatgctcaacaaggcttctttcctcccaccagcctctccttcccgcaggggcgacaggacttgggggtgttgttggggtctaaacgacccaaaggaaagagacgctgaagtgggtgagctggcctcgcactgcacttcctgctggagttcaaagtcagccctgcccctggaactgccatggccagtttagattgttccagaatcccgctgcaggctgttcaaaaggctcccagctgctatcaggaaatagctcaggaaggtctccgttaaacactaagaaactgagatgcaatcagctggcctggaattcaggaaagtgctggttctgaaattgaggacagaaaggacatgtctcggggcgagaagaygtgaacctgccaaccagcctgtgttcttcttccacctgtcctgccacgtgttctgccacgtccatgcctcctgtcccgccaacaccccaggagttggcagattgggaccctactccgtggggaagggaacgctcagtgactgctgcc

SEQ ID NO: 595088 - DNA, 563 bp, Homo sapiens
gtgaccacgttcacagtttctgaggctaaacayttcaacgctccttgtcagtttatgttaggcaataatttgaatgactactggttagctgtttcacttcattcatattaagaaacaatatacaaagggtataaagtgatcagctctgtttacgctgaggaggagggttataaaatcagctaacagggagcagggcagaggggagagtgctcagggtttttgatgtgcttctgatgatcgtttacgaaggaaaatctttggagaaacttttaaatgtagacactctgggaacagtgaaatgatgcaaagccctcaacggcattttcagcatggaccagggagagaggagagagtttccctggaacacacagcttgtcgataagaaagagcctacaaaatactccaggtcaaaaggagcgagatccaggatcagttgaactcctgcaagacctgccagtgccgaattacagcaatcttggtgcctgctgaggtgggagtcagggaggctgtggaattctgagcttcctggttggctgaggagagagggctcaggggagaggtct

SEQ ID NO: 595089 - DNA, 563 bp, Homo sapiens
gtgaccacgttcacagtttctgaggctaaacacttcaacgctccttgtcagtttatgttaggcaataatttgaatgactactggytagctgtttcacttcattcatattaagaaacaatatacaaagggtataaagtgatcagctctgtttacgctgaggaggagggttataaaatcagctaacagggagcagggcagaggggagagtgctcagggtttttgatgtgcttctgatgatcgtttacgaaggaaaatctttggagaaacttttaaatgtagacactctgggaacagtgaaatgatgcaaagccctcaacggcattttcagcatggaccagggagagaggagagagtttccctggaacacacagcttgtcgataagaaagagcctacaaaatactccaggtcaaaaggagcgagatccaggatcagttgaactcctgcaagacctgccagtgccgaattacagcaatcttggtgcctgctgaggtgggagtcagggaggctgtggaattctgagcttcctggttggctgaggagagagggctcaggggagaggtct

SEQ ID NO: 595090 - DNA, 585 bp, Homo sapiens
taaccatcattatgacggtaccctgtcagtgctgggggatgctttatgagggaggtggaagacgaggaggaggcggagagagaaagagaatcagcttctgttatccacagcaggatgcctctggagttgtttgaagtagaaaggtagtccatgtgatcccgtttatattgtaatattgcttgagtaggtctttaaaattacaaagtactagatagagctaactcagcccagtcctaataatcacgactccttgagtatctgtgaggcttctggtacgttctctacagtcccaacattgggaccgactgaaccatgtgttgcacattaaatccagggtccgggacacctcccaggccacctctgtcatttcacaagwgccaggccatcttctcagtgcttgtgagcatcccttcacactcaatccttcccacacacctgccaaagggaaggaggcaggaaccacctacggatgccaagaaacaggcggcatggtcctcccgccctcgaggctgttaccacctggaacaccccaccccaaaagtaagaccacctaccatctgggcttctgtctcacacaggatatag

SEQ ID NO: 595091 - DNA, 568 bp, Homo sapiens
tagtccatgtgatcccgtttatattgtaatattgcttgagtaggtctttaaaattacaaagtactagatagagctaactcagcccagtcctaataatcacgactccttgagtatctgtgaggcttctggtacgttctctacagtcccaacattgggaccgactgaaccatgtgttgcacattaaatccagggtccgggacacctcccaggccacctctgtcatttcacaagtgccaggccatcttctcagtgcttgtgagcatcccttcacactcaatccttcccacacacctgccaaagggaaggaggcaggaaccacctacggaygccaagaaacaggcggcatggtcctcccgccctcgaggctgttaccacctggaacaccccaccccaaaagtaagaccacctaccatctgggcttctgtctcacacaggatatagcctctcagtggccaactgtttttaataagggtctgccagttctaatgatattgcacagacacggggaaggggagagaggagacaggactttgtcatgagctgttcatccctccaacagcagtgctgg

SEQ ID NO: 595092 - DNA, 585 bp, Homo sapiens
taaccatcattatgacggtaccctgtcagtgctgggggatgctttatgagggaggtggaagacgaggaggaggcggagagagaaagagaatcagcttctgttatccacagcaggatgcctctggagttgtttgaagtagaaaggtagtccatgtgatcccgtttatattgtaatattgcttgagtaggtctttaaaattacaaagtactagatagagctaactcagcccagtcctaataatcacgactccttgagtatctgtgaggcttctggtacgttctctacagtcccaacattgggaccgactgaaccatgtgttgcacattaaatccagggtccgggacacctcccaggccacctctgtcatttcacaagtgccaggccatcttctcagtgcttgtgagcatcccttcacactcaatccttcccacacacctgccaaagggaaggaggcaggaaccacctacggatgccaagaaasaggcggcatggtcctcccgccctcgaggctgttaccacctggaacaccccaccccaaaagtaagaccacctaccatctgggcttctgtctcacacaggatatag

SEQ ID NO: 595093 - DNA, 426 bp, Homo sapiens
tgggtcactgctaaactttcttccgtttctgtgcttctggggatcagttaaaatacgcactcaggatactcagcacacacaaatgtcccacaaagaccaagtaatactgacactaccctttaagacactctgtgtaaaaaaaactggaagacacagagagtggcgcagcattttaagtcttctattgaccaaatttggtccttcctaagaacttcaattaacctctcacratttatttacagaatgggtagaagctcaataatgatgattatgataatagtagcaaaaccagcaccaataatattagtaaccgcagtaataataaggatttcactaaacaaataccatgcaggagattttgttgggggagtttttataattctcacaacaagttcccatcgtgctgcttatgacggagacagaacg

SEQ ID NO: 595094 - DNA, 426 bp, Homo sapiens
tgggtcactgctaaactttcttccgtttctgtgcttctggggatcagttaaaatacgcactcaggatactcagcacacacaaatgtcccacaaagaccaagtaatactgacactaccctttaagacactctgtgtaaaaaaaactggaagacacagagagtggcgcagcattttaagtcttctattgaccaaatttggtccttcctaagaacttcaattaacctctcacaatttatttacagaatgggtagaagctcaataatgatgattatgataatagtagcaaaaccagcaccaataatattagyaaccgcagtaataataaggatttcactaaacaaataccatgcaggagattttgttgggggagtttttataattctcacaacaagttcccatcgtgctgcttatgacggagacagaacg

SEQ ID NO: 595095 - DNA, 561 bp, Homo sapiens
tagtcaggagacgccaggtgatgctacagtagcaaacgacccccaaaatcaaagtggcttaaacaacagaggttgacttttcatctatacaaatgctcatgggataatgggcattctctgctcatatatcactcaagaatcaagcctgctggttgccacacctgagggtaragaggtctggaggatctctggaggtctggaggtcttccttgagctgacaataaactgtgccaaccttcaagggacatatgtgactgctgctcacagtcactggtagcgcttgtcacatgatcccctcagccacagggggagcaggaactgcaaatctctgggtgcctagaaggtagagagtggaacctatttagtgaacagcgttaatgactaccactctggggacagaagttggaaggagaatttctttcctccataaacccttttaaactcctgaatatattaaccatatatgaaatgaaaaaattttaagtactctagatgagttaagtagcgtttaagataagcatgttataagctccaggtgacttgtagagaccatacatcccc

SEQ ID NO: 595096 - DNA, 579 bp, Homo sapiens
ttagcattaagaacaaatggtctatacctgcrtgcaatgggaatgagtcccttaaacatcaggttgcaggaaagaagccagacacaagagaccccatactgtgtgagtccatttatttaaattacaaaacaggcaaagctggtcgatggtgttagaggtagggttgtgctttttcttcaagggtaggtgatggcgagaaggggctcaaaggaagatccttccctgctccgagcctcagtttcttcatctgtgaagtgggagaaacgccctgtgtggtcagcgctgcatggatcaggtgggctgatgtgcacatctcctaggacgctggccacgttctgtttcttggtctgggcactggcttcacaggtgtgttcagtttgtacaaatgcattgagcttatcatatatgcacttttctgcatgtatatcacatgacttaagaattacgaataaaaagaactaaaagcccagaagaagggcttaaatgatctccctccctctccctcagtcatccctgagaccctcagtcatccctgagaccacagtgactggcaccccggctctgagccccacactttcg

SEQ ID NO: 595097 - DNA, 251 bp, Homo sapiens
ttgctatgattcccaggctggcctccaactcctgagctcaagagatcgtcctgcctcggcctcccacagtgttgagtttataggtataagtcaccacacctgacccayaggtagtttataagaacaactgtgagcatggttatggatcctaaggtgtaagactttacgatctataataaactataataatcgtttaaaagtctcaagataattcaagttgctttaatttaatttccctaacacgtcccatt

SEQ ID NO: 595098 - DNA, 251 bp, Homo sapiens
ttgctatgattcccaggctggcctccaactcctgagctcaagagatcgtcctgcctcggcctcccacagtgttgagtttataggtataagtcaccacacctgacccacaggtagtttataagaacaactgtgagcatggtyatggatcctaaggtgtaagactttacgatctataataaactataataatcgtttaaaagtctcaagataattcaagttgctttaatttaatttccctaacacgtcccatt

SEQ ID NO: 595099 - DNA, 251 bp, Homo sapiens
ttgctatgattcccaggctggcctccaactcctgagctcaagagatcgtcctgcctcggcctcccacagtgttgagtttataggtataagtcaccacacctgacccacaggtagtttataagaacaactgtgagcatggttatggatcctaaggtgtaagacyttacgatctataataaactataataatcgtttaaaagtctcaagataattcaagttgctttaatttaatttccctaacacgtcccatt

SEQ ID NO: 595100 - DNA, 555 bp, Homo sapiens
ttgtggactctgagccatgctggcctggccccacctccctctccagcctctgctgcagccacactccacttgaaggcctgccacagggccttcaaatatgctattccctcccaggtgctcttttcccagctatcactgtagccagctcctcaccttcaggtctcagattaaacttcatcagaccttccaattctaatgatctgtttgtgtggttatttgrccatttccccagtagactctaagcttccggagggcagggccatgtctgctcacccatgggtgaatacctgcccccagcactgccctggctcatgtggagtctctgcatatttttggacataacaaacaacgtagtagtgatctagcccctgcgacaagacgtttagaagcctctctcccatggagcactggtgccttcccattagccaagatgtcggcacaatcactgtcctgtttcttaggcctcaccagggaggcctctgcgcagtgatgtgggatcagggaacttggcctgagcataggcttgaacagatgtgagggaaagggagaaacagt

SEQ ID NO: 595101 - DNA, 581 bp, Homo sapiens
ctgctcagaaggtaaaggtctcacatcatcctggtgttcccagaaaagggttcctggaggagataggatggaagaatcttgaagaatggtttgaattggcaagtaagaaagtgaaacagatccttctggaaggaagaacaattggatcaaagctgaggtcatatgtctggagagtagttagttagttgatccgctagaatagcgtttctcaacctctatgtttttgacattttgggctggataattgtcatttgcattctaagatgttgaccagatccctggtttctactcagtaagtgccttctgcacccctctagttgtgcagaatgttctctgaggcacaaaatattttgcccctcactcccagcaactctgttaggaaaaaaaagtttgtgtcgaggagcaatgagaaataaagcagggatatagaccagattcagattgtgaagcacctcacatgccagataagtggtttggacttgyctatcttggtaatagaggacattcatcttttgtgcaagagaatggcatgatattcatgttttatgaagatttattaacatttggcactttcttgtgat

SEQ ID NO: 595102 - DNA, 619 bp, Homo sapiens
atacagcctgcaaaaccatgaacgaatcaaacctcttttctttataaattccccagtctcaggtatttataacaatgcaagaacagactaatgcacccacggccaaggcagatgtttctatgtgagggttcctatcaatttccaagttctgagaaatcaatgctacattgtcgcacagaagtgcttggtgttgctatgggaatttgtgaatacgaaccataattgggcttacacgagagctgtcgtattaataagaaawgacatgtggaagcttttccagttagaggattgtgctgtatcgaatattatgtgaataatctgtctaagccaagagaaatgaccacctctaagggtacatcttagttacttctcacactgcctctgcagtgtttcctcctctttaaagaaacaaaaggatcagccaagatgttacgatgcacaattgacttttctaattcctttgctcattaattcagttcatattatttataataaatcttgactttttggggcttttctctctctacttccataattccttcaaagatcatatttatcttaagaacaaaataaaacaaaacaggcttccaaatattggaccataggagtctataaacag

SEQ ID NO: 595103 - DNA, 592 bp, Homo sapiens
atcatggaaaaagtgctgtggggaccaaaaggaagggttgygcaactgctgaggagtgaccgaaggctgcacagaagaggccatagctaagcctcatcttgtgggatgaattggatgagtttccaccatccaaagggatggtagaaatggggtgtgggaaagttatgctagagctgtgctgtccattatggtagtcatttagtcacagtggttattgagtccttgaaatgtgctgtccaaatcaagctgtgctttaagtataaaatacataccaggtttcaaatatttattatactatgaatgaaaaattgttccttgataatttttatattgatgacatgatgaaatgataatattttgggctaaataaaacatataaatgaacttcacttttctatttacttttaaaacatgattactgaaaaatttaaaaggtcatttgtggctttttcttttaatatatactggatggtgctgctctagactgaaggagccccagagaagcagcacagagcatggctttttcagttgtgtggtgtggcattgacaattctgactttgacgctgactccaacactctggatctaaccca

SEQ ID NO: 595104 - DNA, 592 bp, Homo sapiens
atcatggaaaaagtgctgtggggaccaaaaggaagggttgcgcaactgctgaggagtgaccgaaggctgcacagaagaggccatagctaagcctcatcttgtgggatgaattggatgagtttccaccatccaaagggatggtagaaatggggtgtgggaaagttatgctagagctgtgctgtccattatggtagtcatttagtcacagtggttattgagtccttgaaatgtgctgtccaaatcaagctgtgctttaagtataaaatacataccaggtttcaaatatttattatactatgaatgaaaaattgttccttgataatttttatattgatgayatgatgaaatgataatattttgggctaaataaaacatataaatgaacttcacttttctatttacttttaaaacatgattactgaaaaatttaaaaggtcatttgtggctttttcttttaatatatactggatggtgctgctctagactgaaggagccccagagaagcagcacagagcatggctttttcagttgtgtggtgtggcattgacaattctgactttgacgctgactccaacactctggatctaaccca

SEQ ID NO: 595105 - DNA, 592 bp, Homo sapiens
aaaaaggcaaagggcattaaggagacagcttgggaggatgggaggatgttttgtggaagttctggagaagaaagaaaaaggaaccaggtgtatttataggctaataatgtgcagaagggggaaaaatgtgctgccttgggcaattttcatcaagttaatggatgttgccaattactgtggtaacatttttaattgtatctcagctctgaagagaataaaatcagaatttcctagtctttgcctcgggactgctaggggcatgcattttggtacatgatatyggtgtagacagacctgaccagagtctacactgacagcccacttcctgggaaagccttacttacagctatcccagacccagactgaggttggaatcaatggtagaaaatgggcatctgctttacgggttcatagtataagtgggaagacaacagggaagaggttgtaaccatatggggacccccaggaagaagacaataaccatagtagccccaagggtaatgtaacgatagctagagatttgtgcactatcttatgagagacatgttcctgcgacaacataatgctctgtgtgtgttatctcactgaattc

SEQ ID NO: 595106 - DNA, 592 bp, Homo sapiens
aaaaaggcaaagggcattaaggagacagcttgggaggatgggaggatgttttgtggaagttctggagaagaaagaaaaaggaaccaggtgtatttataggctaataatgtgcagaagggggaaaaatgtgctgccttgggcaattttcatcaagttaatggatgttgccaattactgtggtaacatttttaattgtatctcagctctgaagagaataaaatcagaatttcctagtctttgcctcgggactgctaggggcatgcattttggtacatgatattggtgtagacagacctgaccagagtctacactgacagcccacttcctgggaaagccttacttacagctatcccagacccagactgaggttggaatcaatggtagaaaatgggcatctgctttackggttcatagtataagtgggaagacaacagggaagaggttgtaaccatatggggacccccaggaagaagacaataaccatagtagccccaagggtaatgtaacgatagctagagatttgtgcactatcttatgagagacatgttcctgcgacaacataatgctctgtgtgtgttatctcactgaattc

SEQ ID NO: 595107 - DNA, 584 bp, Homo sapiens
agatgctcttgggtgataggaatgtgaagtcagagctgagaatcatttattagagccaagatacaatctcagactgtaacaggtgctccttttcacagatcactaatgcagctcagarcataaattccagagccagaccctgggttagagtcttggctccatcactcagtcactgggggattctaggcaatttgcttaacttttctatgcctcaaattttttcatcggcacaatggggaggtaataatggcacccttgtcattgtttttatgagaactaattgattaaatgtatgtaaaacatttggaagaaagagaagcacatgttaacactttgcagtatgtaacacttagtatgatagtgctcaaaatatcgtaagtgcaactaatatttatagaacacctttaacgtaccaagaattttactattaatttagatatatgacctcaatctttaaacaaactttgagatagtaatataatctttttttcttttttttcagatgaggaaatggagattttgaaatttccagttgtgtaactattgacacagagtgagaaagagagatggagcctggattcaag

SEQ ID NO: 595108 - DNA, 489 bp, Homo sapiens
tttttttttcaggcagttttaataggatgcttgaaaattcatctttactcttttgcagacattaagcacagggagctttatgtgtcctgaggctagttctgcactgaatactgctcatggccttctggtctatcctggcctaaatttggtcctagaaatgtgaaggaacttggatgcttgagagggaagaggtgccaggggcaattattaacctgcttggcatatctgagcaggcatgcctctcctcccctccctaatacctgtggcaatgtcacggaccctcttacacatgcctcacctcattctatcatcacagacctcaaaaaagtgaagcccaagccccaagttttcttttcttcagccatgtttaatccttcttaaggtttctttgcaaaaatcttcastcactactcctctactgttggcccaacctcctttttctattctcaacttttccttcttaccaattaccttcaatatgagtgactt

SEQ ID NO: 595109 - DNA, 427 bp, Homo sapiens
ggaagagggggaagtcccaagatagtgacaggaagaatggatggagcattgatacaactaggggagataaggaaaaaaaatcagattggagtttggcagatgatgtggatgatttttaaaatatttcataagtgtaaccaataatataagtttgagagagagagaggtaatagaaagtgagagagagattcacttagagtatataactataattagtcaagggagaatttgaaggagcaactatatctatggcctcttctagcctctcctgagggagacaattcaattcaattttgttgagcctgtagaattattgctatatwttgttttcaaaagttagggaagaagaaaaacataagctcatatgtaataaccttacaatttaattcagaaaaatgtcaaatccacatttctacaaggagcaaca

SEQ ID NO: 595110 - DNA, 582 bp, Homo sapiens
gaccactcctcctccaattagttcatgtgatttgcataaaactctccccaaccttgagatctggattagcacatcatccaggtccaatccaactgcagtggccttggccattagtttagggtgggcawgccacacagtgagaggcagtcagagccaatcccaagactttgtgctagaggaaggagctctctttccaccagagttactgagagactaggacagaagcatggagttgatagcagccatcctgcccctctgaggggaacgtcgcctgagaacaaaaacaccaccagaaaagagaagcaaagcattgaaagagcaaaacaagacagcaacactggcacaatatttgctcttagacctggctaaacttgaagccaggtcttctcttgaacatcacagctaacttagcccataaattcacctttggctaattcagttgaggtatcctgtcattttcaactaccattccttactctacacagcatacaaccacatgtaaaacttagaaactaggtccagagaaagaaatgcattccatagattacatcagccagaaaacaccccatgaaagaggccaag

SEQ ID NO: 595111 - DNA, 559 bp, Homo sapiens
ttcaactaccattccttactctacacagcatacaaccacatgtaaaacttagaaactaggtccagagaaagaaatgcattccatagattacatcagccagaaaacaccccatgaaagaggccaagtcttagaggctggtccattgtgctttggctgatacaattcttattccactacagggaatataaaaartgatctcagtgagttccttctaatcaaggacctcatgatttcaagtggtaaacaactgcatgtttagacccaacataaatgtgagcaaagtttaagggataaggagtggatcataacagacaaggatccacccttgtgaaacaaatgaaacttaaggaagaccatggcactttagaatgcagcatttattgagcaacattttatgtgctaggacttctcacatctctatctccatattctatttccaataataatactactaataataatagaagccataaagcccatgagtgcctccccatttttttagactggactgtgccatctttaaaagtccatgttttaaccatatcctatgctgctagca

SEQ ID NO: 595112 - DNA, 591 bp, Homo sapiens
cagcaatcttcatcttctataataattcatataagagggaacacaaaaaaaagtcatcaccatttgaaagaaatagataccgttataaaattgacagctattttttgttgttgttgttgttactgcttttagactacagacatggtgctgagccctttcagctctacaatttcttcagtgttatgtgtctgctcrctaaaaatcatgtaatattttaggtttataaaatatatatttataaggccaggcacagtggctcacacctgtaatcccagcactttgggaagctgaggtgggtggatcatgaggacaagagattgagaccatcctggccaacatggtgaaaccttatctttactaaaaatacaaagattagctgggcgtggtggtgtgtgcctgtagtccagctactcaggagggtgaggcaggagaattgctttaacctggaaggcggaggttgcagtgagccgagatcgcgccactgcattccagcctggcgacagagcgagactccatctcaaaaaaaaaaaaaaaaatatatatatatatatatatatatttatataatatttctaatatgtaatacataac

SEQ ID NO: 595113 - DNA, 591 bp, Homo sapiens
cagcaatcttcatcttctataataattcatataagagggaacacaaaaaaaagtcatcaccatttgaaagaaatagataccgttataaaattgacagctattttttgttgttgttgttgttactgcttttagactacagacatggtgctgagccctttcagctctacaatttcttcagtgttatgtgtctgctcgctaaaaatcatgtaatattttaggtttataaaatatatatttataaggccaggcacagtggctcacacctgtaatcccagcactttgggaagctgaggtgggtggatcatgaggacaagagattgagaccatcctggccaacatggtgaaaccttatctttactaaaaatacaaagattagctgggcgtggtggtgtgtgcctgtagtccagctactcaggagggtgargcaggagaattgctttaacctggaaggcggaggttgcagtgagccgagatcgcgccactgcattccagcctggcgacagagcgagactccatctcaaaaaaaaaaaaaaaaatatatatatatatatatatatatttatataatatttctaatatgtaatacataac

SEQ ID NO: 595114 - DNA, 577 bp, Homo sapiens
acttatttggcttcaaatgtactgccagcttgttctccaaagtagttgttcaaatctacactgctacccaggacatactagggttcccactgaacctcaacctcacccatactgaaattacaatgttcttaattttgcaagtcttgtgggtaataaatagtcccttactatagtcttaatttgcattgcattgattactaatgtggttatgccttttttcatgttaattttctgtcgtagtccatttagactgctgtagcaaaataccataaactgggtagcttataaacaacagagatttacttctcacagttatggaggctgggtagtcccagatcaagataccagcagatacrgtgtctagtgagggcccatttgatggttcatagatggcaccttctagctctgttctcagatggtaaaagaggagaactttgatctcttcagccccttataggtgtgttaatcacattcatgacctaatcactttccaaaggtcccacctcctaaatatcatcaccttggagattaagtttcaacatataaattttgggggaaagcaaacattcagaccaca

SEQ ID NO: 595115 - DNA, 584 bp, Homo sapiens
gtctcactctgttgcccaggctggagtgcagtagcatgatctcaatcttcggctcactacagcctttgcctcctgggttcatgcaattcttgtgcctcagcctcctgagtagctgacattacaggcgcatttcaccatgcctggctaatttttgtatttttagtagagacagggtttcaccatgttggccaggatggtcgtgaacccctgagctcaagtgatctgcctgctttggcctcccaaagtgctgggattacaggcgtgagtcaccatgccaggccgaagatatttrtcttaattcttaattttaatgatgcagaaaatacccattattggaaacttaggttttgataaaatttgaatatagaacaaattctcttaaacttatgaatgttcatctcaccaaaggtcagatattcatctatcacatttctgtgttcttgtaaagaaaggtgggatgtgttgcatttttacatcttgtaaatttgtttgagaattaagatgaaaccagatttagaacatacccatgttaaatatgctaggatgtccaatataccttgcttcagtagcagtttcccaacctt

SEQ ID NO: 595116 - DNA, 575 bp, Homo sapiens
gaaactgctactgaagcaaggtatattggacatcctagcatatttaacatgggtatgttctaaatctggtttcatcttaattctcaaacaaatttacaagatgtaaaaatgcaacacatcccacctttctttacaagaacacagaaatgtgatagatgaatatctgacctttggtgagatgaacattcataagtttaagagaatttgttctatattcaaattktatcaaaacctaagtttccaataatgggtattttctgcatcattaaaattaagaattaagataaatatcttcggcctggcatggtgactcacgcctgtaatcccagcactttgggaggccaaagcaggcagatcacttgagctcaggggttcacgaccatcctggccaacatggtgaaaccctgtctctactaaaaatacaaaaattagccaggcatggtgaaatgcgcctgtaatgtcagctactcaggaggctgaggcacaagaattgcatgaacccaggaggcaaaggctgtagtgagccaagattgagatcatgctactgcactccagcctgggcaacagagtgagac

SEQ ID NO: 595117 - DNA, 615 bp, Homo sapiens
ggatgacagcacatatgtttcagcatggttcactgaatattttaagcccattgttgaggcctcctgctcaggaaaaaagtttctttcaaaatattactgctcattaataatgtacctgggccaggtatggtggcttacacctgtatcccagcattttgagaggccaagacaggaggaacacttgaggccaggagttcaaaaccagcctgggcaacataacgagacctcatctctgcaaaaaattaaaaaattagctgggcatggtgtcatgtgcctgtagtcccagctacttgggaggctgaggcaggaggatcacttgagcctgggaggtggaggctgcagttgagctattattgtactactacascagccttggtgacagagtgagactgtctctaaaaataagaataaaaaatgatgtatttggtcacccaagagctccaatggagatgttcaaggagatgaatgttgtctttatgcctgttaacacatccattccatagcgcacagatcaaggggtaatttccactttgaagtcttgttacttaagagatatatttcataaggctgtacctgctataggtagtagattcctctgatggaactgggcaaagt

SEQ ID NO: 595118 - DNA, 508 bp, Homo sapiens
tcttttttctaaacattgaccatttcaaagaagcatctttcataattaaaaaataacctggtctggcccattggctcacgcccgtaatcccagcactttgggaggctgaggcgggtggatcacctgaggtcaggtgttcgggaccagcctggctaacatggtgaaaccctgtttctactaaaaatacaaaaaattagctgggcatggtggcacacacctgtaatcccagctattcaggaggctgaggcaggagaatctcttgaatcygggaggcagaggttgcagtgagccaagatcgtgccattgtactcccgcttgggcaacaagagagaaactccatctcaaaaataaataaataaataaccaacctaatttggctgggcatgctggctcacacctgtaatcccaacactttggaaagccaacataagaggatctcttgagcccaggagtacaagaacagcctggacaacatggtgagaccccatttctacaaaaaacgaaaaat

SEQ ID NO: 595119 - DNA, 298 bp, Homo sapiens
taatgatgccttctccttatgatactctcctacctcttggagagaacgtgcattgagaagctcaaccttygtctcagcaaggctcaccagatcaataatcagatctgagcaatggaaaatactcagagaaaccatctcatttatgctgttgtagttggttcatgtcatatctaattcattctgtcttgaaacaggagaattaccctagatacaaattgtgagtgaatacagggggaaagcttagtaaataaaagcaaattagaatattcacttcttttaaaataagattaaaaaataa

SEQ ID NO: 595120 - DNA, 575 bp, Homo sapiens
tttgtgtcagaaaatgaagttctatacatgattcaccaagttccaaagttatagctcaggtatttgactgaaatagaaatacttttcatcttgggccattataaaaattaagaaaaaagataaataaaataaaatgaaagtaccattggaagaatcacaaatggaaggaaaaggccaaagcctttcagtcttataatatattataaagacctatagttgtatttattttgaaaaagtaatcacttagaccttactgctcttaagaaaggtggctatgtcctctaattgggacgtgattatgtcatttggctkgatgttattttgttgtccaggaaaagtaaaacaagtatgttttcttgagtaaaagctcttgtcttataaatacattggtttgctgcctttaatagagacttgatttactttaatgtggtaagtgaaaggagagaaagaaatggaacaagcaaaggcactccaaattattttcacattctattatgatattatcaataaaaccattattttctttctttttcattgttttctttttagtatttgtagcatcaaaatatctaact

SEQ ID NO: 595121 - DNA, 575 bp, Homo sapiens
tttgtgtcagaaaatgaagttctatacatgattcaccaagttccaaagttatagctcaggtatttgactgaaatagaaatacttttcatcttgggccattataaaaattaagaaaaaagataaataaaataaaatgaaagtaccattggaagaatcacaaatggaaggaaaaggccaaagcctttcagtcttataatatattataaagacctatagttgtatttattttgaaaaagtaatcacttagaccttactgctcttaagaaaggtggctatgtcctctaattgggacgtgattatgtcatttggcttgatgttattttgttgtccaggaaaagtaaaacaagtatgttttcttgagtaaaagctcttgtcttataaatacattggtttgctgcctttaatagagacttgatttactttaatgtggtaagtgaaaggagagaaagaaatggaacaagcaaaggcactccarattattttcacattctattatgatattatcaataaaaccattattttctttctttttcattgttttctttttagtatttgtagcatcaaaatatctaact

SEQ ID NO: 595122 - DNA, 567 bp, Homo sapiens
ttatcattttaaggataaaaatctgagtcataaaaagcacaggactagtccaaaaccacaaaaccacaaaaagtttctgctgatgggactgaaatcaggcagaataaattaaggcttcacaatattcgtcaaccagacgggttggaacagatttgaaagatatcaaattcagctagggtgatttaagtttttaaaagtgtttgacatttcacattcaaaaaccacaaagccaatatcttagagacatttgcttaaacaattatttgctctgacaatgaactgcaaagaccaggggtcaagtttcaatcctgaattggtataaataagacagatgattcttaccatgatcytctgaagagactggtgacctaaaaggaaataataagcatgatcaatattttatatgataattataatgataatcaagaataatttcatagtaattttaccctcaaattgaattaaatggaaagtcaatatagtagacagtgtaattaatgtgttgattgcatggtatatttcaatcaacaattcccaactcttacctggattggttggatgttacag

SEQ ID NO: 595123 - DNA, 573 bp, Homo sapiens
tgaggtcaggattttgaaaccagcctggccaacatggtgaaaccccgtctctactgaaaatacaaaaagtagctgggcatggtggtgggtgcctgtaatcccagctactcaggggactgagtcaggagaatcacttgaacctgggaggcagaggttgcagtgagccgagaccgcgccaytgcactccagcctgggtgacaagagtaaaactctgtctcaaaaaagaaagaaagaaagagagagagggaggggaaagaagttagctcaggagagaagaaatattctgaaatcagcaatataagtagttattttaacaacagaggttcaatcccaaaaagagataattatcttaaacctgacaactgaggcatgcaggaaagccctctggttattcttttcaccacacctgaaagacatgtggttgtatcccagactgtttatttttcctccatgtatactttatcttggagcaagcatctgcccttatagtgtaaactattactagcattcttatagctgtcctcttcacttctttcctgatcatgagtcctttagctacagaatattcatatt

SEQ ID NO: 595124 - DNA, 573 bp, Homo sapiens
tgaggtcaggattttgaaaccagcctggccaacatggtgaaaccccgtctctactgaaaatacaaaaagtagctgggcatggtggtgggtgcctgtaatcccagctactcaggggactgagtcaggagaatcacttgaacctgggaggcagaggttgcagtgagccgagaccgcgccattgcactccagcctgggtgacaagagtaaaactctgtctcaaaaaagaaagaaagaaagagagagagggaggggaaagaagttagctcaggagagaagaaatattctgaaatcagcaatataagtagttattttaacaacagaggttcaatcccaraaagagataattatcttaaacctgacaactgaggcatgcaggaaagccctctggttattcttttcaccacacctgaaagacatgtggttgtatcccagactgtttatttttcctccatgtatactttatcttggagcaagcatctgcccttatagtgtaaactattactagcattcttatagctgtcctcttcacttctttcctgatcatgagtcctttagctacagaatattcatatt

SEQ ID NO: 595125 - DNA, 561 bp, Homo sapiens
tttcgttaattctttaaatattcatcatttctagggtcaaaaaagttaaatctaaaaaaaaaagcagcaaattatatttcctcttgtttccagaacactctatgcatatatccataatagcacttattagaaggaactttaataattggtttaatatttcccctttaaatataagctcttcaagggcaataattatttcttctttagttgtatatcttcagtgmctgacttcagtcactgaaggtgcccaatactgatttgttcaatacacgattgactgaattgtttaccctatttcttagggtaatcacaatgaaatcacaaatcagacctcacacattatagttaaacatttgatagcattatctttccttgaagacagaaatcctctgccaatcataaaaacccattagccttgtgcagctgatcgggtaccagatacctgcctagacacaattatctggattgaatatctaccctcggtgtggttcactacactgtttcccctgtgtcttagtctagtggcaagatattatttgtgtgacagtccattttagttct

SEQ ID NO: 595126 - DNA, 561 bp, Homo sapiens
tttcgttaattctttaaatattcatcatttctagggtcaaaaaagttaaatctaaaaaaaaaagcagcaaattatatttcctcttgtttccagaacactctatgcatatatccataatagcacttattagaaggaactttaataattggtttaatatttcccctttaaatataagctcttcaagggcaataattatttcttctttagttgtatatcttcagtgcctgacttcagtcactgaaggtgcccaataytgatttgttcaatacacgattgactgaattgtttaccctatttcttagggtaatcacaatgaaatcacaaatcagacctcacacattatagttaaacatttgatagcattatctttccttgaagacagaaatcctctgccaatcataaaaacccattagccttgtgcagctgatcgggtaccagatacctgcctagacacaattatctggattgaatatctaccctcggtgtggttcactacactgtttcccctgtgtcttagtctagtggcaagatattatttgtgtgacagtccattttagttct

SEQ ID NO: 595127 - DNA, 245 bp, Homo sapiens
ctgatgcttccactgcttccttctcaagataaagaatggaaacttgttctctccccttttagcaaagaacttccctagagacttatacagttctaacactccagtttttttcaatctatttttcagaactgttaactgatatgtatatatgtataaaagacaaaacatcaacactttttcrctgctaaaatacttcctcctcttctctcctgcttcctctggtgactttctcaccatccacaaaa

SEQ ID NO: 595128 - DNA, 545 bp, Homo sapiens
aatcaaaacaaaattaaaaaaaaaaagcccaccaaccaaataaacaaagaaaaagactgcaattaaaccaatcaaggttcactagtagggaaaagaaaaattattaaagatattgggtctttttattttcttgtggattaaattaacttcccctagggctgtgcaaactctgaactaacatataggaggtttttgttaaactcagagaggtgtaattatatttccatggtgtgatggtgaattttaggtatcagtctgactggattaaccaatacctagggaactagtgaagcattgtttgtgggtgagtctgtgaaggtgtttctagagaagagagatatgtgagttggtgagctgagtgggagcctcatctctcaatgtgtgtgggcaccatccartcagctgacacctcagatataaagaaaaaggcagaaaaaaggcaacttcctccatctctctcctgaaacttgttctgaagctttcagacttgagcttagccaggataccggtattctcaggacaccagcttagagacagcctatgtt

SEQ ID NO: 595129 - DNA, 545 bp, Homo sapiens
aatcaaaacaaaattaaaaaaaaaaagcccaccaaccaaataaacaaagaaaaagactgcaattaaaccaatcaaggttcactagtagggaaaagaaaaattattaaagatattgggtctttttattttcttgtggattaaattaacttcccctagggctgtgcaaactctgaactaacatataggaggtttttgttaaactcagagaggtgtaattatatttccatggtgtgatggtgaattttaggtatcagtctgactggattaaccaatacctagggaactagtgaagcattgtttgtgggtgagtctgtgaaggtgtttctagagaagagagatatgtgagttggtgagctgagtgggagcctcatctctcaatgtgtgtgggcaccatccaatcagctgacacctcagatataaagaaaaaggcagaaaaaaggcaacttcctccrtctctctcctgaaacttgttctgaagctttcagacttgagcttagccaggataccggtattctcaggacaccagcttagagacagcctatgtt

SEQ ID NO: 595130 - DNA, 214 bp, Homo sapiens
ttttaattaataacttattgtggaacctttactagaacatcaataatggctttttttgtacaagttttgttgaggttcattcacttactgtgaaagtcatgttctaatgtatttaattcagagattgttagtatatcacacttgagcagccatcagaactctctactgcctgkacacttttatcacttccagaagaatcccaatacccataaac

SEQ ID NO: 595131 - DNA, 214 bp, Homo sapiens
ttttaattaataacttattgtggaacctttactagaacatcaataatggctttttttgtacaagttttgttgaggttcattcacttactgtgaaagtcatgttctaatgtatttaattcagagattgttagtatatcacacttgagcagccatcagaactctctactgcctgtrcacttttatcacttccagaagaatcccaatacccataaac

SEQ ID NO: 595132 - DNA, 370 bp, Homo sapiens
ctatgtctacagattaagaagtagccaaggaggctgggcatagtggctcatgtatttattcccagggctttgggagsctgagacaagaggattgcttgtggccagttcacgatcagcctgggcaacatggcaagaccctgtctctacaaaattttttttaaaatgagtaaggcatggtggctggtgtttgtagcttctgctacttggcaggctgaggtgggaggattgcttgagcccagcggtttgaggtgacaaagccagactttgacaataaataaataaataaagaaagaaagaaagaaagaaagaaagcagccagtgatttttcttgactaagtatttttcaaaggcaaatatgggtaaaaggctg

SEQ ID NO: 595133 - DNA, 370 bp, Homo sapiens
ctatgtctacagattaagaagtagccaaggaggctgggcatagtggctcatgtatttattcccagggctttgggagcctgagacaagaggattgcttgtggccagttcacgatcagcctgggcaacatggcaagaccctgtctctacaaaattttttttaaaatgagtaaggcatggtggctggtgtttgtagcttctgctacttggcaggctgaggtgggaggatkgcttgagcccagcggtttgaggtgacaaagccagactttgacaataaataaataaataaagaaagaaagaaagaaagaaagaaagcagccagtgatttttcttgactaagtatttttcaaaggcaaatatgggtaaaaggctg

SEQ ID NO: 595134 - DNA, 370 bp, Homo sapiens
ctatgtctacagattaagaagtagccaaggaggctgggcatagtggctcatgtatttattcccagggctttgggagcctgagacaagaggattgcttgtggccagttcacgatcagcctgggcaacatggcaagaccctgtctctacaaaattttttttaaaatgagtaaggcatggtggctggtgtttgtagcttctgctacttggcaggctgaggtgggaggattgcttgagcccagcrgtttgaggtgacaaagccagactttgacaataaataaataaataaagaaagaaagaaagaaagaaagaaagcagccagtgatttttcttgactaagtatttttcaaaggcaaatatgggtaaaaggctg

SEQ ID NO: 595135 - DNA, 370 bp, Homo sapiens
ctatgtctacagattaagaagtagccaaggaggctgggcatagtggctcatgtatttattcccagggctttgggagcctgagacaagaggattgcttgtggccagttcacgatcagcctgggcaacatggcaagaccctgtctctacaaaattttttttaaaatgagtaaggcatggtggctggtgtttgtagcttctgctacttggcaggctgaggtgggaggattgcttgagcccagcggtttgaggtgacaaagccagactttgacaataaataaataaataaakaaagaaagaaagaaagaaagaaagcagccagtgatttttcttgactaagtatttttcaaaggcaaatatgggtaaaaggctg

SEQ ID NO: 595136 - DNA, 500 bp, Homo sapiens
actgtagcctcaacctcctggtctcaagcagttttccctcctcatcttcctgcatagtttgtacttcaagcaaacaccaccacacccagctagtttttaatttcttgtagagacagggtctcactctgtttcccaagctggtctcacactcttgggcttaagtgatcctcttgccttggcctcccaaactgctgggattacaggtgtgaggcaccccacctgacctgtctatcaagttttgacttttaataaatattacacatgtaatcattcaatatataatcctttgtgtcatttaatatgtttttgagattcatcatgattttatgtatctatgatttgttctttttttaacttttatwttttataatttcaacttttatttcagattcagggagtaaatgtgcaggttctttacatgggtatattgcgtgatgctgaggtttggggtacgaatgattccatcacacagatagtgatcaatttatgtatgtctgaat

SEQ ID NO: 595137 - DNA, 500 bp, Homo sapiens
actgtagcctcaacctcctggtctcaagcagttttccctcctcatcttcctgcatagtttgtacttcaagcaaacaccaccacacccagctagtttttaatttcttgtagagacagggtctcactctgtttcccaagctggtctcacactcttgggcttaagtgatcctcttgccttggcctcccaaactgctgggattacaggtgtgaggcaccccacctgacctgtctatcaagttttgacttttaataaatattacacatgtaatcattcaatatataatcctttgtgtcatttaatatgtttttgagattcatcatgattttatgtatctatgatttgttctttttttaacttttattttttataatttcaacttttatttcagattcagggagtaaatgtgcasgttctttacatgggtatattgcgtgatgctgaggtttggggtacgaatgattccatcacacagatagtgatcaatttatgtatgtctgaat

SEQ ID NO: 595138 - DNA, 500 bp, Homo sapiens
actgtagcctcaacctcctggtctcaagcagttttccctcctcatcttcctgcatagtttgtacttcaagcaaacaccaccacacccagctagtttttaatttcttgtagagacagggtctcactctgtttcccaagctggtctcacactcttgggcttaagtgatcctcttgccttggcctcccaaactgctgggattacaggtgtgaggcaccccacctgacctgtctatcaagttttgacttttaataaatattacacatgtaatcattcaatatataatcctttgtgtcatttaatatgtttttgagattcatcatgattttatgtatctatgatttgttctttttttaacttttattttttataatttcaacttttatttcagattcagggagtaaatgtgcaggttctttacatgggtatattgygtgatgctgaggtttggggtacgaatgattccatcacacagatagtgatcaatttatgtatgtctgaat

SEQ ID NO: 595139 - DNA, 571 bp, Homo sapiens
tgattcatcacataaacggaattaacaaaaactacatgatcatctcaatagatgcagaaaaagcttttgaaaaaatcctaaatcttcatgataaaaatcatcaacaaacatgagaaaatagatcgaaagaacatacttcaaaataataagagccatctatgacaaactcacagccagtatcacactgaataggcaaaaggtggaagcatttcacttaataactggaataagacagggacccctgctctcaccactcctattcaacatagtactgtaagttctactcagagcaatcaggtaagacaaagaaataaaaggcatccaaataggaaaagaaataaagttatatgtctatactgatgatattaatgacttcaccaaaagactcctatagctgatgaatgaatttggtgtgaagtttcatgatacaaagccaatgtacaaaaattagtagcacttgtgtacaccaataacattcaagctgacagccaaatcaagaatgcaatctcattcaccatagccagaaaaaaagkaaataaaacacccaggaatacatctaaccaaggagatg

SEQ ID NO: 595140 - DNA, 623 bp, Homo sapiens
atgttggtgaggttgtggagaaaagggaatacttttatactgctggtggagtgtaaattagttcagccattatggaaagcagtgtggcaattcctcaaagaacttaaacagaattagcatttgacttagcaattccattactgggtatatacccaaaggaatctaaatcattctaccataaagacacacgcatgcgtatgttcacgacagcactatttacaatagsaaagtcatggaattaacctaaatgcccatcaggggtagcctggataaagaaaatgtggtacatatacatggtggaatattgtgcagccataaaaaagaatgagatcagttcctttgcaacaacatgaatggagctggaggacattatcctaagcaaactaacacaggaacagaaaagcaaataccatatgctctcacttacagctgggaattaaacaacgagaacacatgagcgcaaagaggaaaacaacagacattgaggcctacttgtgggtgaagggtgggaggagggagaggatcagaaaagaaacctatcgggcactatgcttattacctggggcacaaaataatctgtacactaaacccctgtgacacacagtttgcctatataacaaacc

SEQ ID NO: 595141 - DNA, 623 bp, Homo sapiens
atgttggtgaggttgtggagaaaagggaatacttttatactgctggtggagtgtaaattagttcagccattatggaaagcagtgtggcaattcctcaaagaacttaaacagaattagcatttgacttagcaattccattactgggtatatacccaaaggaatctaaatcattctaccataaagacacacgcatgcgtatgttcacgacagcactatttacaatagcaaagtcatggaattaacctaaatgcccatcaggggtagcctggataaagaaaatgtggtacatatacatggtggaatattgtgcagccataaaaaagaatgagatcagwtcctttgcaacaacatgaatggagctggaggacattatcctaagcaaactaacacaggaacagaaaagcaaataccatatgctctcacttacagctgggaattaaacaacgagaacacatgagcgcaaagaggaaaacaacagacattgaggcctacttgtgggtgaagggtgggaggagggagaggatcagaaaagaaacctatcgggcactatgcttattacctggggcacaaaataatctgtacactaaacccctgtgacacacagtttgcctatataacaaacc

SEQ ID NO: 595142 - DNA, 568 bp, Homo sapiens
tggcttgttgtcttcagcttgttgaagaatatcatctccatttcatccacccattacttggcatcttgggatcatttgaaactgttccacctgtgaaaccttaatctttgtgtacctcgtatgcattccgtctcccatatctccaccatgtctgttcatagagacctcaggcccctgagccctagtttttctcctcactctgaatcaactcttgttcctattctatctgagctctgttgcttgtcacttcaactgcccaccattcaccacctggcctcttagtctcctacctcaaccttagagcagggtcactgcctgctttctctagtcctggtttaaaggtgtggggggaattccttcgtgaattgacattggtccaarttcatggcccgcagcctccagcgagcccccagcaatgcccagcagtcctgtgacctgggcctgctccaattcctccacaactatttcaaagctctcacattacccacttattgggatataattcatataccatacaagttgcctgtttatagtgtacagttcaatggttttaagttgtatgaccatc

SEQ ID NO: 595143 - DNA, 573 bp, Homo sapiens
ctagttccattacgcctaccttaacagatttatggacagttaaaaagtaaatccaataataaatctaaattgacttttaaaatagttaaataaactttgtcagttgtgatgtagctatatagtcagactctgttacttttgctctcctgcctgaagccttccaagagatgagaaactagctctctgctgagatatccattctttttttttttggcgggggggggatacttctaatacttacacttatctttctttatgttgagctaatatgttattcctaagaattaccatttagaaagtctggctttcccttttagttaatcaaaatgatgcctcactaaagactatttcagggctgcccttaagatagttggagaaaactcttccaattgcagttttctcttatgcagtctttgtatattcccttgttattcttctgtggaatgtcttkgagtccctttacccttcatacagttctacaggcagaagttctggaggtcttttaaagaatgaggctatgacttttgcccaaagcctccagtatactttgactatcatagagcaaggacatat

SEQ ID NO: 595144 - DNA, 449 bp, Homo sapiens
tttattgttaggagtttatctcaaatatcagttacttattttttgttcatgctattccagctttagccattgggagacttttcagtttggctcctgtgattattcagtattcctccatcctttgttttctttatttattattttaccccagtttcttattttctggcattatgaagatacttyaggctcactttaaactttcctgtctcaatcctggaatcaatcatttctcacaggagtcctggttccatttattggagagtggtatttagaaacaaatgtgtgggttctaggtgtgctattttgttacaggggtcttactgactctggccccattcagggataaaagtaggaaatatatgtagcatactaattcatgcttacactcattttcatagctatttttgtatatgtttacatgtccatatatatgtgtgtgtgtacacata

SEQ ID NO: 595145 - DNA, 449 bp, Homo sapiens
tttattgttaggagtttatctcaaatatcagttacttattttttgttcatgctattccagctttagccattgggagacttttcagtttggctcctgtgattattcagtattcctccatcctttgttttctttatttattattttaccccagtttcttattttctggcattatgaagatacttcaggctcactttaaactttcctgtctcaatcstggaatcaatcatttctcacaggagtcctggttccatttattggagagtggtatttagaaacaaatgtgtgggttctaggtgtgctattttgttacaggggtcttactgactctggccccattcagggataaaagtaggaaatatatgtagcatactaattcatgcttacactcattttcatagctatttttgtatatgtttacatgtccatatatatgtgtgtgtgtacacata

SEQ ID NO: 595146 - DNA, 449 bp, Homo sapiens
tttattgttaggagtttatctcaaatatcagttacttattttttgttcatgctattccagctttagccattgggagacttttcagtttggctcctgtgattattcagtattcctccatcctttgttttctttatttattattttaccccagtttcttattttctggcattatgaagatacttcaggctcactttaaactttcctgtctcaatcctggaatcaatcatttctcacaggagtcctggttccatttattggagagtggtatttagaaacmaatgtgtgggttctaggtgtgctattttgttacaggggtcttactgactctggccccattcagggataaaagtaggaaatatatgtagcatactaattcatgcttacactcattttcatagctatttttgtatatgtttacatgtccatatatatgtgtgtgtgtacacata

SEQ ID NO: 595147 - DNA, 556 bp, Homo sapiens
aaatatgatatgtaccttcatgaagcttataatttcttgagagacaaacaaaaattaaaattaaagtcaaacataatcaatgctacaatattgaaaatacaggattctgtaaaagaatttagaaaaacacatttycatgggcatactaagatcaagcacaattcactgaacattttgtttaaatcaacttaaactttctcttgtcagaaagtttttgggagtaaaaataaataagggtgatagtattctaaggatatccttaagcctgctaaaatgcagagaaaaatctagatcattcttaaacttgaatccattaagtttttgtagtatgttaattgcaatgtggtatattgcaacactgtaattgtgattattttcaacatgagcttagagtaaaatgaaaggacctactcttttatgctaataaaagttttgtaacagtggaactctaccttccttgtttcatgtcttaaattggatgtgcttaacggtgtaactccacgaggaaataaagccaacttcagtccattaaaatggaaaaaaaaaaaagggggca

SEQ ID NO: 595148 - DNA, 556 bp, Homo sapiens
aaatatgatatgtaccttcatgaagcttataatttcttgagagacaaacaaaaattaaaattaaagtcaaacataatcaatgctacaatattgaaaatacaggattctgtaaaagaatttagaaaaacacattttcatgggcatactaagatcaagcacaattcactgaacattttgtttaaatcaacttaaactttctcttgtcagaaagtttttgggagtaaaaataaataagggtgatagtattctaaggatatccttaagcctgctaaaatgcagagaaaaatctagatcattcttaaacttgaatccattaagtttttgtagtatgttaattgcaatgtggtatattgcaacactgtaattgtgattattttcaacatgagcttagagtaaaatgaaaggacctactcttttatgctaataaaakttttgtaacagtggaactctaccttccttgtttcatgtcttaaattggatgtgcttaacggtgtaactccacgaggaaataaagccaacttcagtccattaaaatggaaaaaaaaaaaagggggca

SEQ ID NO: 595149 - DNA, 556 bp, Homo sapiens
aaatatgatatgtaccttcatgaagcttataatttcttgagagacaaacaaaaattaaaattaaagtcaaacataatcaatgctacaatattgaaaatacaggattctgtaaaagaatttagaaaaacacattttcatgggcatactaagatcaagcacaattcactgaacattttgtttaaatcaacttaaactttctcttgtcagaaagtttttgggagtaaaaataaataagggtgatagtattctaaggatatccttaagcctgctaaaatgcagagaaaaatctagatcattcttaaacttgaatccattaagtttttgtagtatgttaattgcaatgtggtatattgcaacactgtaattgtgattattttcaacatgagcttagagtaaaatgaaaggacctactcttttatgctaataaaagttttstaacagtggaactctaccttccttgtttcatgtcttaaattggatgtgcttaacggtgtaactccacgaggaaataaagccaacttcagtccattaaaatggaaaaaaaaaaaagggggca

SEQ ID NO: 595150 - DNA, 546 bp, Homo sapiens
atttgaaatgccttttaatttcaacagtaagaatcaagtctactgaagtttagtcttgcgtcatatcagttattgtggtattaatttaacagaggaatatcttgttgaagacatttcttcctcatctaacacaatacatgtcctcttaacagtgatgcaaatttaaatacaaagatccatggaaccgacacggatcagttttctgtggaactgacacagctcaggctcccccagatcttagaatctgagaaaactttgccaaactcagatttacatcaatccaaaagtaataccttctaatttctctgtctagtcttatctactgaaggttaccaaccctggcagctgctacactcaacagccctagctaagcccattctagagaagacagtgccaaagaaaattttttttgatgttcacaatccccaagagagtsgttgtcagctggccagggaatgagtctgtgtgggccaaaccacagaaatattcttatctagtgtatatttattttactatttggcatatcataaatttgatccaaatttc

SEQ ID NO: 595151 - DNA, 427 bp, Homo sapiens
aaaatatgcataatattcaaaaatagaagaatattcttatttctttagtacaaatctaaggaaaatatcctaattctttctgtgaatatttttactgggcatatggcatacagtacatgctcaaaaagactgaatttactgcaagagcaaattagacatataattatataaaatrtcacattagcatgttaattgtgattgtctaaacttttatatatccagtccaatataaaatcctttttcactaatctactccagtctttcaaaataataaaaaatgaagaatatcagatatttattttttaactccctgctgtcttctattttaaaaattagcattttaaaagaagtaacttagaagacttttcataatttataacttgaatttgactatatttgtcttcctttcctatggcagttcacttaa

SEQ ID NO: 595152 - DNA, 592 bp, Homo sapiens
cttctggtcaaattaaaatatcaggaaccagctttatctttctgccttaaagtaacaaaaaattgacaaatatatgaaattatagttttcagacattatacaccagaatttggatcctagagaaaaggagaagtaaygaggagagttctgattatcaacacaggcaggggaaccatgcagagcccagtggtgtgaatgagttgaatacagagagactgaaatttggagaggttaaaacagctagtatttgttagatggctactaaataggagggagctgcataaagaaaaagctccagagagcaagtatttgttggaatactgatctgcacatatgtgagataaaattgcctgagatagtagaaataaaaaccaggaaacctttaggccaaacaatctctggagctcacacaaaaatgagaatagtgctttatatagctcaaaaaaaacaacaactcataatacatggggtatagaaaacaaccttcaaagatttatatataaaggtttcgtatatatatatatatatatatatatatatatattttacattttatataacaaaaaagattatcttaattgataattcatca

SEQ ID NO: 595153 - DNA, 573 bp, Homo sapiens
ggtggtagaccaggttttagtggcaagacaggttatgggaggaagaaaggaagaggcctggctagcaaaggtttccttgttatgtagttgaagcttcataggtaacagtcttcagagagaatagatggcaaatgttacttttcagacctttaaaggtgtcagattctcaatctcttctagatttaggaaaggcctggattaatggagattctctgcagatgcaaatttcccccacaaaaaactttcagggctattttagtaggctggtgtcagccaactgggagggtcttcagggattataggaatttaatcaatttgagcaatcagcctgttttacgcctcctgccctgcagcctgtttcttcctaaactgtggattgcagtcacctagttggttagaagtagttactgacagatcccaacaatttgtagatgaaccctagtgaactttcctcattaccctggaaagagctgtgtcttctttaccataacatgcaamctatgagctggcataatgactcactacgtctgcacaactgggactcctcctctacatgagatgatgcaccctttc

SEQ ID NO: 595154 - DNA, 682 bp, Homo sapiens
aaagaggaaggaaatgaatccagcaaatttgagaatgaatgggtcagtgtatgacagtaggaaggaggtacaatgtgtagtttagtagttcaagcttcaaatgggtgggggtgataaagaaaattggaagcagaaggtatcccaacttctcggcttgtgatactatgatatatagggtataaagaaaaaatatcctccattttatactgtttgttgtagggaacatagtgtcagcaggactcaaattaagaagctaatgagaatatccagagaagagtgagtttgaagttataagggtatctcttgatgacatgttgtttaggatctgctacataatttctggggcccattaaaaartgaaaatgcaggatatcatgtttaaaattaagaattgcaagatgtggacagataaccattataccaagtgtggacccttctaagtgtgagatcctgtgtgtgactgtaaagatcacatacccgtgaagctggccttacgtattctggaatttcatagacctaggacaaagatttgagatcgagggcaggcttgagtcacattaggggatatactatatttatttagttaataaatacttacatggaaatactatgtgtcagctattgttctaaatgattaatgaatgttataatttaatccttccaacatccttatgatattatt

SEQ ID NO: 595155 - DNA, 499 bp, Homo sapiens
cgtgtctatttatctaagctgagctcacttctgaataatgtagcttagaagtactcacttctatccggatggaagacctttaaaaatagagtggaaaaagtattaggcatctttagaaacraaactaaagaacttatcaaaacaggaagaaaatttcaaacttgtagccataaacctaattttattttttaagtacatggtttaatgccatcattaatgtgagcaactaccaacaaatctataattatagtccaagagatttattcttgatttgaaaaagttgaaggtgtaaggtagtaaatttctgcaagatatatttttagccaaaggaaacctggggatgtgttatataaacaacatggtatatacccgtgggcatattgtcacatatatatacatcaagagattaatctgtcaccatgaatatattcaatcccttatgaaatactggacactggaagttggtagctgcagcaaccacagcatatgctataagcat

SEQ ID NO: 595156 - DNA, 597 bp, Homo sapiens
tctgaaaaataaatttggttagattttcgcagaactttctaactcacctctttggaactgtactgtttagttctaaggaccasttatgaaagaagtctgggtattaattctatcctaaaaccataacaattatgaagttatatttacatggttatatttactttggtaaattatatgagctatttctaacatattggaagaaagagctaatctacctggattatgaaaatgcttattctactttaaagataaacacacacacacacacatactcatatacttataagtatgtatatgtagatttagtagcttcaattcttttttttcctgttaatccatttaagcattcaaccattcaacaaatgttctgtaaatacaggacatttactatgccctaggcattaagaagtatataaagttatacaagtcacatgcatacttctttaaatctagtgggagggaataaaatattaatatataaatataaaaaaaggctcttacttgcaagaataggctaggctacactatagtaaataacaaaaacaacctgatacatcagtggcttcccataataaaggtttatttatcattcaccaa

SEQ ID NO: 595157 - DNA, 603 bp, Homo sapiens
aatttactatgcaactttgttcatatcaattttgcttaaaattacattgttttaattagagtccattattttaatgcagatatactttaaaatcacataaaataatcaagattgttcatgagaagactgtcaccaaaaatactgcatacatttatgtttgtggggtattacaatgaacaaaaccaggttaattaacctgaattaaaaatagttgaaatttgaaatgtacatacactaaggtttatgtatacaagtttctatgcatgtttaggtaagtgtattgtaagtattctctggattcactaatatggatagctcaattttactttgaggactctatgccagcagctacagttcagtttgtctatttcattctgagaygtcaatggcattataattaattgcacttttatttgtagtcattctctctaagcattaagttacccatgaatgccagattactcactgattcttaattgtgtctcaataactaattcctttttatttctgcatggcatcatattgtatggatatactgcagttcctctgttgatggacatttggattgtttacagtttggggctactataaatagagatgctt

SEQ ID NO: 595158 - DNA, 308 bp, Homo sapiens
  misc_feature 1, 2, 3, 4, 5, 6, 7, 8, 9, 10, 11, 12, 13, 14, 15, 16, 17,18, 19, 20, 21, 22, 23, 24, 25, 26, 27, 28, 29, 30, 31,32, 33, 34, 35, 36, 37, 38, 39, 40, 41, 42, 43, 44, 45,46, 47, 48, 49, 50, 51, 52, 53, 54, 55, 56, 57, 58, 59,60: n = A,T,C or G
  misc_feature 61, 62, 63, 64, 65, 66, 67: n = A,T,C or G
nnnnnnnnnnnnnnnnnnnnnnnnnnnnnnnnnnnnnnnnnnnnnnnnnnnnnnnnnnnnnnnnnnnccaactttaaataaaaatcacagattatcaaataacagagcctaagaagtacaattaccacaacaaatcagctatattatgtaaatattgactctaattcacaatattatgtaaatattgtgaatttttacatattatgtaaatatttacatattttacayagtattttacaaatatttacatattttacatattatgtaaatatttacatattgtgtaaatatttacatattgtgtaaat

SEQ ID NO: 595159 - DNA, 290 bp, Homo sapiens
aggataattgcttaaacccaggaggcagaggttgcagtcagctgagattgtgccactgcactccagcctgacagagggmgactgcatttcaaaacaataaaaaataaaataaatagagtaagtgtatgtatagattaaaagtcacctctaatgaattaaaggacacccataattataacatgcaagggaaaatattaatatttcagatgtatataccaatgaaaactggaaataagaacttgattttaaaaggtagcagtatctgaattgaaataactaatttaactcta

SEQ ID NO: 595160 - DNA, 523 bp, Homo sapiens
aatgaaaatgcacttgggtttactgattaacataatcatcgcacaacagttttagtcttttttattttctgtgtctagaaacagggccttacaatacagtaggaattcaataactgttttggaaagagataattaagaaaaaaggattgggaagccaggtgccatggctcaagcctgtagttcctgctacgaaggtggctgagtggggaggatcacttgaacccaggagttcaaggccgcagtgagcaatgattgtgccactgcactgcagcctaggtgacagagcaagaccctatctctttaaaaagaggagagggagaggggcagaaaaaaaaaggaaagaaaaaaaggaaagggaaggaaaaaacaaaggaaaaaagggaagggacaggaaggggagggaaggggagtgtagrggaaggcagagggaaggggaggggagaaggaaggggagggaaggggaggggagggaaggggagggaaaaaggagggagggaaaagggcaggaaaaacataaggagaa

SEQ ID NO: 595161 - DNA, 585 bp, Homo sapiens
gttttacatttttacaaatttattttaatgtctgtattcaatctgctgtgatatattattttgatgaaagtatataaaatctggcctctcaaaggtatatatttggaraagggaggagcattttaatagtctgttcagacaattgtagatgtttttcttggatattataccaaactccaacaagtgatggttcgtttccttttttttttgagacacagtctctgtggcccaggctggagtgcagtggtgccatcccggctcactgcaacgtctgcctcctgggttcaagcgattcttgttcctcagcctcctgagtacctgagattacaggtgtgcaccaccatacctgcctagtttttgtatttttagtagagatgaggtttcaccatgttggctaggctggtctcaaactcctgacctcaggtgatccacctgccttggcctcccaaagtgctgggattacaggcatgagccaccatacccgacctgatagtttcttaaatgtaagttttagaaatggtagtttaagacatgagtttcttaaatgttcatgcagtgtggaaactgaaaccatgtcaatggact

SEQ ID NO: 595162 - DNA, 555 bp, Homo sapiens
cttattcatttgtagcactttagaaatcgctttcacaattaatcctaataatactataaataagatttaagtgtcataagccgggtgcggtggctcacgcctgtaatcccagcactttgggaggctgaggtgggtggatgacctgaggtcgggagttcgagayaagcctgaccaacatggagaaaccccatctctactaaaaatacaaaatgagccaggtgtggtggcacattcctgtaatcccagctactagggaggctgaggcaggagaatcgcttgaacctgggaggcagaggttgcggtgagctgagatcatgccattgcactccagcctgggcaaaaagagtgaactctgtctaaaaaaaaaaaaaaaaaaaaagattaagtatgattatacatgaaactgtgtttccagtttagatattaaggcatggagacatttaagcgcttgcataagatcacaaagcctagaagtcatgctctggacacagtatggaagaaatagaaattaatgtattattagaactgctggcattgtcagtgcccagagcagtg

SEQ ID NO: 595163 - DNA, 643 bp, Homo sapiens
acagttgttaaattcaagaaatagagaaaaaatagatatattcctagtaaatagagttgcgaaaaaaatctcaatgaaatagactttctacaaaactatgagtatttcatagaggtagactaggattactgaggaggaaattgagaaagttatgttagtaccagctatcaaaaagatttttggaactartagatttgctgataaatcttttacatttttaaagaaaattgaagttgcttaaataaatacagaacaacgttatgaaacaagaaaatgagggcattctaaaatactgattaatcttagttgtgaccatatatgtgtgaaaatgttaaagaatatgctagcaaacatttaaacgtctgatctaccactactgtgtaagaaatgtgaacatgtttcaatataaagaaattttgtgacttgggaggctgaggtgggaggattaagcgctttagcccagagtttgagtccatcctgggcaacatagcaagaacctgtctaaaaaaaaaaaaattattgctatcctttatcaggtttaattggggaaaatgatgctataacatagtttgagctaatttagtgttcatttctaatcaaattatttgaaaatgaaaatactttcatatcatgatagactata

SEQ ID NO: 595164 - DNA, 514 bp, Homo sapiens
ttgggtgggaactgtatgcctcttagagatgacattaagactaacaacctgggtacaatttactcaagaactcttctccatactaaggtgcttagtaacacagaaggcttcctaggtgacgaagacagcacggttttatttccccaagtatattctgacataagaagaataagcaagccctttatttctcacagacaaaatgaggtacaattccatacttccattttacatatgactaagagcctcttactagtaatcgttccaagtcaattattatgggttttaatactagcacacacaaataaattactatagctctcattttgagccctctaattcagtcactaataartctgtaacggggctgggaaggtagtgaggaggatggttaatgggtacaaaaatgtagttagaatgaataagctctagaatatgatatagtacaatacggtgactacagtcaacaattatttataacgcattttaaattaaaagagtataactggaattttca

SEQ ID NO: 595165 - DNA, 634 bp, Homo sapiens
tatttaacaagcaagaacatggcaaggtcaggtttataaggatctccctggcagctctgtggaggatgggtttgaagaagatggacctggaggactggagactggttggcagaatttctgaaacatttcaggtaagaggaagaaagtggcttgacctggacagaagttagggaaaagacmgattcaagatacatctgaaatcaactggacactaagtgctgaacaaagcccagatgaagtacagctccatttacccagacttctgatctaaatacgataattagttattatataaatatataaatattcccattttcaatggctcacatgtcattgtctcatttattcgatctttataataaacacatgtattcatgaatgtctatttgaagatttgtaaggcagcatcaagtattttgtaaagaatgtgaactctagcgtcagacaaacctcgctctggatgcttcttttaaatggttatttcttaaataatcatgcagtaagattgacctgtttggtgtacagttataaattttaataaatgtaaatatttgtgttgccaccaccgcaatcagaatagagaacagttctgttatcgcaaaaacttccccatgctattttaccctcaccctta

SEQ ID NO: 595166 - DNA, 570 bp, Homo sapiens
tagtttatatacacaatggagtatgatttagccttaaaaaaggagggagttctgtcatttgcaacatgtataaacctggaggacattatgttaagtgaaataagccaggcacagaaagacaacccaggcacaggaacacaaatactgcatgttctcagttatatatggaatcaaaaaaagtcaaactcatagaagcaaagagtggaatagtggttaccaaaggctggggtgggatggagagtggactgggaagatgtttgtcaaaggatacaaaatttcagttagaagaaattcattcgagagacctattgtacaacacagagactataaagttaataataaggtatggtgtacgtgaaaattgctaaataaatgtcttgagatgaaacccgaaagtgcagaaggtggtcccagggagtgagccaggaaggtgaaggagcaaccttcctgacattcccgacaaggtggaatcatcctcccacgtggacgctgcatcctcctcctgaatggcaggcctgcctyagttttcagctcctcacacagacagctgatggcagggcaccttcctgc

SEQ ID NO: 595167 - DNA, 627 bp, Homo sapiens
aattatcattgtttgcagatgatacgatcttatatttagaaaaacctaaagtctccaccaaaaaaaactatcagaactgataaattcagtaatggtgtaggacacaaaatcatacaaaaatcattaacatttctatatgccaacagagaacaatctgaaaaagaaaatttaaaaagtaattccatttacagtagycacacataaaattaaatatctaaaaattaaccaaagaaatgaaagatctctagaatgaaagctatacaaaactggagaaagaaattgaagaagacacaaaaaaatggaaagctattctacgttcaagcattggaagaatcaatattgctaaaatgtccatattattcaaagcaatctacagattcaatgcaattcccatcaaactactaatgataatcctcacagaaatagaaaaaacaatctttaattatatgaaaaaacaaaagacctagaatagccaaagctaccctgagcaagaagaacaaaactgaaggaatcacaatacctgacttcaattatactacaaaagtatagtaaccaaaacatcaccgtattgccataaaaacagacacacagaccagtggaacagaatggagaacccagaaagaaatc

SEQ ID NO: 595168 - DNA, 627 bp, Homo sapiens
aattatcattgtttgcagatgatacgatcttatatttagaaaaacctaaagtctccaccaaaaaaaactatcagaactgataaattcagtaatggtgtaggacacaaaatcatacaaaaatcattaacatttctatatgccaacagagaacaatctgaaaaagaaaatttaaaaagtaattccatttacagtagtcacacataaaattaaatatctaaaaattaaccaaagaaatgaaagatctctagaatgaaagctatacaaaactggagaaagaaattgaagaagacacaaaaaaatggaaagctattctacgttcaagcattggaagaatcaatattgctaaaatgtccatattattcaaagcaatctacagattcaatgcaattcccatcaaactactaatgataatcctcacagaaatagaaaaaacratctttaattatatgaaaaaacaaaagacctagaatagccaaagctaccctgagcaagaagaacaaaactgaaggaatcacaatacctgacttcaattatactacaaaagtatagtaaccaaaacatcaccgtattgccataaaaacagacacacagaccagtggaacagaatggagaacccagaaagaaatc

SEQ ID NO: 595169 - DNA, 624 bp, Homo sapiens
cacaccaggtagtctacacagaagagtttgtttcagagcgcagcaatattagccacaaactaaccactactttaattccagctaacagatcttaaaagcaagacccgaaaagatcagcctatgttcaagcaacttaactgcatcacagaaaaaagctcaagagtatctataggaataagaaaatatccagcagctaagaaggtaaaattcacaaagsctggcatccaagtaaacattgccaagcgtgcaaacactcaagaaaacacaacctctatatgaggagaagaaacaattaattgaaactgacacagatgacagaattagcagggggaggcactggggcagttactgtaactgtattacacatggtgaagaagtggtaacagagagagaacaagttaactagagacaaaaaatacttcaaagatacaaaatgaacttttagatatgaaaactacaatgacttaaatgagaaatacactggatgtgattaacaacaggttagatactgcagaaaaacaaccagtgaactcctgaagacacagcaatagtaactatccaaaattaaataaagaacaaaaataaacataggctccatgaaccactgaacattttcaaacagcc

SEQ ID NO: 595170 - DNA, 611 bp, Homo sapiens
aagcgtcgttccatattgaatgtacaaagcgttactaaaaagatgggaaaaactaaacatgacattcctatttttaatttatgctggcgtgtgtgctgatagcacagaacatcacaacagataaattactamgtattccactttactaagtctccactcaaagttcctacgtttacaaatatgtaagtaaaagaggcacaaaaatgtaggggatggtgttttcgttgctcatctgtgctcagttgcgaattcttctaatatcagatacataatgcgatgaaatgggaatgcttatcttctatacttctatttattttcataaagcgggaaggggaggtggtcttgattcatttaatattagcgttttgcaataaagtagagcagcataaaatataactgaagaagaattcattttccccaggataatgcacccttcctcctgtttctacagtaaagcacatcattttgctattaaaaatgtccatttttcacaactgacttttccttaactctagtcaacactgctcttcaaaagaacctagccaattactgtaccttgtaggcagagttgcaaaatttttgcttccctaagaaacttttccattttttaa

SEQ ID NO: 595171 - DNA, 611 bp, Homo sapiens
aagcgtcgttccatattgaatgtacaaagcgttactaaaaagatgggaaaaactaaacatgacattcctatttttaatttatgctggcgtgtgtgctgatagcacagaacatcacaacagataaattactaagtattccactttactaagtctccactcamagttcctacgtttacaaatatgtaagtaaaagaggcacaaaaatgtaggggatggtgttttcgttgctcatctgtgctcagttgcgaattcttctaatatcagatacataatgcgatgaaatgggaatgcttatcttctatacttctatttattttcataaagcgggaaggggaggtggtcttgattcatttaatattagcgttttgcaataaagtagagcagcataaaatataactgaagaagaattcattttccccaggataatgcacccttcctcctgtttctacagtaaagcacatcattttgctattaaaaatgtccatttttcacaactgacttttccttaactctagtcaacactgctcttcaaaagaacctagccaattactgtaccttgtaggcagagttgcaaaatttttgcttccctaagaaacttttccattttttaa

SEQ ID NO: 595172 - DNA, 611 bp, Homo sapiens
aagcgtcgttccatattgaatgtacaaagcgttactaaaaagatgggaaaaactaaacatgacattcctatttttaatttatgctggcgtgtgtgctgatagcacagaacatcacaacagataaattactaagtattccactttactaagtctccactcaaagttcctacgtttacaaatatgtaagtaaaagaggcacaaaaatgtaggggatggtgttttcgttgctcatctgtgctcagttgcgaattcttctaatatcagatacataatgcgatgaaatgggaatgcttatcttctatacttctatttattttcataaagcgggaaggggaggtggtcttgattcatttaatattagcgttttgcaataaagtagagcagcataaaayataactgaagaagaattcattttccccaggataatgcacccttcctcctgtttctacagtaaagcacatcattttgctattaaaaatgtccatttttcacaactgacttttccttaactctagtcaacactgctcttcaaaagaacctagccaattactgtaccttgtaggcagagttgcaaaatttttgcttccctaagaaacttttccattttttaa

SEQ ID NO: 595173 - DNA, 611 bp, Homo sapiens
aagcgtcgttccatattgaatgtacaaagcgttactaaaaagatgggaaaaactaaacatgacattcctatttttaatttatgctggcgtgtgtgctgatagcacagaacatcacaacagataaattactaagtattccactttactaagtctccactcaaagttcctacgtttacaaatatgtaagtaaaagaggcacaaaaatgtaggggatggtgttttcgttgctcatctgtgctcagttgcgaattcttctaatatcagatacataatgcgatgaaatgggaatgcttatcttctatacttctatttattttcataaagcgggaaggggaggtggtcttgattcatttaatattagcgttttgcaataaagtagagcagcataaaatataactgaagaagaattcattttccccaggataatgcacccttcctcctgtttctacagtaaagcacatcattttgctattaaaaatgtccatttttcacaactgacttttccttaactctagtcaacactgctcttcaaaagaacctagccaattactgtaccttgtaggcagagttgcaaaatttttrcttccctaagaaacttttccattttttaa

SEQ ID NO: 595174 - DNA, 594 bp, Homo sapiens
agcacattgctgaatgtcaatgcatttgtttgctttaaaataatatatatggcttttatgtataatttttatgattcctttatctaactgatttttaaaaattaacccaacagcaatggataaaagtacttctaccccggccgggcatggtggctcacgcctgtaatmcccagtactttgggaggccaaggcgggtggatcaggagttcgagaccagcctggccaacatggtgaaaccccatctctactaaaaacacaaaaatttagctgagcatggtggcacatgcctgtaatcccagctactcaggaggctgaggcaggagaactgcttgaacccgggaggcagaggttgcagtgagccaagatcatgccacggcactccagcctgggtggcagagcaagactccatcttgaaaaaaaaaatacttctaccctatgaaacctgtgtcataacatattaaatattttgctcccaagagctaggagtcagaatctctctctttttcattgccatatcctcagcatctaacagagtatggacatggtatataccaatattttgttgaatgtatccatcatatttgaaataagctt

SEQ ID NO: 595175 - DNA, 594 bp, Homo sapiens
agcacattgctgaatgtcaatgcatttgtttgctttaaaataatatatatggcttttatgtataatttttatgattcctttatctaactgatttttaaaaattaacccaacagcaatggataaaagtacttctaccccggccgggcatggtggctcacgcctgtaatccccagtactttgggaggccaaggcgggtggatcasgagttcgagaccagcctggccaacatggtgaaaccccatctctactaaaaacacaaaaatttagctgagcatggtggcacatgcctgtaatcccagctactcaggaggctgaggcaggagaactgcttgaacccgggaggcagaggttgcagtgagccaagatcatgccacggcactccagcctgggtggcagagcaagactccatcttgaaaaaaaaaatacttctaccctatgaaacctgtgtcataacatattaaatattttgctcccaagagctaggagtcagaatctctctctttttcattgccatatcctcagcatctaacagagtatggacatggtatataccaatattttgttgaatgtatccatcatatttgaaataagctt

SEQ ID NO: 595176 - DNA, 543 bp, Homo sapiens
aaacatcctcatcaattctatttttactgagggaatcagtaaaaaatgtaaggaaaatagatttagtttatattccaagagttgaatgttgttacagacaagtctaaaaatttattcataaaatataataagtcatgttgttaagaatttgaagaaatgcagaaaaaacaacagtgttagtgttataaaaagagatacatgtggctctcaacaagagtctcaagggacagcaccatatttgaattataaaagtgctgaaatgcaaacatcttaaatggaagtgaccactatgtatcctggaamgctgttggatgactccaaaagtggttctttgacaaagaaaccaatgtagaagataaataggaagagttttattaatactactcacggactatgagcatatataaaaaagtaatgtttctaaatcaatctattattgcatatccgatttttaaatatgtatgcataattaaatttatacattagctattacaaatagatatttgactgtttaatctatcctcaaaatttatatattgaagc

SEQ ID NO: 595177 - DNA, 543 bp, Homo sapiens
aaacatcctcatcaattctatttttactgagggaatcagtaaaaaatgtaaggaaaatagatttagtttatattccaagagttgaatgttgttacagacaagtctaaaaatttattcataaaatataataagtcatgttgttaagaatttgaagaaatgcagaaaaaacaacagtgttagtgttataaaaagagatacatgtggctctcaacaagagtctcaagggacagcaccatatttgaattataaaagtgctgaaatgcaaacatcttaaatggaagtgaccactatgtatcctggaacgctgttggatgactccaaaagtggttctttgacaaagaaaccaatgtrgaagataaataggaagagttttattaatactactcacggactatgagcatatataaaaaagtaatgtttctaaatcaatctattattgcatatccgatttttaaatatgtatgcataattaaatttatacattagctattacaaatagatatttgactgtttaatctatcctcaaaatttatatattgaagc

SEQ ID NO: 595178 - DNA, 597 bp, Homo sapiens
gaattataaaagtgctgaaatgcaaacatcttaaatggaagtgaccactatgtatcctggaacgctgttggatgactccaaaagtggttctttgacaaagaaaccaatgtagaagataaataggaagagttttattaatactactcacggactatgagcatatataaaaaagtaatgtttctaaatcaatctattattgcatatccgatttttaaatatgtatgcataattaaatttatacattagctattacaaatagatatttgactgtttaatctatcctcaaaatttatatattgaagctaccccaaaaaacatctgtctgtatcttcgcattctgaaatagaagactaacttatagtcaagrttgccttacaatgggatatgttaatactcaaattccaaaatttatactcaaatttgtaagtacacagccttctcagaaaactactttaaaatgtaaaatactcattgaggtgagccagttctaatttttttttaaatcaacaacagtattttacaataattctttaaagtgaatcataatattattaaatgtttatgaatgtttacaaatgacagcatttttggaagaaa

SEQ ID NO: 595179 - DNA, 597 bp, Homo sapiens
gaattataaaagtgctgaaatgcaaacatcttaaatggaagtgaccactatgtatcctggaacgctgttggatgactccaaaagtggttctttgacaaagaaaccaatgtagaagataaataggaagagttttattaatactactcacggactatgagcatatataaaaaagtaatgtttctaaatcaatctattattgcatatccgatttttaaatatgtatgcataattaaatttatacattagctattacaaatagatatttgactgtttaatctatcctcaaaatttatatattgaagctaccccaaaaaacatctgtctgtatcttcgcattctgaaatagaagactaacttatagtcaaggttgccttacaatgggatatgttaatactcaaattccaaaatttatactcaaatttgtaagtacacagccttctcagaaaactactttaaaatgtaaaatactcattgaggtragccagttctaatttttttttaaatcaacaacagtattttacaataattctttaaagtgaatcataatattattaaatgtttatgaatgtttacaaatgacagcatttttggaagaaa

SEQ ID NO: 595180 - DNA, 473 bp, Homo sapiens
tggtgcagtctcagctcactgcaacctctgcctcctgggttcaattgattctcatgtctcagcctcctgagtagctgggactacaggkgcatgtcaccacacctggcttgcttgcttatttatttatttgatgtagagatggggtttcaccatgttggccaggctggtcaactcctgacttcaagtgatcctccctcctcggtctcccaaagtgctgggattacaggtgtaagccactgcccccagcccatgtatttttttatgtatattttttctgtcctgaggagagatcccctaccttcactgcctggttctctattggagtccatgaaatacgtaatactcctgcctcgaatcctgattcctcctgatcatctcacagcttgaatgtcatgccagtgttggtcttccctactttttctgctgtttgtttgttcttttggaattgcaatcttaagtgcatttacagacag

SEQ ID NO: 595181 - DNA, 551 bp, Homo sapiens
cctaggattaagttaggctaggcacccactccctgacaagacacagaggttctcatgtatttctggccacttatgaagtaaagggtgttcctttaaccaggtaccactgagatggctgcagaccctgagtgtcagtgtgcattgtttcctgataggtacgaaggcttttcctggggtagcagccccaaaagcagagcaccttctgacctgggagtctggcacagttccagccacccagctctgtagagttgagaaagcgagggccagtggggctacttatgcttctttctatctgctccctgggctgtggggcagccttcctcccttggtttcactttcttaatttcagtctctaaggttcagccttgaaactccaaaggatactgaggcaggtcaccctctctaacccctgtcgaaaattttgcacaggggaagggagctgaggaagtcacagaaattcatgggggtgccaggcccacacatacctgcctgtggggmtgagtggattggcaatgacaatgctgacagctgacatttactgagtacgtgct

SEQ ID NO: 595182 - DNA, 512 bp, Homo sapiens
attacaagcaagcagaagtaaacttttgggagagatggatatgttcatgatttttattgtggctgctgttttacaggtgtatacatatgttaatatgtatcaaagtggatactaaatatgtgcagcttattgagtaattattgaacagttatgccttaatacatctgctaaaaaaaatctggcagacttttacccagaatatacaaagaactctcacacctcaataagaaacaacacaaaatttggcaaaatatttgaatagacattccaccaaagaagatattttgaatcatccataaccatactataatgattaaaattacaaaaactgatacaacttaaactttcatgcattgttggtggaaatgaaaaatggtgcatctactctggaaaacagttttgaacttgcttataaagataaatccacatttaatcatacataaccatgcaaccsagcaattccactcctaggtgtttccctaagagaaatgataacatatgtccacaaaaag

SEQ ID NO: 595183 - DNA, 574 bp, Homo sapiens
ttcatcattattagtaggaattttattggttcaataaaattggcaaaactgaaaaaaatagaaatttatatcttacaattctggagtctaagaattctggagtccaagaaagtccaagatcaaggcgctagcagatttagcgtctggtgaagactgctctccacttccaagatggtgccttgatgttgcatcttctgaaggagakgaacactgtgtcctcacatgggagatagtaggagaataagagagctttagtctcactcatgaggggggagtcctcatggcctactcacctcttgcaggtcccatctcttaatactatcacattggccattaagtttcaacacctgaattttggaggggacacattcaaatcatagcagtgcccattggcatttctggattgccagcctctttaactccaagtctgagaaaatgaggcacaaagagagcccatggaactcataaccatgttattctttgggtctcaagtctgtcttctctctacttttcagagtcttcttatgtttgatttgtgtataactcaaagggttttcagttgtacttcaaggga

SEQ ID NO: 595184 - DNA, 398 bp, Homo sapiens
gaattcaaatgtagaaattcttcaaaaagaaatctctagacccaggtattttcactagagacttctgctagaggtttaagaaatcattaacatcaattctatacaatctcttccggaaaagagaagaggaaacacttcccaattctttacctcaaactagtattaccttgatactaaaaccaacaaagtaccaacagtatcaaaacaaagtaaacttcagactgatatcccttgcgaatataaacacaaaattcccaaacaaaattgcaaaaatagatttcaataatatattaattatataccatgaccaaatgaggttttcttccagggatgcaaggctgtttcaatattcaaatacatcatattacatgttaasaggcaaaataagaaaaatcaca

SEQ ID NO: 595185 - DNA, 514 bp, Homo sapiens
gctggcattcctggggaccaaataacacagtgtgcagcagaagagacatccccagagctgggaaggtctrgatcgagtgtattcgtttcttagggcaactgtaagaaagtaccacaaactgggtggtttaaaacaacagaaacttgtctcacagttctacagactcaaagttcaaaatcaaggtgtcagcagagccatgctctctagggaatttaaagtctctagggaataatctttccttgcttctaactcctttggttgccaaccttggcattccttggcttatgcaagccctgcctctgtcttcacatggccttatttcacctgtctcctctgtgttctcaaatttctctgcttgtaaggacaccagtcataggatttagggcccatcgtattccagtatgacctcattcgagtgcagtggcaccatctcagctcaccacaacctccgcctctcaggttcaagcgattctcctgcctcagcctcccaagtagccgggattacaggctcaca

SEQ ID NO: 595186 - DNA, 658 bp, Homo sapiens
aaattccaaacgaactaaagaattagatgtaaatgattaagctataaaataaggaagaataagtagctgactgggtttgggacggggaaaggactttccaggcatacaaatcaatacaatattacaaaagaaaaatttgtaatagatttggctgcataaaacatttattacrtccgtatatatatattttaaaaccacaaccaacagaataaaaataaagaatataaaaatgagtaaatatttataaatatttgtagaagtgagttcatggccttattatagaaagattcccttccctcaatttaaatttaaattaacaaagcctaggaaaacataattcataaatttaatattttatgaaaatagcaaataacattaagatgtccagcctctctaggaactaaaaaaatctaaatgaaaacaagattgtttctttttaattatcaaagagcaatgatatttttagaacaataatacacaaatataactagataaagaccctgtagttattaggtagggaaatttggccatatttctttaaatttattttactttagtaaatttttatctatatcctaatgaactagtcaaacattcaagaatttatatataaaatattcatccattaatttatcaaaagtttgaaatgacccaaacg

SEQ ID NO: 595187 - DNA, 630 bp, Homo sapiens
aattttaatatttaatatgttaattattatactggtgttctaaagatgatttctttatttcccccatttcttctacattcattaattggaattccttctgtatttttactacacagttctataggttttgacaaactcatatagtcatgaacccatcaccacagtcaagatgtagaatatttccattgtccctaaatgttccttcaagtccctttgtagcaaccttatctatttgctgtctatatagtcttactttttcagaatatcatctaaatggaatcatatgttacatagcctttgagtctggcttctttcattcagcataatgcatgagagtcatccaagttgctgcatatatcaatagttcattcatatttagcaaagtagtattccatgtatagatacagttttttttwaaaaaaaaaatctattctccaatggatgcacatttgggttgtttccagtttttggcaataacacataatgatgctataaatattcacaggtgtgttttcatttgaacataaatttcctcttttttggacaaatagcacttgcttaggattgctgggtatgagagtcataatggccccccaagatgtctacattttaattttctaattgccaaga

SEQ ID NO: 595188 - DNA, 587 bp, Homo sapiens
actctgacaggggagagagcctggagtgagataatttgcctctttttgcctcagttttccaacccatcaatgacgtttcattcattcaacagatatttattgagcatcttctatgtgccagcattcattttgcactagaatacagcagtgaataaaacacaaaatccctgttcttccaacagttatattctgggactggagacaaataagtatatattgggatgataagtgctaagaataagaattaaaaaaayaaactaggaagaaggacagtcaatgggagagtgtgtgtttgtttgtttggtttggtttttgtttttgagacagagtcttgccctgttgatgaggctagagtgcagtggcacaatcctggctcactgtaacctctacctcctaggatcaagagattctcctgcctcagcctcccaagtagctgggattacaggcatgtgccaccatgcctagccaatttttgtatttttaatagaaatgcgatttcatcatgttggccaggctggtctctaactcctgacctcaagttatctgcctgcctcagcctcccaaagtgctgagattacaggtgtgag

SEQ ID NO: 595189 - DNA, 393 bp, Homo sapiens
tggctgtctttacccacaccccatccacttggtggtctgaactcggggctgcaggtaggtacaggaagaagaggctgtggccacttaaggtacgaaataaacattcctgccttttaagccaacacctgcagatttcacctcctcagtactggggtggagaggagaggttaggcattcactgcatgggccacagagggcaaaaactgaaaagaagtcaaccttccgagaactcgccactttgagaatatgatacccttgcaaccasctaactaaatatctgccattaactcagtctaaaagcatgaagtactgtattctcctgagattgggggaaaatacgcctcactgtaccagtgcgtgaataatcaaagtgctcctttcgttccccattat

SEQ ID NO: 595190 - DNA, 624 bp, Homo sapiens
cagtgggctctcatagcacctcttactttccttcatagcatttatcacagtttttaaaaattacacatccatttgattaatacgtatataccctatgagggcagataccatgtctggattgcttaccatggtaactccagctctaggcagagtagcaggcacatcagacaacaaactaatatttgttgggttcatgaataaagaaatgagtgaataactgcttatggaagcataaattggccaacatcctgaaaaactacacagcacaatatatcaggagacttaaagattgcatatttctgcatacaaaatcatactcttaggagtctgtcacggcraaatcatcagaaacaggcacaatgatttgtgtatagttgtttatgaaaatgttttaaaaatcattatttctttttttgtatgctttcaaaagtaatcatgctcactataaaacattcaaatagggccctgcatggtggttcacacctgtaatcccagtgctttgggaggccaaggtgggaagattgcttgggtccaggagtccaagaccagcttgagtaatgtagcaagatcctgtctctacaaattttttttttaacttagtgaaacatggcggcacatacctgt

SEQ ID NO: 595191 - DNA, 624 bp, Homo sapiens
cagtgggctctcatagcacctcttactttccttcatagcatttatcacagtttttaaaaattacacatccatttgattaatacgtatataccctatgagggcagataccatgtctggattgcttaccatggtaactccagctctaggcagagtagcaggcacatcagacaacaaactaatatttgttgggttcatgaataaagaaatgagtgaataactgcttatggaagcataaattggccaacatcctgaaaaactacacagcacaatatatcaggagacttaaagattgcatatttctgcatacaaaatcatactcttaggagtctgtcacggcaaaatcatcagaaacaggcacaatgatttgtgtatagttgtttatgaaaatgttttaaaaatcattatttctttttttgtatgctttcaraagtaatcatgctcactataaaacattcaaatagggccctgcatggtggttcacacctgtaatcccagtgctttgggaggccaaggtgggaagattgcttgggtccaggagtccaagaccagcttgagtaatgtagcaagatcctgtctctacaaattttttttttaacttagtgaaacatggcggcacatacctgt

SEQ ID NO: 595192 - DNA, 640 bp, Homo sapiens
ttcatggaatttaaggagcaggaaaaagcaactgctcatgtagaatgtaaaaactgcagctccttcaaggcagggctataacaacttgtataagcagcttactcagccagagccacatttccaggaactaatcagtcccccatattaaatggagtatatgtgtacagtacaaagtatctgtattatccttttaatttttaactttataatatatcartatattctggacatctttccatgttagaatgtggatattctatctaattctttctaaagactccataatattcctttgtattagtttaccatagtttatcagattccctattaatggacatttgggttgtttctaattttctatattagaaacaatactgcaattgccatattaatatacacttctatctagtttttgagactgtttttccatgtcctcaccaacatgaggaatcatcaaatgttttaaagattttgtaacttacaagtgaaaataatgattttcttgtttaatttgcagttcttcaatattaatacagttgctcttgtaggacatttatgattcaaattctatgagctcctcattcatgttatctgcccatgtttcttgtgggtatatttataccactaagaacttggaaat

SEQ ID NO: 595193 - DNA, 640 bp, Homo sapiens
ttcatggaatttaaggagcaggaaaaagcaactgctcatgtagaatgtaaaaactgcagctccttcaaggcagggctataacaacttgtataagcagcttactcagccagagccacatttccaggaactaatcagtcccccatattaaatggagtatatgtgtacagtacaaagtatctgtattatccttttaatttttaactttataatatatcaatatattctggacatctttccatgttagaatgtggatattctatctaattstttctaaagactccataatattcctttgtattagtttaccatagtttatcagattccctattaatggacatttgggttgtttctaattttctatattagaaacaatactgcaattgccatattaatatacacttctatctagtttttgagactgtttttccatgtcctcaccaacatgaggaatcatcaaatgttttaaagattttgtaacttacaagtgaaaataatgattttcttgtttaatttgcagttcttcaatattaatacagttgctcttgtaggacatttatgattcaaattctatgagctcctcattcatgttatctgcccatgtttcttgtgggtatatttataccactaagaacttggaaat

SEQ ID NO: 595194 - DNA, 594 bp, Homo sapiens
tgtgtctgcaataactgtatcccattccagaatatgttgctgaaaaaaacmcactagcaaggtggcagtgttatttcaacaggatctcccacaccttatggctacttttattcagagtatagtgcaatttctccttagtgaattaatcttttttttttttttttttttttggagacagagtctcgctatgtcgcacagactggagtgcaatggtgcgatctcggctcactgcaacctctgcctcctgggatcaaccaattctcctgcctccgcctcccgagtagctgggattacaggcacctgctggctaatttttgtatttttagtagagatggggtttcaccatgttggccaggctggtctcaaactcctgacctcaggtgatccacccacctcggcctccccaagtctagcattacaggtgtgagccaacacgcccagcagaattaatctttcaatagaacttcttctgtaccattcagcaaaataaccccactcagatccaacctaccatctataagtgattagagataagtgtgttttgtgcatttctgaatattctattctaatgtgctctctagtcacaaataagca

SEQ ID NO: 595195 - DNA, 540 bp, Homo sapiens
aataaataaataaataaataaataaataaataaataaataaataaataaaattaaaaaaagaggcataggcatttccctgagggccacagccatgacaaacctgaggatcatggggctggtgtccaggctggggccccaaagacaaacactatttcaatattgcccactgtgactgaatacagaaagaaggggactctggccaggtgcggtggctcatacctgtaatcccagcactttgggaggctgaggtggatggatcacttgagcccaggaccagcctgggcaacatggggaaaccccatctctaccaaaaaatacaaaaattagccaggtgtggtggcacgcacccrtggtcccagttacttgggaggctgaggtgggaggattgcttgagcccaggaggtgaaggttgcagtgagccatgatcacaccactgcactccagcccgggagacagagtgagatcctatctcaaaaaaagaaaaaaaaaaaagaaggggacccaagagagaaagtagccctgttctgtagagagattag

SEQ ID NO: 595196 - DNA, 494 bp, Homo sapiens
  misc_feature 215: n = A,T,C or G
cattgaatgaaatgcatcctgccaccaacgttaacctatcccaccttatcgcatgttgtagataactgatggtaacaatatactattggatagcatagtagaggataacatagtacaaagacatattttgtaatcccttttcccagkggaatgttgttactagaggtaatactttcatttttttttctttttgtaactacaggatcattattatnggttataatacagattgcatgagtatgataaagcattttcacatatttctgaattctgaatgactatttcaaaatttttatttgacattttttctgaatatgctcactctaatctgcaaaacacagatttttagttttgatttacaagggtttacatatacaaatatatcactttataggtaaacttcaggtggaagagatttgtggtgaatgtaactatgcttgtgtgtgagtgtgtgcctatttttacaaaaaagacaaactttagatcaatgcaga

SEQ ID NO: 595197 - DNA, 494 bp, Homo sapiens
  misc_feature 215: n = A,T,C or G
cattgaatgaaatgcatcctgccaccaacgttaacctatcccaccttatcgcatgttgtagataactgatggtaacaatatactattggatagcatagtagaggataacatagtacaaagacatattttgtaatcccttttcccagtggaatgttgttactagaggtaatactttcatttttttttctttttgtaactacaggatcattattatnggttataatacagattgcatgagtatgataaagcattttcacatatttytgaattctgaatgactatttcaaaatttttatttgacattttttctgaatatgctcactctaatctgcaaaacacagatttttagttttgatttacaagggtttacatatacaaatatatcactttataggtaaacttcaggtggaagagatttgtggtgaatgtaactatgcttgtgtgtgagtgtgtgcctatttttacaaaaaagacaaactttagatcaatgcaga

SEQ ID NO: 595198 - DNA, 577 bp, Homo sapiens
actgaccaacatggagaaaccccatctctactaaaaatacaaaaattagctgggggtggggcacatgcctataatcccagttactcgggaggctgaggcaggggaatcgcttgaacctgggaggcggaagttgtgatgagtggagatcacgccattgcactccagcctgggcaacaagagcgaaacgaaactccatttcaaaaagaaaagaaaaggtagaaattttatgtctcctggacagccctcgggagagccttcctcctcttctgttggagcaatctgatgagtatctcccagttttggcagtttatactgtggaggagagaaaagaatgtgtctgatgcaggaggacaaggccattattyaagctgatgtttgacccacaggccaggaccctggtgacccccaaagatctttggagaggacgtcctcagagggcacctaccaagtctcttttaactgtctttggcccctcactccgttctaattaagcagaggatgcagaaactctccaggtgtgttgtctgaagagttcccacttagcaacactaatatcaagaaaccatgaattattaat

SEQ ID NO: 595199 - DNA, 532 bp, Homo sapiens
ttcaaaaaactgattaatattgtggccgggatcggtggctcacacctgtaatcccaatactttgggaggctgaggcaggcagatcacctgaggtcgggagtttgagaccagcccgatcaacaaggagaaattccgtctctactgaaaatacaaaattagcagggcatggtggcacatgcctgtaatcccagctactcgggagactgaggaaggagaatcacttgaaaccaggaggtggaggttgtggtgagctgaaattgtgcctttgcactccagcctgggcaacaagagcaaaactcyatctccaaaaaaaaaataaataaataaaataaaatattgtataaccacgcttactgacatgaaagccatacctatgtcataccacattaaaaaaaaggaatggggaggtgtcatacaggtggtatatagttctgcaagatgaaaagttctggatagtgattgcctaacaatgtgaatacacttaactctactgaactgtacacgtggttaaaatggcaaattttaatttttt

SEQ ID NO: 595200 - DNA, 576 bp, Homo sapiens
cttcagtttagtaccatacccacaacccatgaatgtaattattgtcatcaatttcttgccattccttcagaattttataatgagcatataagcacacacagaaatatgttctcgtttctcccctttttaagcaaaatgtagcacactgctctgaaccctgtattttcccatctaactatgtgcagagatttctcctgtcttttagagttgaatagtattccattgcatatgtgtacttatttaaccagtcatttaacatagacacttaggttgttttgagtcttttactgttayaaataatgtggcaatgaataacctggtaatattccattttgcacatatgcagtatatatgtaggaaaaattgccagaagttaaattgatgaagtagaatgtactgcatttataattttaatggatatatctaaatggctttcatagtgtcatactaatttctacttccccacagcctaagaattttatttaacttcttgacttttcacaatctttaagtaaaaaactatggtattatgatatagttcaattaatgtttctctaactaagggtattactgtgc

SEQ ID NO: 595201 - DNA, 523 bp, Homo sapiens
aaattgccagaagttaaattgatgaagtagaatgtactgcatttataattttaatggatatatctaaatggctttcatagtgtcatactaatttctacttccccacagcctaagaattttatttaacttcttgacttttcacaatctttaagtaaaaaactatggtattatgatatagttcaattaatgtttctctwactaagggtattactgtgcctgttttcatgcatttaagagccaaaggtatgttatctttttaaaacttttgtctatatatttttttaattatcggtctttttaaattattgatttctagaagatttttattacattagaactttttataaagtataagttgtgaggaattttcccagattttggtttatcttttgacttttatatagtttttggccatacacaattttttcttagcttttcatgagtcaaatttattaatatggttttggcttttaaaagatcaataaaataaaaacatatgagcacctcaatatgatgaaaaaat

SEQ ID NO: 595202 - DNA, 523 bp, Homo sapiens
aaattgccagaagttaaattgatgaagtagaatgtactgcatttataattttaatggatatatctaaatggctttcatagtgtcatactaatttctacttccccacagcctaagaattttatttaacttcttgacttttcacaatctttaagtaaaaaactatggtattatgatatagttcaattaatgtttctctaactaagggtattactgtgcctgttttcatgyatttaagagccaaaggtatgttatctttttaaaacttttgtctatatatttttttaattatcggtctttttaaattattgatttctagaagatttttattacattagaactttttataaagtataagttgtgaggaattttcccagattttggtttatcttttgacttttatatagtttttggccatacacaattttttcttagcttttcatgagtcaaatttattaatatggttttggcttttaaaagatcaataaaataaaaacatatgagcacctcaatatgatgaaaaaat

SEQ ID NO: 595203 - DNA, 523 bp, Homo sapiens
aaattgccagaagttaaattgatgaagtagaatgtactgcatttataattttaatggatatatctaaatggctttcatagtgtcatactaatttctacttccccacagcctaagaattttatttaacttcttgacttttcacaatctttaagtaaaaaactatggtattatgatatagttcaattaatgtttctctaactaagggtattactgtgcctgttttcatgcatttaagagccaaaggtatgttatctttttaaaacttttgtctatatatttttttaattatcggtctttttaaattattgatttctagaagatttttattacattagaactttttataaagtatragttgtgaggaattttcccagattttggtttatcttttgacttttatatagtttttggccatacacaattttttcttagcttttcatgagtcaaatttattaatatggttttggcttttaaaagatcaataaaataaaaacatatgagcacctcaatatgatgaaaaaat

SEQ ID NO: 595204 - DNA, 626 bp, Homo sapiens
cactaaaattttagagttatttgttgtgcaataatagataacttatacagctgtggtgccaggagttgggtttgaaacccctgaaactttctatattttctacattaagaagtaatatctcttacatgagttgagagtgcttatttgttcctatgatgcattctgtgtactactgttttggcacttttcaaattctgcattcttttatatccacttgtagatagcttttctcccctataaaattgcaaagttccctgaggtcagatgctataccatattagactttgaaccctttccctgcctccagggtagttgatgatagaatttttttttttttgagatggtgtctcactctattgccaggctggagtgcagtggcacaatctaagcttactacaacctctgccgccctggttcaagccattctcctgcctcagcctcctgartagctgggattacaggcacgtgccaccatgcccagctaatttttgtatttttagtagagacagggtttcaccatgttggcaaagatggtctcgatctcttgaccatggcctcccaaagtgctgggattacagggcatgagccaccatgcctgtcctgatgataggttttatgtagtaggt

SEQ ID NO: 595205 - DNA, 626 bp, Homo sapiens
cactaaaattttagagttatttgttgtgcaataatagataacttatacagctgtggtgccaggagttgggtttgaaacccctgaaactttctatattttctacattaagaagtaatatctcttacatgagttgagagtgcttatttgttcctatgatgcattctgtgtactactgttttggcacttttcaaattctgcattcttttatatccacttgtagatagcttttctcccctataaaattgcaaagttccctgaggtcagatgctataccatattagactttgaaccctttccctgcctccagggtagttgatgatagaatttttttttttttgagatggtgtctcactctattgccaggctggagtgcagtggcacaatctaagcttactacaacctctgccgccctggttcaagccattctcctgcctcagcctcctgaatagctgggattacaggcacgtgccaccatgcccagctaatttttgtatttttagtagagacagggtttcaccatgttggcaaagatggtctcgatctcttgaccatggcctcccaragtgctgggattacagggcatgagccaccatgcctgtcctgatgataggttttatgtagtaggt

SEQ ID NO: 595206 - DNA, 541 bp, Homo sapiens
ccatatttcatcccaaagcactgtagaatataacttagtttgggatggatgcagtgatgggctgaagcctccttcaaaatgggaataggacaagaactgaatggttcagccatatctatatactatttatataatatcctgctagtatctcttatttccaggatataggaataaaataatttagtgtagtgatgactatggttcctttctcactttacattcyaaatcttgtatttgcctgagtaagcatcataaccaaccattcaaacatttatagagtgccagcaaaacatggtattctattaagtagaaaacaataattattatatcaatacataattttttttactaataacatctgctacttacaatatgccaggcactttcataagtttattatctcatttaatcctacctacaaccgcacactgctagtatttccattttagaggcttagagaggttgacgaacttgcccacagtcccaaagctagtaagagacaaggtcaggagttaagtctattttcatctgctttaataca

SEQ ID NO: 595207 - DNA, 528 bp, Homo sapiens
ctttgcactgtttcatgataaagctatgccagtcaattaattcagctctcggggatgtgaacacatagtacagcatatactgaaacgagggaattgggatctgcaacttagaacaaattagacatcttyaggagtcaagcagatattcaattgccatcttatttctccacgcaataaatgtcttggtttaaaaatatttatcaagaatatgaataaaacttcaagataagtattttttaccaccccaaaccccaccatcttgcttcaccattccccacttcccaccaatatggcctggcaacctgtgtcaaaggttttttttttttttttttgagacagagtctcgctctgtcacccaggctggagtgcggtggcatgatctctgctcaccacaagctccgcctcccgggttcacactgttctcctgcctcagcctccctagtagctgggacccgccaccaagcccggctaatttttgtatttttagtagagacagggtttcatcatgttaaccaggatggtctcgat

SEQ ID NO: 595208 - DNA, 579 bp, Homo sapiens
aagtttcctgagacctcctcagccatgcagatctgtgagtcaattaaacctctttcctttataaattacccagtcttgggtatttctttatagcagtgtgaaaacagacgaatacagtatcattttatcctaaacagacacttttcagaaggccaagttataactaaagttgtattacttaatgagtattaaatatgtattgcctatcrtaagaagaaattgtaacaattgtatttccccccagaaatatagagaaatatatttggaatgacattctcgcactaataatagtgcaaggatgtcacaggtttggtttggttgttgttcttattatcgttcttgctgtttttgctgttattgtttttccagtgatgggagcaggagttgaaaaaaaagtcttaaatttaactttccttcttaactaaacaaaaacaaagctttagttttcagcctcaattcacttcaaatcttttagcctagtcccactggcactgtcacttcaaaatcacagcataatgcagtatgctgttttccaatgtcagtaaaacaaaagctttattgaataaatatgtgtgaaaa

SEQ ID NO: 595209 - DNA, 618 bp, Homo sapiens
caaacaatctctcctgtctttagtcttcaacccctcatcaaatcacttcattctccttactccaacttcatttctttgttcactgagaagaataaagtcawgtgatatttgtccttaaattccatttcctccatctcaaaactactgctaggacaaattttctctcttgcttccatcccttcatttttaggggaaaaagtataagagatttctaaaatttacttctatctcttgtgctttgtcctatttgatcccacatcttttgttcattcagtcgtccattcattcagtcatttgcttgcttggtcagtcaacaaatacctactgagtatacatgtattacatgtagtttaaagtgagaggtaggttataatacctgatctgtcattttctagctacccaagcacagtcaagtttcttaatctttctgccattcagtttgctcagctgtaaaatgaggaataccttcttcatgtactagtttgaagatgaaataagaaatggcagattaagcatctaacactgtgcttaagtatataataagctttacggctagcaaaatggcagattctaaaggtatatagctgaaaagtgttgttatgaagtatatatacatac

SEQ ID NO: 595210 - DNA, 585 bp, Homo sapiens
gaggctactatgaacgcctttttgcatacaaactggaaaacctagaggaaatagacaaattcctggaaacgtacaactctcctgtattaaatcaggaagaaacagaaaccctgaacaggtgaataacaagcagcaagattgaatcagtaatttcaaaattgccaagaacaacaaaaaaagcccaggactagatggattcacagctgaattccaccagatgttcaatgaagaattggtacaatcctactgaaacaattccgaaagattgagaaagagggaatcctctctaaatcattctatgcagccagtatcgccctgatatccaaatcaggaaagaacacaacaaataaaaaaaactacagaccaatttcactgatgttgaacatagatgcaaaaatcctcaacaaaatactagctaaccraccccaatagcacatcaaaaagataattcaagtggattttgtcccagggaggcagggatggtttaacacacacaagtcaataaatgtgatacatcacataaacagaattgaaaacaaaaaacacatgatcatctcaatagattcagaaaaagcatttaataaa

SEQ ID NO: 595211 - DNA, 567 bp, Homo sapiens
gagctcagtatttctcaaactttggggagcatacagtacacctgagcatcatgttaaaacacaaacctgaatctcagtagatctgagataggatccaagattctgaattgctatgaaacttccagatactgctgctggtctgtgggccatattgcttacagaacttcatgctccacaagaatatgtgggtgaaaagtaacacttttttttcagttaaattactgtttttcctacctattaaattatgtgatctttttaactcaaatttctttcaattattaaggccacattattttcctgtggatatttgtagttaggatatatggctccttatcaaaggcagcactgacacaatcatatagcccacacgytgtgtataagccctggtgggtggagtactttttcagtactcctggcagagaagttagcttctgtctcttccaccctatcctctcccaggatactaaatggaattaggttaaacaattgctcagggccgaaccaatataaaactcatcatagatttattctggcatacaagagatcagtttaatttaaaaattattt

SEQ ID NO: 595212 - DNA, 600 bp, Homo sapiens
tcaaaatcatagcattattatacgattggatataaaaacctcagttttagagcacaaagtaagatgcattccatctactgataactttcttctggaatgtagcagcagcaaaggttgattaaattatcaaatgaattattttctgttyatcaatatgcagcctgtgctcccattaacagatttgactgctcaaatgaatgcatgtttaaaattcagtttattaatatagatgcagatgtttatataaaaaatatttttatatatgagtatgtaatatacacactttgttttctgaaaggctgcaaaagcaataacacccctggagtcataagcacacctattcactagaccttagtttctaatatcattctctgattaaatgaatcagagcttctaatgaagcccttagaaatgactgattctaagactgaagacaagataagcctgaaccattttgtagtgcaggaggtaaaattacaacaataaaaacaaaaacccacgaacaatggtgggggtatatctaatttgcgcataagccaactgaaggactgccaaagggccaaagatggaacaacttcaacaatgaaataaataatatta

SEQ ID NO: 595213 - DNA, 499 bp, Homo sapiens
aactgagccaaattttcttagatgaaagtagagttctgaaaatatgcatatcaaactttcaataataaaatctacaacgaggaaaacaggttttaagtatccaataaattttataaattcatacastaatgaagtggtatgcttgtaaataagctctctaaaagaaataaaactgaataaagaaggaagtaaacccttgatttgtagtgtttacctgctttcaggtacaactctcactatatctgatttcaagttatcaatggcttaacaagcagctcacaaaatttctgaatctttaataatcaactttcataagccaagatgagataactcaaccacaccactgttactcttttagcaataccccaggtaagattcagaatatttgtatgaccacaaaaagttcctgtatgtccccttttagtcaattctgatcccttacttaaaaaaaaaaagaaaagatttcaatttatataactaaagattagttttgtttgtt

SEQ ID NO: 595214 - DNA, 427 bp, Homo sapiens
ccaccgcactccagcctgggcaacagagcaagactctgtctcaaaaaaaaaaaaaaaaaaaaaaatctaatctaattttttctctacagaatgtctgctaaaataagtgagttggagcttgagaatattatgatccacagttgaacttayctccatttggttgcatttattatccatagatcaatcatagacttattcctgatgctagtagcagcctttaggtttaaagcttaaggatattgttttcttttttaaaaactttgtgcatattcattaagcaatttctctatgtcaggcattgctccagatattggtgatacatcaattaaaaagatgctaatctctgcactggtgaagattttattttatctagaagttaaagacttccagagatttttttcattatatatgtgtatgatatttagtc

SEQ ID NO: 595215 - DNA, 494 bp, Homo sapiens
aaaataatgtaggaaataatacttctttgtcttgattagacttgactaaacatgtatcttatatttactttaaaatgacaaatatccacgtccttcctataccagagacataaaaagatatacttttacttttaataatttagtatagaacagtttatgatatgattctaaattcatttttggcctgtttgagcaattctatttctagacaaayacagtataaagatgctcattctgctccaccctgtttatgccaagtaaatattttcaccttattaaagttggcaaacctggaagcaataagctattttgtagtggttactgatttaaacagacaagagtaaaaaaccatgacaatttctgcagttcatgtcagtaaagcaaaaaaagtttgtaataagaaataagaaacttgtacataatacattttaaatctctttgtcaaactctgttaacatcttgccatgactgctagatattcatgaaattttcat

SEQ ID NO: 595216 - DNA, 546 bp, Homo sapiens
attaaataaacaaagtaatatttttggtagttttagagccttagagtttttattagcaaaaattatatccagtttattataataacaacctacatattctacagagattttttaagtttaaataatcttttgcatatgctgtctcatttaatccttacaacagtgataagactcatgatgaaaaaactaagttgcagagaaaaatgtagcaaaacatagacatrgtaagattgtagaattaagattcaagacaaataatttctaatcatgatgatttctatcattatagtagtttattaacaacctaataaataagaaaaacgttcctattttagtaattttctttatctgtttcaagactttggctgaagcaagacgaataccatagtattcttcatttaatttctcttagcattctgccaaggttgtttcaggctgaatgaaagcatcaaaagttcacaataataatagaaaaagagaccacacattccagttggctgagagaatgcttatttgatgtctaaaacaggacatacttgaaagtga

SEQ ID NO: 595217 - DNA, 595 bp, Homo sapiens
caatctgaatactcacatttgaacactatcactttcatttccaaatacagcatttgattcactggaataaaactaagaacttggattttgaatatggaaaacaaattgctgatcatgttcttaattgagtgtgtgacggtcatgtacctgaaaacctatcaactcaacagagaagaaaaacaatgtctgatgctctcatcttcctttgaaacccattgctttgaaacctaatgttttttgctcagatcagtgcactctaattagcttctggaaatccttgaatttgtattttattaaaaaggatactccaattatatgtataaaagttaaawccaatattttaacagtgtcatttctaatatcttcatctctctatttgtagttgcctattcttattttttgagatagtaatatgtatctcaaatgtgaaacttaaaaaaatagtttttccaaatattccttataatactcctttttccatcagggtttaaatgtcctctatcctggcctttcaatttcatgcttttagttttgtcgagattctcttaatccttagttgattattcacatttttacctaacgaatgaatgatgtt

SEQ ID NO: 595218 - DNA, 566 bp, Homo sapiens
aaatttatttacttttcatttagytgattgtttctttgcctcacagaaactttaacttgatatagtcccacttacttatttttgcttttgtttcttgtgcttttggtgttgtatccaaaaagtcattgcaaagagcattgtcaaaagcttttaccttatgttctttttccctgcttttatagtttcagagcttgcatttaagtttaatctatttcaagttaatttttatgagtgatgtacaatagccatctaattttatttattttaatgaagatagccaatttcccaacaccatttattgaagagattatcatgtccccattttctgtattgttgacactcttgtcaaatattagttgaccatatacgcctgagtttatttctgagttgttcattctattgcaatggtctatgtgtctgtttttatgcaagtaccacactagtttgattactgtagcattgtaatgcactttgaaattagaaagtgtgattactccagatttgttcttctttctcaagattgctttggctaccttgaatctttcctgattcaatacaaattttgg

SEQ ID NO: 595219 - DNA, 594 bp, Homo sapiens
tgggcctttactaatcgcagcttctttgttgagaacgatttccagattcccaccacaaccccactcacaactccactagacctggctgactcttccttcaagagctcagttcagaatacttttcaagttctccctacctgttcccaatatattaatagtttatgtgcctattatctgtgttctcaccatcataacactttacaaaacattttatattgtcattacctacttaatgttcgaagtggggcctggtgggaggtgactggattatggggacagttttttcatggtttagcaccatctccttggtgctgttcttatgatagtgagtgagttcttatgaaatctggtcgtttagaagtatgtggcacctccctgctctctctctctctctctctctctctctctctctctctctcgctcctactttagccatgtaatacgatcctgcttctcctttgccttctgccatgrttgtaagtttcctgaagcctccccggaagctgagcagataggcagcatcatgcttcctgtatagcctgcagaactgtgagccaattaaacctcttttccttataaattatccagtctcag

SEQ ID NO: 595220 - DNA, 622 bp, Homo sapiens
acgcattatttcagtgtttgaaaaatttaccagtgatgccatctgagactgaagatttttgttatgaaggtttttaattagaattatattgctttgatggatttaatagacacactattttactcaagtcccttacagtaaagtttgcattttgtagacaattgttaacttcatataaattttcaaaatcattccattcattcaaatatgcttcataatatgctttcattatctatgtaatgctaacaagatttgcaatgatgataatttctcatttattttgattatttatgcctttgttttgtcaggggtttctaatatgtattaagtgctatagtctggatatttgtcccaaaaaatctcacgttaaaatatggtcacaatgttggagatggggacctaatgtgaggtattttggtttgggggtagacacctcatgaatagattaatttccttcttgagaggcagacggggatgggtgagtgagttctctatttattcccacaacagctggttgttaaaaragtctggcaccttccttctctctcttactgcttctcttactatgtgatttttgcacacgattgttccacttcatcttcttccatgagtggaagcagcc

SEQ ID NO: 595221 - DNA, 498 bp, Homo sapiens
ccatgtgtccagacctactcatcataatctggatcctgtcaaatccaccagatcgtaagctgggaagacccacagcagtctatcataagtctaaagtggtaccatcaggatcaggtatgagcaggccagagggtacaaataagcagaatgagcaatgcactcccatgccctttgctattattgtacaatttctactccatcagctcagaaatataactataactgaggatccaaaaaaggccaagcttgattaatraatggatatccttagggtgtgaggtacagccttaattcagagtgtcctcaaaagctaacagtgtggggaaacctcccaatagtcagaattttggataatgtccctggtcatacacattgtgtggaaatataagctagccagggtaagaatacatatgctctcatgggaagtggcaaaaatgagagattaggaataaattaatttggggaaaataaattagaacagactgaggcacaaagttg

SEQ ID NO: 595222 - DNA, 566 bp, Homo sapiens
catctcataagttaaataccagaatttgaaaacccggaaaagacggtctttttgcttgggctttacacacctagaagaaaaatgccagcgtcctaaacctccatgtaatatacttgtaaaaaaacttgactaatggtagcagtcaccaaaaagtgcaaatataggatcatatggtagttgcatgtttagttttttaaaaaagtgataaactgttctccagactggctatatcatcttaacattcccaaccacaatgaatgaatgatccagtttctttgaattccagccaacatttggtatatctattattttttactttagacattctgacagaggtgtagtaatatcttattgtgatattaatttgcatttccctgatggctaatgatgcygaaacttcttttcatgggcttatttgccatctgtctctcctctttagtgaaatgtctgtttatgtcatttgaccatttattaactggacatttttctattgaaattttatatattctatacactagtcctttgttggatgtcatttgcaaatattttcttcaagtttgtaactt

SEQ ID NO: 595223 - DNA, 590 bp, Homo sapiens
ctgcaggtgaaagtacttgaacaaagagaattgcacagaggagagcgccaaaaatccacattgttttgccctttaatcttcagctgagtactgctaaatgtgtgcctatgagcaaaactgcctaaggctggagtggagtcgggggaaggaacagtcaaaaaagatttgtgagaacaatagccagagatcacaacaggccagaatagttggtgtccccatcagccgaggtagaataacaacacaattcttgatactagcrgtagaggattcagaagagtattgcctaaggataagggcaaaattagcactagaagaaaggtggctctaattccatctgacaaaatattaaagcaaatgtcaaaagattaagttatttacatgtaacttaaatgtatcccagaacacagccaaaaaatatttataagaatacaaaaatatccagcacacaaaatggtaaagttcaccatatctacaattcaattaaaaaaaagatatgtaaaaagtaattgatctataatgcctagaaaaatcaatcaaaaaaatgaaaaaaatgaaagaataaatagaaaaggacattacaagttattata

SEQ ID NO: 595224 - DNA, 535 bp, Homo sapiens
agctgccctctcctacctgtgtatagcatcctgcaaaaagatggcagagagagccattctgtggcattaatctttacctttatgaaaacctatgttcttaactagattgcaaaaggtaaactgagataatagtttttttctccctataaggatgttgaatatgctgcagataaatgcraaatgacaccaaagttttgcctatcaatagcctcataagcaactatcaagaggataatggtgtggccttcttaacttgtgctatatattccagcatcaccattagattttaggctgaatgttttcatagaggaactgaaatgtcatttggattctttctaagcttcagtatataaaaatacattaagaaatgttttgaatttaggccatactattacgctactcaatttcaaactcaacctggtagtaatagtttataatgtatgccataattctcacacttgatacctggaaataatagcttttccttccactaaaataaagagaaaaacagttttttaaaaaagtatttgtgatc

SEQ ID NO: 595225 - DNA, 606 bp, Homo sapiens
gtccctttctaagtgatctgtccattgtctttagctccctttaacgttttttcttacattttgaccttggagaatctgatatctatatcttggggatggtcttattgtgccctatttgtaggggttctctgcgtttcctgaattttaaagttggtctgtctagtgaggctggggaaattattagatggtattctgaaatatgttttccaagttgcttgctttctcttcctgtatttcggggatgccaatgagtcatagattttgtctcagcataatyccatatttctcataggttttcttcattctttttaattgttttttctttaattttgtctgactgagttatttcagagattcagtatattagtccatttacacactgctgataaagacatacccaagactgggtgatttataaaagaaagagaggtttaatagacttagagttccacatggttggggaggcctcacaatcatgacagagggcaagcagtagcaagtcacgtcttacatggatggcagcaggcaaagagagagcttgtgtggggaaactcccccttataaaaccatcgtatctcatgagacttattcactgtcatgagaaca

SEQ ID NO: 595226 - DNA, 540 bp, Homo sapiens
aacagccccaagtcacctcccagaaatcaggaggcagatgccttattcatgtgtgagcawtttgcccgagcccatgggtacattataaaagcggccactgcggcgtggccacagtgtgggccatagcaaaggcagtgggcaactctatccaatatgcagctactcagaagtgtgagatctattcatagctgcagcctagaaaagctccctcagcaccaagtcacatccattgagccatacagtctgtgcaagactggcaagttattatattggcccctcgcccctcaaacagaggaaaaagttgtgccttaactggtgtggattcaacaacagggctgctacaggccttcccagtaaatcgtggcactcagctggaaaccatcaagtgtcccactgctcttagtctcatgcaggacatgccaaaaagaagacatagtgatcaaggcccccatttcacgggccatgatatccaacattgggcattggaacaaaacatagactggaggttccatgtaccatataagctaacagggatgggtc

SEQ ID NO: 595227 - DNA, 540 bp, Homo sapiens
aacagccccaagtcacctcccagaaatcaggaggcagatgccttattcatgtgtgagcattttgcccgagcccatgggtacattataaaagcggccactgcggcgtggccacagkgtgggccatagcaaaggcagtgggcaactctatccaatatgcagctactcagaagtgtgagatctattcatagctgcagcctagaaaagctccctcagcaccaagtcacatccattgagccatacagtctgtgcaagactggcaagttattatattggcccctcgcccctcaaacagaggaaaaagttgtgccttaactggtgtggattcaacaacagggctgctacaggccttcccagtaaatcgtggcactcagctggaaaccatcaagtgtcccactgctcttagtctcatgcaggacatgccaaaaagaagacatagtgatcaaggcccccatttcacgggccatgatatccaacattgggcattggaacaaaacatagactggaggttccatgtaccatataagctaacagggatgggtc

SEQ ID NO: 595228 - DNA, 583 bp, Homo sapiens
tcagggtttcaatttcttcctgatacaatcttgagagcatgtgtgtgtttccaggaatttatcaatttcccgcagattttctagtttgtatgcacagaggtgtctataattgtttctgaaaatcttttggatttctatgggatcagttgtaatgtagcccttgttgtttcttattgtgcttatttggatctactatcttttttttctttattaatctagctagtggcttgttgatcttttttatcctttcaaaaaactaacttttggttttgttgatatttttcatcaaattctggatctcaatttcactcagttctgctctgattttagttatttcttttcttctgctagcttttgggttaatttatccttatttttctagttcttctaggtgagattttagatcattgatttgagatatttcaaacttcttgatgtaggtgtttagtgctataaacatttctgttaacactgcttttgctgtatcccagatattttggtataccattctggacatcagctcatggcaaakaatttatggctaagtcctcaaaagcaattgcaacagaaacaaaaattgata

SEQ ID NO: 595229 - DNA, 671 bp, Homo sapiens
accatattctctaaatcaaagtgcttataaattatgtttataaatttaatcctcagcataatcattagagcaaactaaagttgttgtatcattgtaactttggtttgtaactccatttttttgttctctacatgattaacgagacaaaaaattatttatctaagttttggatatataatgcatacagatataattttgtgacagcagtaactgaaagggaatggagatggagctctgtaggagcacagtgtttgtttgcaattgaaattaagctggtataaattcaaataagagggttataactttaggatattaaatgtaatccccatggtaaccataaagaaaatagctacagaattcagaaaaaaaaggaaataagagaatttagaaagtttcgttatataaaatcaactaaacacaagacggtaatgcagaaaatgatggcccaaaatgctgtaaggtatatagaaaacaaataacaaagtgaaagaggtccttccttatcagtaattattttccaraacaatctcaaaagagaacaaagtagaggacttcaatttcatgattccaaaatttactatgaggctataataatgaaaacagtgtggtattggaataaaaacagacatgtagaccggtggaatagagtccagagataaattctcatgtac

SEQ ID NO: 595230 - DNA, 609 bp, Homo sapiens
gtatgaaatttgggagtcacaattcaacccataacaatctatatactctttcattcttatgtgtttctcctgtacttcaacatataaaaacagtaacttacacttttaaagtactcactatgtgcataccaaatgctcctctcggtatatctattgacatttaattttcggcacctttgatgtagaggttactgttatgctgatttgaaaagtgagaaaactaagacacagagaggttaagatatttgcacaaggtctgagggcaaagatggccygtgcctggccttggctctgggtgcctgctctgcaccactttgcagcactagctctctacgcatgtctgcctccacgtggagtacgccgtgtgaggaaggagaggagttgttattgtagctggtgcactcttactctctttaactgtgatcttagacaacagtcttcattatgtcccattaatattgatgctcgagttcttttagaatgtaagattttttttttttttttttttgagacagggtctggctctgttgcccaggctacagtgcagtgatactctcttggctcactgcaacctttgcctcccagcttcaagcgatcctcccacctcag

SEQ ID NO: 595231 - DNA, 414 bp, Homo sapiens
atcagatcttgtgagaactcactcactatcatcagaacagcatgggggaaactgtccccatratccaattacctcccaccagatccctccctcgacatgtggggattatggggattacaactcaagatgagatttgagtgggacactgagccaaaccataatatacgctatgtatataaataatgattgtgttctagtttgtaaacccaattttctttttctgataggcatttagagtgggaaaagaagacataaaaagtgaacttttcagatttttgctaataagcgtataaatgtatctatctgtatacctatctgtcttcatatcttctatttataacagagggaaacacaggcttatgcttagcccctacctgtcttatggggaagtttaagcaaatgagtatctgttct

SEQ ID NO: 595232 - DNA, 543 bp, Homo sapiens
caacaatgaaaaaattaccaaactgattttagaggctttctatcaaataatgtcgcataaattttcgtttgcttaagtcagcgttccaaagatattaggaacatttaggcctacactggctgggttcaaatgccatctctgccatctaccatatatgtgcatttgcaagtttctctaaagctcagttaacttatctataaaattgaaatattacrgtaattacagaattgtgatgattagctttgtgctaatatatgcagaaaactcagaggatgagtggaacaaagtaagggcttgataagttttgttggttattgcatcgtgctgctctttaaagcaacacatattattagagacaaaaggaaatttcataacacagcttcaaaagataacaaatttctctcagtaattatttcaacaagcagagaaaatcttactaattttagagatttacttattggttaatcaactttacctagtcaacctatgtagaacattctacttacaacagcaatgtattttttaagtacatttcaaacattt

SEQ ID NO: 595233 - DNA, 347 bp, Homo sapiens
tgagtgagggagaatgagtatatgrgaactctatatgatctgctaaattttctgtaaacctaaaattgctctaaaaaataagttctgctaattaaaaacattaatcagtaaacaatataaataaccagctccactgaaaagttaatttattaactagggtatagttcccaatttaaaaacaggtcatattaaaaaatgcacttaactaaaattaagttaaatgcacttaactaaaatttatacaaaactttgcatactgttttctttgtaaacaatgtaacaactaccatcagagtgagtaggcaacctacaaaatgggagaaaattttcacaacctactcatctga

SEQ ID NO: 595234 - DNA, 392 bp, Homo sapiens
ggacatgaacagatacttctcaaaagaaggcatacattcagccatcgtgcatatgaaaaaatgctcatcatcatgaatcatcagagagatgcaaatcaaaaccacaatgaagtaccatctcaaaccagtcagaaaggctaagaatcttaatccataaaataaagtaaaaaataaaactaatggatatattatatgcccaagattagacagttgttataaaaataacttagtgaactattaatcattccataaatttcaatttaatgttacatatgcatttawacgtagtggacatgtatcaaggatgcatattttctgatcatttcaaatgtataatggcaatttctgtttctggaaataacaaatagttaaattcacattccaacattaat

SEQ ID NO: 595235 - DNA, 647 bp, Homo sapiens
caatataatagtattaagatatggggcctttaggaagtgattaaatcatgagggtgctgcctatagtcttagctacaaaggttgaaaagggaggatccctggagcccaggatgccaaggctgcactgagctgtgattgcaccactgcactccagtccgggtgacagggcaagatcctgtgtaawaaaaaagaaaaagaaaaataatgaggatggaaccctcatgaatggtatcagtgactttaaaaagggctggagggaactagtagtcacctttgccttatgctttcttccacgtgaggacatagtaacaaggcaaaaaggcatctgagaagcagagactgaccctcacaaaacacggaacctgccagtgccttgaacttagatttctcagcctctcaactgtaagaaacaaatttatgttctttataaattacccagtctcacatattttgttacagtagcactaacaaactaagacaggcttcaacatataaattatgatagcatatactcattcaatccataacactccatcattttattagaaattttctgtgtatccattacctcataatgaaacaaaataatgaacaatcaaactaaacattattcctctaaatcgaatagtattttcttttccaaaata

SEQ ID NO: 595236 - DNA, 566 bp, Homo sapiens
gcgattgcgccactgcactccagccatgggtgacagagtgagactctgtgtcaaattaaaaaaacaaaaaaaaaaraaagaaagaaaaaagaaaagaaaaagaaaaagaaaaaaaaagtatccagttttggataatgaattagatgatcccatattcacttaggttactccttcctgtccccagttgaaaactgagtattaaatagttaagccttttttacttttttctttttttgccatagagctatttcatgcttttcttatgcatactaactctcacatttacctgctattttaacaagacacaacttaataattcttagtaataaccatgaaaatagctaattttatatagcccaaatattatactgcatggtcctgtgaagcttggtccactcctgaaagtaactaacagtctttatttttgacttgctgagtgaaattgcaaaacatttctgccagaagtcataataagcttctttaatggacacatttttgagtctggcttcactgttgttctacaggtcatttcaaattctttatttcctggcataaaaacaaaaata

SEQ ID NO: 595237 - DNA, 566 bp, Homo sapiens
gcgattgcgccactgcactccagccatgggtgacagagtgagactctgtgtcaaattaaaaaaacaaaaaaaaaaaaaagaaagaaaaaagaaaagaaaaagaaaaagaaaaaaaaagtatccagttttggataatgaattagatgwtcccatattcacttaggttactccttcctgtccccagttgaaaactgagtattaaatagttaagccttttttacttttttctttttttgccatagagctatttcatgcttttcttatgcatactaactctcacatttacctgctattttaacaagacacaacttaataattcttagtaataaccatgaaaatagctaattttatatagcccaaatattatactgcatggtcctgtgaagcttggtccactcctgaaagtaactaacagtctttatttttgacttgctgagtgaaattgcaaaacatttctgccagaagtcataataagcttctttaatggacacatttttgagtctggcttcactgttgttctacaggtcatttcaaattctttatttcctggcataaaaacaaaaata

SEQ ID NO: 595238 - DNA, 566 bp, Homo sapiens
gcgattgcgccactgcactccagccatgggtgacagagtgagactctgtgtcaaattaaaaaaacaaaaaaaaaaaaaagaaagaaaaaagaaaagaaaaagaaaaagaaaaaaaaagtatccagttttggataatgaattagatgatcccatattcacttaggttactccttcctgtccccagttgaaaactgagtattaaatagttaagccttttttacttttttctttttttgccatagagctatttcatgcttttcttatgcatactaactctcacatttacctgctattttaacaagacacaacttaataattcttagtaataaccatgaaaatagctaattttatatagcccaaatattatactgcatggtcctgtgaagcytggtccactcctgaaagtaactaacagtctttatttttgacttgctgagtgaaattgcaaaacatttctgccagaagtcataataagcttctttaatggacacatttttgagtctggcttcactgttgttctacaggtcatttcaaattctttatttcctggcataaaaacaaaaata

SEQ ID NO: 595239 - DNA, 639 bp, Homo sapiens
ttcaggacgttccaagatttattctagttcagagaaaaagcatgtgggaaagaattaatagaacctttgtcatttttaaccttttcaagtacaagggaggatgaacagatactaagtagtaaattataatagccaagcacttgattaatttgatatttttctctttcacatgacatgaaaagaaaaaaatatagctctgaaacttgtattactaacttttgctttaattataatttttctgtccataggaaccacttttgaaagtgattgttttcagttacatcaaaagattagtcagtgtatctgtcaggaaaggaaaaaaaatctttatcttggtgaaaatatttgaaactgttagacatatcaattttttttttgagacagcatctcactctgtcgcccaggctggtaagatcatggatcactatagcctcaacatcctggcattcagtaatcttgccatctcagcccacggaggagctggaactacaggtgcacaccctcatgcccagctaattttcgtggcttttttwaaaatttttttctttgatagagacaaggtctcattatgttgaccaggctggtctccaactcctggacacaagcaatcctcccccttggcctcccaaactgctggga

SEQ ID NO: 595240 - DNA, 463 bp, Homo sapiens
gtccataggaaccacttttgaaagtgattgttttcagttacatcaaaagattagtcagtgtatctgtcaggaaaggaaaaaaaatctttatcttggtgaaaatatttgaaactgttagacatatcaattttttttttgagacagcatctcactctgtcgcccaggctggtaagatcatggatcactatagcctcaacatcctggcattcagtaatcttgccatctcagcccacggaggagctggaactacaggtgcacaccctcatgcccagctaattttcgtggcttttttaaaaatttttttctttgrtagagacaaggtctcattatgttgaccaggctggtctccaactcctggacacaagcaatcctcccccttggcctcccaaactgctgggattaccagcgtgagccaccacacctggcttcaaatcttaacaaatctaataaaaatcattgatac

SEQ ID NO: 595241 - DNA, 603 bp, Homo sapiens
aaaaaaggcttctcaaaaaaataaataaaattgcccctgctgctctgccagagcacactctcctacagtcccccaacaccattgtgttggcatgcacaagcagacctatcaccctgccctgactagtacacacaagcacgcaccccaccacacccgccactgttggtrtgagtgcatgggcacaaacaccattgccactcttgcactggcactcgcagatgctgctacctggccttggttggtgtcctacccagttgatgcttgaagaccctgccaagtcaccaccaccactaatgcacacttgtatacagatgctgctgcccaaccccatcaaagaacttttgatgatatctcccattacagtactgttgacatagagtagaaacaccttgacacctccaactcagcaggtacttaacccggaggggccagagaacaaagctttgggctggtaccaacccctcaaagttaaagcatacagcctaggggtactcagctgagcctcatcctctgaaatcttcttgaaatgaagccagttgactgaaccgactttatatgacagtcactccctcaagggtatcaaagaatataaaagcaaaatcc

SEQ ID NO: 595242 - DNA, 597 bp, Homo sapiens
agcctgagcaaatgattttaagaagtacatgacatagttggaacaaaatgaatttggcagttgtttcttcatgttatgagagtgggaaaaagtaagagrcattgagacaaaaagggagggatcacagtatttcttaagaagagaaatgaatcatactgaaacagggattgtatctccagagatgaagaaaaggaacagatattagaaatgttgtgaggaactgaaagatttggcaacaacctagctcaaacattgtgtattattgtaattttccaatgtcaaaattttctcaattttaggacatggcagaagatcaaggttctgtgtcccttttgtttacacagatcgagtgtaacaggagtgttaggcattactttagatattccctgggcactctttctaaataaaagagccaatttgggattttgatccaaaatgattaatgttcctgttggcacatgtgtttttgaaaataagtgatttgacaaatcaaataataagtatactgagaatctcatgaagtggggcatggtgctaaaaactttatctttcttagcttgtatttatttttctgagacctgtgtagagaacttgctt

SEQ ID NO: 595243 - DNA, 561 bp, Homo sapiens
gcataagaaatatgttaccagctttcaaaatgcctgaaacttcccaagtaggaaacgcatggataaaaatctagaagtactgaagagtacatggtcatgttatgaattagagcattctcttctaaatttcctaacccattgaatttcttccctgtataaccaagagtttaatttttaaaatcctttcgtatttgccataaagttgtttccataggctacattgtaagacaggcaaaaaagagaaagagggaaaatgagatgatcctatttcttatttcctattagagtgtatgttctatgagatttgggattgcctggcactgtatctggggaaaagctcagacttaatgggactcaaaggtatctcaaaagattagatgaatagcatttgaaatatttttaagtgaggttgacttttccctggctttgaactccaatatgacctgagcatttgagaaggagagttaaacctatggtaagagattctrtggttctttccctgatggaaacagaatttaacgtggttgttcctggggaatttataattttatctcatttaaa

SEQ ID NO: 595244 - DNA, 603 bp, Homo sapiens
aaaaaaggcttctcaaaaaaataaataaaattgcccctgctgctctgccagagcacactctcctacagtcccccaacaccattgtgttggcatgcacaagcagacctatcaccctgccctgactagtacacacaagcacgcaccccaccacacccgccactgttggtgtgagtgcatgggcacaaacaccattgccactcttgcactggcactcgcagatgctgctacctggccttggttggtgtcctacccagttgatgcttgaagaccctgccaagtcaccaccaccactaatgcacacttgtatacagatgctgctgcccaaccccatcaaagaacttttgatgatatctcccattacagtactgttgacatagagtagaaacaccttgacacctccaactcagcaggtacttaacccggagggrccagagaacaaagctttgggctggtaccaacccctcaaagttaaagcatacagcctaggggtactcagctgagcctcatcctctgaaatcttcttgaaatgaagccagttgactgaaccgactttatatgacagtcactccctcaagggtatcaaagaatataaaagcaaaatcc

SEQ ID NO: 595245 - DNA, 529 bp, Homo sapiens
cctcagtaaaatttctaggtgtccagtggtatggggctgttgagatagtccttttaagatgaaggataagttgctgcatttggcstctcctgcaaccaagaaaaagacacaatgcctagtgggcctatttgcattctggaggcaaaacattcctcatttgggtgtgttactcaagcccatttatcaagtgacccaaaaggctgccaattttgagtggggtccaaaacaggagaaagctctgcagcaggtccaggctgctgtgcaagctgctctgccacttgggctatatgacccagaagatccaatggtggctgagatgtcagtggcagataagggtgctgtttggagcctttgcgaggtccccataggtgaatcacagtagaggcctctaggatttggagcaagtccctaccatcttctgcagataactactctgcttttgagaggcagctcttggcctgttactgggctttacggaaactgaacgtttgactgtgtgtcatcaagtctccatatgacctgaactgcc

SEQ ID NO: 595246 - DNA, 529 bp, Homo sapiens
cctcagtaaaatttctaggtgtccagtggtatggggctgttgagatagtccttttaagatgaaggataagttgctgcatttggcctctcctgcaaccaagaaaaagacacaatgcctagtgggcctatttgcattctggaggcaaaacattcctcatttgggtgtgttactcaagcccatttatcaagtgacccaaaaggctgccaattttgagtggggtccaaaacaggagaaagctctgcagcaggtccaggctgctgtgcaagctgctctgccacttgggctatatgacccagaagatccaatggtggctgagatgtcagtggcagataagggtgctgtttggagcctttgsgaggtccccataggtgaatcacagtagaggcctctaggatttggagcaagtccctaccatcttctgcagataactactctgcttttgagaggcagctcttggcctgttactgggctttacggaaactgaacgtttgactgtgtgtcatcaagtctccatatgacctgaactgcc

SEQ ID NO: 595247 - DNA, 529 bp, Homo sapiens
cctcagtaaaatttctaggtgtccagtggtatggggctgttgagatagtccttttaagatgaaggataagttgctgcatttggcctctcctgcaaccaagaaaaagacacaatgcctagtgggcctatttgcattctggaggcaaaacattcctcatttgggtgtgttactcaagcccatttatcaagtgacccaaaaggctgccaattttgagtggggtccaaaacaggagaaagctctgcagcaggtccaggctgctgtgcaagctgctctgccacttgggctatatgacccagaagatccaatggtggctgagatgtcagtggcagataagggtgctgtttggagcctttgcsaggtccccataggtgaatcacagtagaggcctctaggatttggagcaagtccctaccatcttctgcagataactactctgcttttgagaggcagctcttggcctgttactgggctttacggaaactgaacgtttgactgtgtgtcatcaagtctccatatgacctgaactgcc

SEQ ID NO: 595248 - DNA, 557 bp, Homo sapiens
tctgggttgaaatccctgtcacttgaaactgagggattccttactcaatcacatgattttctatctccaacatttccaccttagttcagatttccatttctctcttggattgctccaaagccctacaactgatttctcctgctgtaaatatgagtattttctgtcagctctcaactccacagagctctcagaatgacctacctagcatacagatctgactatgccatgtccctgctaaaaatatattttctgaccacagtgtaaagaataatatctttaacattgagtgtagagccctatgagatgaagccccctacctaactctacaacctagtttatcattttcccctcttaatatttgtgtatcagcagcactgaacagctagtgtatttytcttacaaacacactgcagtgtttttcaatacctccactttactcaagttcttttgcctagaatacactttcatttttcgtgtcgtggagtctaactactactattcattcccctatgcaccaaacctaggtgaggtgtccttaacctgtgttttagagtcca

SEQ ID NO: 595249 - DNA, 565 bp, Homo sapiens
gttacagtactttcctttttcttttatttcagcttttgtatatggggcagctttggggaatggttggggaattattagaatctgttatcagaatactaggatcaacagagatgaatacaagaattaaaagaggaaaatccaagtaaacagcttagactaggataacctgaaagttgaaaagaagttaggtaaagtaatgctttaacttaaggctatgctatcttactggtaagtgtattattggtaaataatttactcagctgacattttaggggtgtgagaattaggaaagactgattcgtattataaattcagattgaaatttggtaacattgtagaaatatytgagtaagcatttataattgattgaaagattaagatcacatgttgtgtgacatatctaattcatacaatcaaatattagaatgttgcacataattgctagttaataaccactttatttgatcataagattaataatcatattaatgttttgaaattaaaaagttaaaatattgcatattgcatacaggacttattttcactttgtgggaaacaaacaagt

SEQ ID NO: 595250 - DNA, 587 bp, Homo sapiens
gaatgttttgcctccaaaattcacataggctgactaggcattgtgcctctttcttggttgtaggaggggccaaatgcagcaccttacccttcatcttagaaggaatatctcaacaggccccacaccactggacccctagaaattttactgagatagaagttccctgaattttagttggatttatttcccatccttctgtacacaaatgtctcaccaacaagtccaatgtgtttgctacttcttgctcactggatccaatcagcataatgtcatcaatgtaatggaccagtgtgatgtcttgtggargggaagagccatcaggatctctccaaacaagattataacacagaaccggacagttgatataccactgatgtaggacagtaaaggtttattgctggccttgccagctgcaggcaaactgctcccggtcagccttatgcacaggaatgcagcacaaggcacctgccaaatcaatggctgcataccagccaccatgcgatgtactaacttgttcacgcagtgaaacgcacatctcgtacagcagttgcaaatggagtcactccttgggtaagcgtacaataatc

SEQ ID NO: 595251 - DNA, 573 bp, Homo sapiens
tattatggaggctactatagtgagaacacacacatacataacttaaaatattcaaagcaggtggtgataaatatcctaataagaatataaaccaagtagtaaccaaggacaacaaaaaaggacattaactttatccagatgtttccccagttaatgttaatgactttcttctttgtccttagttactgctttgtttatattcttattaagatattttcaacccctttgtgcttcactttactcctttataaaataagaataatagtgaaaataatagcaccgtcttcaacagattatgagagtatgatggagccatccatcaaaagctgaaagtaaaatattacaacaatcctcagacaaaataagggcttgtaaatgtttattagtttcttataaatgtcttgattgttaattaaaaagcaaaacaaaatgaagagaaggagttgggtactttccagtgatctgtgtccttttaacataacctatggacagatgctttgattactagacacaagtattctatgttctttgcaagtmtatcttagtagtgaaaaataaattttacaaatcaca

SEQ ID NO: 595252 - DNA, 573 bp, Homo sapiens
tattatggaggctactatagtgagaacacacacatacataacttaaaatattcaaagcaggtggtgataaatatcctaataagaatataaaccaagtagtaaccaaggacaacaaaaaaggacattaactttatccagatgtttccccagttaatgttaatgactttcttctttgtccttagttactgctttgtttatattcttattaagatattttcaacccctttgtgcttcactttactcctttataaaataagaataatagtgaaaataatagcaccgtcttcaacagattatgagagtatgatggagccatccatcaaaagctgaaagtaaaatattacaacaatcctcagacaaaataagggcttgtaaatgtttattagtttcttataaatgtcttgattgttaattaaaaagcaaaacaaaatgaagagaaggagttgggtactttccagtgatctgtgtccttttaacataacctatggacagatgctttgattactagacacaagtattctatgttctttgcaagtataycttagtagtgaaaaataaattttacaaatcaca

SEQ ID NO: 595253 - DNA, 550 bp, Homo sapiens
atctattttatacatactgtaaccatagcacctagcaagttgactgacatgaagtagtcaataaataagtgttgagtcaataaataaatacatgaagtttttagtgttttccattagaacaacacaatttgttatattgatttttagtttcatgctcatacactttacttgactggcatatctttacaagttgccaccaataattggtgaaacaagataataggtagaaaattatggggatgtgcagcaaataagaatgatatcagatacctaaaacaaaaaaatattccacatcataatcaccaataattagtattttcattcatttattcattcatgtgctgaagtgagctcctatcatgagacactaatgaaacagcaattattagacagaaaatatccctgatcttatggaggttacrttttagtaggtgcaacagtccatataagcaaatgaattaaaaataataatgattgaagaaaacaaattttctatattagtccattctcacattgctataaataactacctgaggttgggtaatttata

SEQ ID NO: 595254 - DNA, 572 bp, Homo sapiens
catttgtcttctttgctaatctcaatttttacataacagatccataaacttatgacattctgggttggattgaattcagctgtttagaaaaaagcaattacaactattgtccccaagccaagataacaacacaccaattatgactagccaagaagcctggaattcacaaactgccttatatttatttatttcttcatgttggctgtttatcaggaagtgacttcagtaaaaaggagctgtaattcatttattaagtaagctctcaaaactctaagaagaatggctcatatgctatattwaaaaatgactgaataattttaatgcaaatattattgcagttgatttgactagcactttttctaaatcattggggaaaataaggtcatgatgacatgggtgaatggtttttaatgtctttgcttttgtttctgaaacatcttattgatctatgtacagtctctgtgagcaaaggagagatacgtgtatgtatttacacacacatatgtgtaaagcatatataatatatatatatatatatttaattctcctcaatagtaaatccaatacaaatt

SEQ ID NO: 595255 - DNA, 580 bp, Homo sapiens
aatgtcatattcgattcttttacaaagcttacattaataaatggcttgacaactcatgaccgattctggcaaggtcccaaaataaaaacacatgtactgtctcgttttctagcactttaaaaaatgcgttttaaatgaagaaaacttcttctagaaattaaatttgttaccttaccctatttattgagcatctacttttacctagtttggtagggtgaaggtggtgagatatgttaagatttctgccctcaataaaagtatttatcaagttgaasaacagtattctactgcttttgaggcttacttcattgatttcaaacactctccatggaactcattcatgaggttctagcgagggatgattttatcaacatttaaaacaggaagttagtgtcttcctcagtcccatctctgtcattcattgaacctgggcaaattccatgccttcccaggtgtttcctactcatcaaacaaagcattagggtaaaaggattaagccttgggtaagagttcaaaatttatatgaaaagaaaaaaatgattgttatacagaaacagtttttactcctagtaacctaaag

SEQ ID NO: 595256 - DNA, 586 bp, Homo sapiens
tggcataagggaggaaaccttgaaaaaggggtacatgttagggaaagctttgggaaagtgagagatgagctgatctgaaaggacttgtagtagtgactcttgttgagtgggagggaggggtaggcaatgaatggaggaaatcccaggtagaggaaaaagagagtaccagaacagccccacatttatttaagaaattgaaattatagctaaaaacctccacacacaaaactccaggcaccaaagttttcatggttaaattgtaccaaacctttagtaaataaataaaaccaattatacacaaactcttccagaaaatttaagacaaggaaatacttcccactttatctgggagggctgccttaccttaacccaaaatctagatgttacaagaaaagataactacacaacattaaatatcccacataaacataggtacgaaaaaccttgagaaaattatagcaaatgaaatttaacaacatatagaaagaataatacatcatgaataaatgaggttyattatgagagtgcagggcaaacatttggaaataaattgacgtaattcaccatataaaaaacagacgaacat

SEQ ID NO: 595257 - DNA, 590 bp, Homo sapiens
aaaaataaagtaacgtaaaaatcatttcaaaactgtctttgtcmtatcacatttgataaggagactggagccccagtaagctattatcagatgtgaatggtaacttttgtctgttgacttcttcatctatatctctagccagagttttttcttgagcatccactttcaggtcccaaactgcctgctgtactcctccacttgcctcaagctccacatactcccaagtgaactgatcatttttcttctcagctcttccctaagtggatttctcatttctgttgaggtcaccaccattcttccaattggcagggttgtctttgactcctccctgtccttcagtcccactgtgaccatgcctcatagattctatttttgcaaagttcccttttatccatccacttacctagggtaacagtgagagcaacctctcatactagagaagatattttgacatcacaaacagctgctttggcatcacttccgttgtctcctgtcagtgacaggtcttcattattttcattttctgttacctgcatgtctcttccatgagcctttgaacaattgacagcagaagtttttgctctattcac

SEQ ID NO: 595258 - DNA, 590 bp, Homo sapiens
aaaaataaagtaacgtaaaaatcatttcaaaactgtctttgtcctatcacatttgataaggagactggagccccagtaagctattatcagatgtgaatggtaacttttgtctgttgacttcttcatctatatctctagccagagttttttcttgagcatccactttcaggtcccaaactgcctgctgtactcctccacttgcctcaagctccacatactcccaagtgaactgatcatttttcttctcagctcttccctaagtggatttctcatttctgttgaggtcaccaccattcttccaattggcagggttgtctttgactcctccctgtccttcagtcccactgtgaccatgcctcatagattctatttttgcaaagttcccttttatccatccacttacctagggtaacagtgaragcaacctctcatactagagaagatattttgacatcacaaacagctgctttggcatcacttccgttgtctcctgtcagtgacaggtcttcattattttcattttctgttacctgcatgtctcttccatgagcctttgaacaattgacagcagaagtttttgctctattcac

SEQ ID NO: 595259 - DNA, 451 bp, Homo sapiens
gaattcatacaacaacattgtctggaaaaaagatttaaatcataattgctacgttagtgaagggtcagattttgctcaaagcttcctggaagtcaaaatgaagaaaaaaakatacagttattgacattactctcaatttcagaaaggaggaactatacacttttatttggggagtgaagctctgttagtattaagatctaatagtaatttcttaggcaggtaaaaatgattcatatgtgaaagatcatagcctttcctcaatccttccagattgttgaagagaaatccaattttcacatgtcaaggtgaagagcaatgctaagaatctgagaagaaaatttgaatctccattctaggtattattgcaggcccttctgaaatatttttaatagccttggacttctgttgttattaacatatcctctgttctggagccttcccctccccatgc

SEQ ID NO: 595260 - DNA, 605 bp, Homo sapiens
gatactcataccccacttcccttcttcaccaacccaaagtccattagtcttcctgccaataaccctcttatcatcggtcagaactgttacttctccctgatgctcatgtcttcttactgcataatgccttctgtctacaagactgtggtgaaactatgtttggaatgccctttgctatcccaattcccacccttctcctcctgggtcacttattatcttattaagacccagttcaaaggttgccctcctcccccaagtcttctctgctctcttcttctccctttttgtgtccctctattgagggcttatcacattgcatatgatggtcctagtctgttagagctgctgtaataaaataccataaactgagtggcttataggcaacagaaatttatttctcctagttctagaatctggaaagtccaagatcaaggctctggcagattcactacctggtgagggcccacttcctcatagtcatcttctcactctagcctcacagggtggaaggggcaaaggatttctctcagacttcctttatgagggcrctaatgctatccatgagggttcccccatcctccaccatgacctaatcacttcccaaa

SEQ ID NO: 595261 - DNA, 452 bp, Homo sapiens
tcaaactcaagtagagaaattgtcttgatgacaatacctttgtcattaacttaatactgttactgccttaagaaatgtagggatagattgagtaggaatcatccactttaatttgttaaagtcccagaaaacttgacstactacctccagaatatattttattacaaaatatttaggcagaaagaacacttgtttccttttcattcctaacataatagtctatgtgattatttactgctgtctgtgaacaaaaaagatttctgaccatttggcttacagtggattttgtgatagagatgcatacagggcttctggctttatacatctaagctgaaaaggtgaggggatgtggaaatgaatcctagaatctgcagtaaatagttttattcctgtttccttatggatgagccatgttgacaactaaagacccttaactgattattctattcttg

SEQ ID NO: 595262 - DNA, 494 bp, Homo sapiens
tctaaataagaattcacattcattcttaatttttatttgttactttggattttttttaaggcttctccaaaactgtatcagcctcatgmccctcaaaagataggcaattccctagtggtcacgtactttcaatggcaaaagatgatgtgtggaagagttgaaaaagaagatgcatttgtatcccctcacctcaagccaaatgactacaagtttcatggacacagaagctgaggaaactgttaaatcactgtgtgtccccacctccctttatttactgccaactatgaggaagggtttctccatcacctcagccaggtgagaagggctatgagagaatcatagcaagacatcagcatgtcccctggagaaattggtgcctgacacttccttcaagatttctaaagactggagttgtctctttttagaagtaaagggaaatcagagtgcttgggcacaaactgctcttccacggaatagggcaaggatgcctgagt

SEQ ID NO: 595263 - DNA, 494 bp, Homo sapiens
tctaaataagaattcacattcattcttaatttttatttgttactttggattttttttaaggcttctccaaaactgtatcagcctcatgcccctcaaaagataggcaattccctagtggtcacgtactttcaatggcaaaagatgatgtgtggaagagttgaaaaagaagatgcatttgtatcccctcacctcaagccaaatgwctacaagtttcatggacacagaagctgaggaaactgttaaatcactgtgtgtccccacctccctttatttactgccaactatgaggaagggtttctccatcacctcagccaggtgagaagggctatgagagaatcatagcaagacatcagcatgtcccctggagaaattggtgcctgacacttccttcaagatttctaaagactggagttgtctctttttagaagtaaagggaaatcagagtgcttgggcacaaactgctcttccacggaatagggcaaggatgcctgagt

SEQ ID NO: 595264 - DNA, 585 bp, Homo sapiens
ggtactgtgatcactcacctgatttttgttttttatgaaggtacttttttgtttagatagttgttcaattttgttttgatagttgttcaattcctttsggggagatgattgctggaggcttctatttggccatcttgttccatctcctcctgtatagtactttttaatgctgtcttatgattttctgatcttacacaaaggtcttaagtacgtttgcctgctcagagaaaaaaaagtgtatcaaatgtaggtcttccatagtatgattcattttaattttgaggactttattggctcattacaaaaaatgttttcactaataataacaactttcttttaaatcaaaacacattatgaaaacacacaattttttttagaaaaagtgttcagtaaatattatttaacaatgcttctctaacttcagccaaaccagagaagagtaatttatggattttgaaaagttcatatgtgtagtttgcagaagtgatatttggtacattctttgtgtagttgccaaaatttctccaccaaaaattagaactcatttgataaaaattgttgacaaaaataaccacaataacaata

SEQ ID NO: 595265 - DNA, 585 bp, Homo sapiens
ggtactgtgatcactcacctgatttttgttttttatgaaggtacttttttgtttagatagttgttcaattttgttttgatagttgttcaattcctttcggggagatgattgctggaggcttctatttggccatcttgttccatctcctcctgtatagtactttttaatgctgtcttatgattttctgatcttacacaaaggtcttaagtacgtttgcctgctcagagaaaaaaaagtgtatcaaatgtaggtcttccatagtatgattcattttaattttgaggactttattggctcattacaaaaaatgttttcactaataataacaactttcttttaaatcaaaacacattatgaaaacacacaattttttttagaaaaagtgttcagtaaatattatttaacaatgctyctctaacttcagccaaaccagagaagagtaatttatggattttgaaaagttcatatgtgtagtttgcagaagtgatatttggtacattctttgtgtagttgccaaaatttctccaccaaaaattagaactcatttgataaaaattgttgacaaaaataaccacaataacaata

SEQ ID NO: 595266 - DNA, 585 bp, Homo sapiens
ggtactgtgatcactcacctgatttttgttttttatgaaggtacttttttgtttagatagttgttcaattttgttttgatagttgttcaattcctttcggggagatgattgctggaggcttctatttggccatcttgttccatctcctcctgtatagtactttttaatgctgtcttatgattttctgatcttacacaaaggtcttaagtacgtttgcctgctcagagaaaaaaaagtgtatcaaatgtaggtcttccatagtatgattcattttaattttgaggactttattggctcattacaaaaaatgttttcactaataataacaactttcttttaaatcaaaacacattatgaaaacacacaattttttttagaaaaagtgttcagtaaatattatttaacaatgcttctctaacttcagccaaaccagagaagagtaatttatggattttgaaaagttcatatgygtagtttgcagaagtgatatttggtacattctttgtgtagttgccaaaatttctccaccaaaaattagaactcatttgataaaaattgttgacaaaaataaccacaataacaata

SEQ ID NO: 595267 - DNA, 578 bp, Homo sapiens
gactgcttagacacttcagggcattatagcagaatatcatagtctgggtggcttgtcaataataggaaattatttctcacagttctggaggttggaagtctaaggtcggggtgccaccatggtcagattcttgtgtgagcccacttccaggttgtaggctgccaactttttgctgtttcctcacatgactaaaaaaagagcaaggtaggtttctggcctcttcttttaaaggcactaatctcattcataagggctccactcatcccaaagtccctatctccatatactgttacattgggattagggtttcaacatgtatgaatgtggagcacacacattgagtctgtaatagcagattcggcagaagtggaagaggtgatatagcctcggaggcagagattggagtgatgcagccacaaggccacaagtcaaagaatgccaaaagcctccagaaactagaagaracaaagaaagactctcctagagcttccataaggaacataacccctgctgacactttaatttcagacttctgtactctagcactgcaagaaaataattcttttcttcttttaagt

SEQ ID NO: 595268 - DNA, 577 bp, Homo sapiens
gaaacaagaattttaaaaaagaagcatgcacaacacctagaaaatagcctcaaatggcaaacctaagagttattggccttaaagaggaggtggagagagaaagataggggtaaaatgtttattcaaagggataatagcaaagaacttctcaaacctatataaacgtatcaatattcaagtacaagtttaacccaaataagattatctcaagacatttaacagtcaaactcccaaaggtcaaggataaagaagggatcctaaaagcagcaagacaaaagaaataaataacaaacaatggagttccaacacatctagcagcatacttttcagtggaaaccctacaggcaagcaggagagttgcaggacatatttaaagtgttgaaggataaagatgataacctttgaatatacctggtgaaaatatccttcagacatggaggagarataaagacacccagacaaacaaaagcttaggaatttcatcaacaccagacctatcctacaagaaatagtaaagggaattctttaatctgaaagaaaaggacataaatgagtaataaatactctgaaagcacca

SEQ ID NO: 595269 - DNA, 577 bp, Homo sapiens
gaaacaagaattttaaaaaagaagcatgcacaacacctagaaaatagcctcaaatggcaaacctaagagttattggccttaaagaggaggtggagagagaaagataggggtaaaatgtttattcaaagggataatagcaaagaacttctcaaacctatataaacgtatcaatattcaagtacaagtttaacccaaataagattatctcaagacatttaacagtcaaactcccaaaggtcaaggataaagaagggatcctaaaagcagcaagacaaaagaaataaataacaaacaatggagttccaacacatctagcagcatacttttcagtggaaaccctacaggcaagcaggagagttgcaggacatatttaaagtgttgaaggataaagatgataacctttgaatatacctggtgaaaatatccttcagacatggaggagagataaagacacccagacaaacaaaagcttaggaatttcatcaacaccagacctatcctacragaaatagtaaagggaattctttaatctgaaagaaaaggacataaatgagtaataaatactctgaaagcacca

SEQ ID NO: 595270 - DNA, 448 bp, Homo sapiens
cccaggctcccattccaggctctagctcccagatgacatttctatacataccctgggtcagaggagaacccatcaccttgaagggaaggacctagttctggcaagatttatcacctgctgactaaggaacccttggtccctgaacaatcagcagtggtagccaggcagtacttaccatgggtttggggtgagattcagagccacgacccagtacattcccagcttttgtgactatgaggagaaactcttctacttgaagaaaagagagggcagaataaacaagactttgtcttgtagtttgggcaccagctcagccacagtggcgtagagcagcaagcatatccttgtggtccctgattccaggccttggctcttaggtgacatatytgaacctgccattggccagaggggagctgactgccctgaagcaagagtcccaggcctggca

SEQ ID NO: 595271 - DNA, 596 bp, Homo sapiens
gtcttcaagagtcttctgcagagagaattatcatgcacacaccttgggtaaattaaaaacaaactccgaaaacaagccagcatttggtgtttatctaagaactctagtgtccttagggcttatctaacaaccctaataagccccatgtttggcttaaatacctgactacacattttagtagagcccaggaggcaagagttaaaatgaacgtgttaaggacaagtactcctgtttgaattagcaaaaactagttattcaacacctcaratccgaatgtgtcattaatattattgatgagcactcagacaaaggactactagaccaggaaagcaggatttgggtggggaaagcactctgtacataggtggaattacactgatgaataaacgacagcacttcagaaagaacacacccaaatgcaaactttacatgctatatgactttgccatggatcagttctattcacagaatcatgtgaatgtcaattagtttgcaaaaataaaattccagactaaaattacttaaacaataggacatatattttcttccagaactagaaagcagtaagtagtcagttcaagagttagcaaattcca

SEQ ID NO: 595272 - DNA, 596 bp, Homo sapiens
gtcttcaagagtcttctgcagagagaattatcatgcacacaccttgggtaaattaaaaacaaactccgaaaacaagccagcatttggtgtttatctaagaactctagtgtccttagggcttatctaacaaccctaataagccccatgtttggcttaaatacctgactacacattttagtagagcccaggaggcaagagttaaaatgaacgtgttaaggacaagtactcctgtttgaattagcaaaaactagttattcaacacctcaaatccgaatgtgtcattaatattattgatgagcactcagacaaaggactactagaccaggaaagcaggatttgggtggggaaagcactctgtacataggtggaattacactgatgaataaackacagcacttcagaaagaacacacccaaatgcaaactttacatgctatatgactttgccatggatcagttctattcacagaatcatgtgaatgtcaattagtttgcaaaaataaaattccagactaaaattacttaaacaataggacatatattttcttccagaactagaaagcagtaagtagtcagttcaagagttagcaaattcca

SEQ ID NO: 595273 - DNA, 414 bp, Homo sapiens
tccctctagattgaatttcttgaagaggattaccacacatttgtttaytgtctatgtgtaggcaccatactttgtgctttaagatattcatctcgattatccttacaaccctgtgaggtagacagttgaaacccattttcagatgaggatactaaggtttacagggctaagtagctttcccaaattcacacagctaataaacgccagggccaaaaactgaacccagggttctaaagctgatacccaactttaatgcagttctggttctcaaaatgtttacttattggtactaaggtctaactaactaaacaaaactgatcagagaacattaataacactgaccaggtacttgctatatgtcaggcactgttctaaacatttacatgtactactttatttaatttcacaataatc

SEQ ID NO: 595274 - DNA, 414 bp, Homo sapiens
tccctctagattgaatttcttgaagaggattaccacacatttgtttattgtctatgtgtaggcaccatactttgtgctttaagatattcatctcgattatccttacaaccctgtgaggtagacagttgaaacccattttcagatgaggatactaaggtttacagggctaagtagctttcccaaattcacacagctaataaacgccagggccaaaaactgaacccagggwtctaaagctgatacccaactttaatgcagttctggttctcaaaatgtttacttattggtactaaggtctaactaactaaacaaaactgatcagagaacattaataacactgaccaggtacttgctatatgtcaggcactgttctaaacatttacatgtactactttatttaatttcacaataatc

SEQ ID NO: 595275 - DNA, 609 bp, Homo sapiens
aaatgggattacttgtctattagtccgttttcacactgctaatatagacatactcgagactgggcarcttgcaaaagaaaaagaggtttaatgaactcacggtttcacgtggctggggaggcctcacaatcatggcagaaggcaaaaagcagtctcacatggcagcagacaagagaagcgaatgagagccaagaaaaagggtttctccttataaaaccatcagatcttgtgagacttatttactgccacaagaacagtgtaggggaaaccacccccatgattcaattatctcccactggtcccttccacaacacaagggaattatgggagctacaattcaagatgagatttggatgggaacacagccaaaccatatcagctggatcatatggcagttctatttttagtttctgaggcacctctaaattgttctccatagtgcttttactaatttacattcccaccaacagggtgcaagcattcccctttctgcatatcctcaccagcatccattattgcctgtctttgaatgaaaaccattataattgaggtgagatgatatctcacagtagttttgattttcatctctctgataatcagtggtgttga

SEQ ID NO: 595276 - DNA, 609 bp, Homo sapiens
aaatgggattacttgtctattagtccgttttcacactgctaatatagacatactcgagactgggcaayttgcaaaagaaaaagaggtttaatgaactcacggtttcacgtggctggggaggcctcacaatcatggcagaaggcaaaaagcagtctcacatggcagcagacaagagaagcgaatgagagccaagaaaaagggtttctccttataaaaccatcagatcttgtgagacttatttactgccacaagaacagtgtaggggaaaccacccccatgattcaattatctcccactggtcccttccacaacacaagggaattatgggagctacaattcaagatgagatttggatgggaacacagccaaaccatatcagctggatcatatggcagttctatttttagtttctgaggcacctctaaattgttctccatagtgcttttactaatttacattcccaccaacagggtgcaagcattcccctttctgcatatcctcaccagcatccattattgcctgtctttgaatgaaaaccattataattgaggtgagatgatatctcacagtagttttgattttcatctctctgataatcagtggtgttga

SEQ ID NO: 595277 - DNA, 609 bp, Homo sapiens
aaatgggattacttgtctattagtccgttttcacactgctaatatagacatactcgagactgggcaacttgcaaaagaaaaagaggtttaatgaactcacggtttcacgtggctggggaggcctcacaatcatggcagaaggcaaaaagcagtctcacatggcagcagacaagagaagcgaatgagagccaagaaaaagggtttctccttataaaaccatcagatcttgtgagacttatttactgccacaagaacagtgtaggggaaaccacccccatgattcaattatctcccactggtcccttcyacaacacaagggaattatgggagctacaattcaagatgagatttggatgggaacacagccaaaccatatcagctggatcatatggcagttctatttttagtttctgaggcacctctaaattgttctccatagtgcttttactaatttacattcccaccaacagggtgcaagcattcccctttctgcatatcctcaccagcatccattattgcctgtctttgaatgaaaaccattataattgaggtgagatgatatctcacagtagttttgattttcatctctctgataatcagtggtgttga

SEQ ID NO: 595278 - DNA, 279 bp, Homo sapiens
gcttttgccatttctcttctttattattttggatgatgtcatatgagggagtgttgcttgaatgaagggacaaatgagaatagaaggcaacaacatatagagggtggaagaatagagagataaaaataaacttgttctgagccaaatttgggttagcctctatcttgtcttaaaaccactcttagttttttagttacttacagccaaaagcatccctgataacccacttttccctaggaaactaccagaacwaaccttagcctgcctctcgaccctgtt

SEQ ID NO: 595279 - DNA, 642 bp, Homo sapiens
aaacaataaacatttaaattctcagctttttcttctattaaattgaaaatcatatccaactcatggagtttttaagaatatatatataacttataaattacataaaaaattgttatatgtattacatatataagatacatatacaaacatacatatacatgtaatgcaatcatgcaaagcttaacatggagatacattctgagaaatgtgttctaggtgattctgtcactatgtgaacaccacagagtacacttacagaaacctagatcgtgcatcctactacatgcctagcctatatgatatagccttttgctcctaagctacaaacctgtacagcatgttactgtactcactactataggcaactgtaacacaatgatatttgtgtatctaaacatatcttaacatagacaagatatacactaaacatacagtattttatacttatgagaccactatcttatatgtggtccrtaattgaccaaaggtggatatacggcacattactatatatttaatatgtaagatatatatcatatatgtaacatatagtatatatcacatatgtattacacattacacacatatgtgatatatactatatattacatatttgggtcatagacttatgagtattatttt

SEQ ID NO: 595280 - DNA, 504 bp, Homo sapiens
tggtgattaggacatttgctgggaagtaactttctaagcctggaggagggtaacatgttcacaggtccactgaaggcttatgtctagttggggaagggaaggcaggagcaagggaagaggccaaaaagtcaaggaaaagccttcgagactatgcaaataatttgaatatttgtcattttgccattacttttcatctctggagtatttcaccattttcaaagtacattcacaaataaaatgtcacttaattcacctggatcttgtgagtttgtttgaataatcagtggagagactagagggctgtccatatttgcaacatccatccatccatctctagttacttacaaaacttctatttttgtcaaattgcttttaatattaagagcatattgttagagaaatatatrgaacctgatttaggtcctaatttagtactctattctctataataatagctaacatttatgtctaagtactttatgtgtattaatgcattaaacccta

SEQ ID NO: 595281 - DNA, 529 bp, Homo sapiens
gtttcattctttttattcaattacccatcatcttaaagaggatgggttttgcaaaagtttaggtatatctggaatgccatctgggaaaataagtagtcttgaggctgcagaattcgtaggcttccacactgaaaacttagtctacgaaaggtttcagaaattctttcacaattatagtttctaattagctcacattatttatattacttggtccccaaccaaatggccacacctggaggaaggttcaaacgggccaaattttatttaattgagtttaaataagataaacaatatcgaactaacgacttaatcgctctttacagtttacaaatgatttcattttgagattatcgtatttaatcttttgtgttatctccaaccctcctctctgctattgttacatataaaaaagtgtgagattcccctgggctaaggtcacacaatgaacacgttgctccaggcaccacacttaaataactttatgtaacaacmacaacaacaaatactgtaatgatgcaaataatagtaa

SEQ ID NO: 595282 - DNA, 484 bp, Homo sapiens
cacactgatttttcttctaccctcccrcaatggcatgaggggtgggaggatgttccacttttcccccagtggcttactgcttttgtttcttatgaaaggagagtcactgaactagtgttaatttttaccatctccagtgtcaatcaatcatttttactatacctgcaccgcaaaggtcggggctatacccagtcttcagggaaaggatatttgtgttttattcacatctatattcctaggacctagattaccattttgatggtacatgctagtatttgactctgataattgtatagatacatattaattaagaacaaaggccataactcagatgattaaatttaactccagagaaagtaccttaagtttgaaaatatttagacaatctgcagttttctctgttctaataatgaaatcacctttgcaaaattataacagtaagagaaatatgacatagttggctccatcttgcttctgacctcca

SEQ ID NO: 595283 - DNA, 484 bp, Homo sapiens
cacactgatttttcttctaccctcccacaatggcatgaggggtgggaggatgttccacttttcccccagtggcttactgcttttgtttcttatgaaaggagagtcactgaactagtgttaatttttaccatctccagtgtcaatcaatcatttttactatacctgcaccgmaaaggtcggggctatacccagtcttcagggaaaggatatttgtgttttattcacatctatattcctaggacctagattaccattttgatggtacatgctagtatttgactctgataattgtatagatacatattaattaagaacaaaggccataactcagatgattaaatttaactccagagaaagtaccttaagtttgaaaatatttagacaatctgcagttttctctgttctaataatgaaatcacctttgcaaaattataacagtaagagaaatatgacatagttggctccatcttgcttctgacctcca

SEQ ID NO: 595284 - DNA, 484 bp, Homo sapiens
cacactgatttttcttctaccctcccacaatggcatgaggggtgggaggatgttccacttttcccccagtggcttactgcttttgtttcttatgaaaggagagtcactgaactagtgttaatttttaccatctccagtgtcaatcaatcatttttactatacctgcaccgcaaaggtcggggctatmcccagtcttcagggaaaggatatttgtgttttattcacatctatattcctaggacctagattaccattttgatggtacatgctagtatttgactctgataattgtatagatacatattaattaagaacaaaggccataactcagatgattaaatttaactccagagaaagtaccttaagtttgaaaatatttagacaatctgcagttttctctgttctaataatgaaatcacctttgcaaaattataacagtaagagaaatatgacatagttggctccatcttgcttctgacctcca

SEQ ID NO: 595285 - DNA, 484 bp, Homo sapiens
cacactgatttttcttctaccctcccacaatggcatgaggggtgggaggatgttccacttttcccccagtggcttactgcttttgtttcttatgaaaggagagtcactgaactagtgttaatttttaccatctccagtgtcaatcaatcatttttactatacctgcaccgcaaaggtcggggctatacccagtcttcagggaaaggatatttgtgttttattcacatctatattcctaggacctagattaccattttgatggtacatgctartatttgactctgataattgtatagatacatattaattaagaacaaaggccataactcagatgattaaatttaactccagagaaagtaccttaagtttgaaaatatttagacaatctgcagttttctctgttctaataatgaaatcacctttgcaaaattataacagtaagagaaatatgacatagttggctccatcttgcttctgacctcca

SEQ ID NO: 595286 - DNA, 612 bp, Homo sapiens
tgatctaagggtaagagttacagtaagtgcttttccacaagggacagtaaaaaaagtataaatcttagagacattcctgcaactggagttaatcagaagtcaacatgaattaccatccaagatggagttgctttagcctcaacagtagtcagtaaccattcttgtgaagccaggaaagaaccaacatgtctcgccttaagttagacctgtgggtgctacctcataacctctaccaaagcccatataagaagctgagtctttaaagactgaagaaaatctaagctccaaaaaaaaaaaaaaagaggaaattatatattatacaaacaaacaaaccatcttaaataattacaaataattttatataatcaatttaatatataatcaattcaaaatccattagatcttttrctacaagactgcttttacaaagtcatctcttcggggaaaatagtccttaagttcttgagtcagttgcctactccagtaatatggttgttgttcattgtggtgatattagcgtaaaccagttacctattccttacaatatcaataaccaagggcatttgcttcacttcttttatatttattaatcacatattaaaatgcattatg

SEQ ID NO: 595287 - DNA, 540 bp, Homo sapiens
aaataaataggtgaataatgatcagattttgatattggagatactgaaaatgaacttataaatttctgggtctcaacaaaaactaatctataggttatagcagttttggtacaggaaaattaagataagaaaaaaaaatcttaattttttttctgttttagtggattgcaactcagcaagcccatctagaacattactacttacagtcagtttaacaagctaaagaaatgtatcgttcttcagcatctacaaaagatagaacagtaaggatcccaaaagataaaatcttttatactaactcattataaggtttagccccattcattattttatggggtattgatacatattaaaaaaaatagaggagagagagagagaaatataatgaaaaggtaagaaatactcaaggttcaaaaaaaaccaaaaaattttaaaamacaaaaagactatatgtatcgcagaagcacagtttaagcatataggtttaatgagagataatgataagcattcatttaggtgagtttgttctggaatgtgatg

SEQ ID NO: 595288 - DNA, 659 bp, Homo sapiens
cctcttaactgactcccctaatatcaactcttaccctaaccccaattctctagcgtatggttacctgagtcacccaggtaaatgccacatttatattaccctgttccctaataactttcmgtggcttcttgttaccctcaaggtacaacgcaagttcctaagtatgccatttagtcttccatccaccaaagcatccctgccatttaatactgtcaactgtcgcatgtacaaatccgaagttccagctaaatttaggtactcactgtcttctgaacacaccagaaactttcttatttttgcaccgttgtttatatctatttttgctggcataagaaatcctatttcttttatgtggcctgtaaacctgactgaaatgccacctcctctatgacaccatcacaattcacaagttattcctgcctctcatccctatagcactcattcctatagcaattgctcatttatgtagcaatcttatgagttattttgtactcatttctctttgcattgctagatttctaaaacatgtttatgtcttacctccctagctagcctgtaaacatcttgggagtaagtaattatgttattcatagtgtaatactggtcttcagatgttattgatgtaattagtattgattcattgtaccttttttttttaa

SEQ ID NO: 595289 - DNA, 594 bp, Homo sapiens
gatttgttcattctacatatctgctactttgtatcatttgacctacatcttctgtcttctccttatccccctaacaactgttattctcgatctctgtatttttattcagcctttaaaaaggagatcctgccatttgccaaaacatggatggacctggaggacatcatactaagtaaaatgagccagacatggaaagaaaaatagtatataatctcacttacaggcggaagcttaaaagaagtcaaataatcatatttaattattaaaagccactgttagcattaaaatccaaatatatcatttactcagtcatcttcacacacactatttgaatttcctctatcctgattttatcaatacgtacattataaatgaaatactgtactgcataagcgccttcttttttcttatacataatttgtttttattttcatattggtcattatttaaattgtataaattataagagtatttaattccatattgttagatagatcatcctagttttatttttataagtaactctaycataaacagtttatagtactatccaacgtactgatgtttaagagcttgggctttgaagttgggcag

SEQ ID NO: 595290 - DNA, 574 bp, Homo sapiens
atgtgtgtgtatttgttctctaagactgaaggagatatgatctagcaacacattaaccacgtgtttcaaagttattttagatgaaacgcaagacaagctaaccttaatgtcgttcctaattatattaatctataaacaatataaggtcttgtctctgggctatcaattcatgatgtgacatattaaccagtgatagttactcagagtaaatattttacagaaagattaagtgatatggtaaacattgtcagagttcattaatggattttcattcattaaatcatctgatgacaaaatcaacaaaccaattcaaacaaaccaacyttaaattctgagcatcactgctaatttgagctttaagatatatcttcctatttactagaattcactatcagaagtatgttttctaggtttatgctttaaaataagcttagattgatgaaaacactttggcacagatgattgttttcaaagaagcctataataaactaaatgatgtgtaactggcatcattattttaatctgttagataaatatcccaaggtactaaagtgtttaaaaataataatttaac

SEQ ID NO: 595291 - DNA, 547 bp, Homo sapiens
tctaggtttatgctttaaaataagcttagattgatgaaaacactttggcacagatgattgttttcaaagaagcctataataaactaaatgatrtgtaactggcatcattattttaatctgttagataaatatcccaaggtactaaagtgtttaaaaataataatttaacattattgaatgtatgctttctacaggaagggtattttttaaagtttttttttatttcaatggcttttggggtacaaatgttttttggttatatggatggattgtatagtgaagtttgagatttcagtgcatgggtcacctgaatagtgtacatcgtaccccaaatgtagctttgtgtccctcataccccttccaccctctgagtctccaaagcaggaaaggtatttaaaggaaattgtatatggtgcttaattataaatggcaatcataaattatttatctgtgagactctatcaaactttgctaagtttgggatttaatggactctgaagaaatattagaaatatttttatacagtttattaatgtttaaacagtat

SEQ ID NO: 595292 - DNA, 397 bp, Homo sapiens
gttgaaggcacatggtatccatcaactttaaatatatacacacaccctgcccctggctccagtcatagaaggctgcccaaacccatcmatttatcccctactggaatcttcagggtatttcactgttaagcccttagcttgtgctgaagggaataatggaaaaaagatatcatgtctgctgctatgttagctgtgaaatgctgctggagatattattcattatttcccctatataaaatgtaatatgaactttgtcttttttatttaacacagagaatattttattggccctgagaagatgatattctaaaaaactgaatgtcttccaactttcttacctgtttttctttgtatcctagctccagaaggattaaaattaatctcagttattgctggt

SEQ ID NO: 595293 - DNA, 399 bp, Homo sapiens
gcctttccttactcttcttcccctcattccaggaaaggtagttgtttccaacacatgcttccagatcagccttatagtttctgcttaattgaccatcttccccagtagatcccctgaagtcagaagatttactgtcctactcatttttaactgtctactgcctgacatatgggaagtggtcagtaaatatttctggatttattgarcatatacattaagtaattaacttggccccattctgtggctctctgaataactcctgtggttacaaaaccccaggttgaatactttaaagaactacctcaaaagacaacctctctttgggagagagtagttttcagagtatcgttgttcattcttctctaacattgtttctgcagtactggtttgtgagtgtat

SEQ ID NO: 595294 - DNA, 596 bp, Homo sapiens
atggcaaacagccataagaaaaggtgctccacatcattgatcataagagaaatgcaaatcaaaactaccatgagatattatcttggttaaaaaggcttttataaaaaagacagacaataacaaatgctggtgaggatgtgaagaaaagggaatctttgtacgctgttggtgggaatgtaaattaatacaatcactatagagaatagtttggaggttcatcaaaaaactaaaaatagaactaccatatgttccagcaataccactgctaggtatacacccaaaggaaaggaaatcagtatatcgaaaagacatctgcattcccacgtttactgcagcactattaacaatagccaagatttgtaagcgatctaaatrtccattagtagatggatgaatggatttaaaaaaaaaagtggacatggtggcttatgcctgtaatcccagcactttgggaggtcaaggcaggaggatcactagagcccaggagttcaagaccagcctgggcaacttggcaaaacctcatctttactaaaaatagaaaaattaccctggcgtggtagcccacacctatggttccagctattcatgatgctgag

SEQ ID NO: 595295 - DNA, 582 bp, Homo sapiens
ctcacctgtgtgtgcaggggtggggggaagtgttggcattaggtggggaaaaaaagaggaaagttactataactacaacagcagaggatattttcatagagaaaggttctttttttttaatgtagggacctagtagctcattaataatacatttcttttaaatattaatatgttgatttcaaacacttaaatagggtttcaaggctcacctattgtcctacaaatcaaggtcctgaacaaaacagaatgcactcaatttgaaatagataaataagtaattaaataagagatccagcttaataattttatttgcatttttatgatttgcaagtattttcatgcacatgctcatacttagttacgttacataaacataggagacaaggtttttttatagttaaaaaataaaattcaaagaggttagatggcatatgcaacatttctaagccagtaaatggcaatggtaggtatatacacttagrtcctattttaggcttgtgggaagtgatggggttccatttcttaaagattgttttaagtcaaaatagatgacttatgccccttttggacagagatggaagg

SEQ ID NO: 595296 - DNA, 610 bp, Homo sapiens
ttcccaagtagctgggaccccaggagcgcgccaccatgcatgactaattttcttgtatttttgatagagacagggttttgccatattgcccaggctggtatcaaactcctgagttcaagcgatccacctgcctcagcctcccacatgatgggattataggcatgagccaccatgcccagccttgtactgcacttgcaaataattgaaaatgtatttcatgtttaaatacatttgtattgtcggtacaatatcttgttaataatcaaacacattgaaatcaaacacattggattctcaccarttttaatttgaccaacatagtcaagaaaacaattttcctataaagtgccctgcagctctgaaattctttaaactacaaaaaataaagatattttaaggattatcttaccaccattttgtgttaaacagggtaaatacaatctggtatatagcacacatcaaacaaataataaatattgaagtactttttcggttttcagcagtgttgaacattcaaaattgataaaacaaaaatcaagtaacaatttggtaatgaaaaatattactggaacaaaaaattcttagcatcttccccaaatttataacttat

SEQ ID NO: 595297 - DNA, 610 bp, Homo sapiens
ttcccaagtagctgggaccccaggagcgcgccaccatgcatgactaattttcttgtatttttgatagagacagggttttgccatattgcccaggctggtatcaaactcctgagttcaagcgatccacctgcctcagcctcccacatgatgggattataggcatgagccaccatgcccagccttgtactgcacttgcaaataattgaaaatgtatttcatgtttaaatacatttgtattgtcggtacaatatcttgttaataatcaaacacattgaaatcaaacacattggattctcaccagttttaatttgaccaacatagtcaagaaaacaattttcctataaagtgccctgcagctctgaaattctttaaactacaaaaaataaagatattttaaggattatcttaccacsattttgtgttaaacagggtaaatacaatctggtatatagcacacatcaaacaaataataaatattgaagtactttttcggttttcagcagtgttgaacattcaaaattgataaaacaaaaatcaagtaacaatttggtaatgaaaaatattactggaacaaaaaattcttagcatcttccccaaatttataacttat

SEQ ID NO: 595298 - DNA, 561 bp, Homo sapiens
atctgctcatagggagagtggcaaaaggctattctattttctttgagtcttgactaaacagtacttcctccagcagaagtctatatttagttatagtcaaaataaaaagaagttactggtgcgggaagtaaagtgaagaattgctgaggagaggatggtcagtgacccaggaatgactgaaaattgggtgttaaaatgtattttctgatatattccaaaatcaccttccataattattcattaattgattcagcaaggactttttgagtacctaactacatgccrtcttttgttctaggcaatgaggtacagcaatcaactaatagataaaaatccctgttatcatgaagcttacattctaaaatttcttctctaagtctgttctactctaagtctagtctattctactatatattcaataactgtaatttacaactttctagaggattgtgttttatttctctttcatcccattaccagactttgttattctttacatctcttcctgcgaaatcctcctgttagctacctgaataatcatacatctcctgggatagtttc

SEQ ID NO: 595299 - DNA, 610 bp, Homo sapiens
taggctgttcttacattactataaagaaatacctgaaactgggtaatttataaagaaagaggcataattggctcacagctctgcaagctgtacaggaagcatggcaccagcatctgtttggcttctgaggaagctcagggagcttttactaatggcagaaggtgaaggaggagcaggcccatyacatggcaagaacagaagcaagaagctggggaggtgctacacacttttaagcaaccagatctcacatgaacccagagcaaaacctcactcatcaccaaggagatggtgcaaagtcattcatgagggatctgcccccttgatccaaacacctgccactaggcccacctccaacactggaggtcacatttcagcatgagatttggaggggacatcaaaatcatgtcggtgagctaatggaaaagttctagaggatgttagggggaggttggtcaatatgattgggctgcctgtttttgctaattgtcacttatgaaactcaggctcctacccttttacagatactgggagatagggacactatcttgtttaatgattacgtttcaaagagatgactccaggtttttcagaaagtaatttctggattgta

SEQ ID NO: 595300 - DNA, 643 bp, Homo sapiens
tgatcaatgaaaacccacttaaatttcactctactttgcaaccattcaatttttaagccttcttgaaataagttgcagaaaacccccaagagcaagagaaactttatatacttctattttacttatttcctcttgaatcttcttataaagaacaaacatgtctctgggctgagaaaattgtttcctggaayatggggagcctcatactaagaaataagaatagctccaggatctaaattagagattcagtactaattttctgtggctaattggctaagtgtctttgaaagaggtattgcagccttcaaaactatttttttttggcctaccatcttaagggtgatttaagaacaaaacaacaaaacaaagaaaaaaggcatccctacgtaagactctgttatcttggtatgactaatttttcctacagaatgagagatacgtttaactaaattcagctgaaagaatatttgctgaattggcttgcctgagccaagtatcatggtaaaacctgttgcctagtatttaaccacaaaaacctccagaaatttggaaaaagaactttaatagagagaccaaaattactgtaggaatagagctaggctagagttagtgctactgagtatctttcttgctgtttggcgaa

SEQ ID NO: 595301 - DNA, 519 bp, Homo sapiens
  misc_feature 290: n = A,T,C or G
ttaatgcaatcaaccttttgtccagtagtgaaacaaataacttttatttagtagaaaatataacatcaacaatcatgatttyattgtcatgtgggagttttgtacctcagtttttcatccttcgtcagcattcttttctgtgctgaccatatgtccacccactcaccacatgtccacagaacagcctttcctatttccttctgaatcaactttgcagacctggttacttccaatattagtgagttaaatgcctctttggcatgtattcatcaaagatttgcaagagaatntatgttttaacttttggaaatgtatattttgacatgtggatattttaattggcatagttttaaggcatcaaatttgtacattgaaatgtttcatcttttcagtcagcatcatcaaattggtctcttttagctggcccacagaaatctattccagaataagtcctgactgccatacagaaggatttgggaaaccttaaaaaatcctttttgctgagaaatatcaccttta

SEQ ID NO: 595302 - DNA, 591 bp, Homo sapiens
tttaaatagtactctgtctcactcttcatctcttgaacaggctcatgctgcatggtaggccaaatggctcaccagagcccgatttcatatcttagtatcctattaacctcaacagaataggtcttttctgattgccccagaagaacggttctaaggaagatacttcttggcctgtctygagtcaggtgcatattcctggacctgtcacaatggccaggaggctccccaaagatgggggaattttggccaggcctggatcctattccctcctctgtttaatggggagtgacaagatgtatatgaaccacatgaaatggatttcccaaagggaaagaggaattacattacagaataagaaggagggaaagccaggtaggccagaataataaatgtccactacataaacaataatattcagaaagacaggggtttgacacacaggaagcctttacatgtgtgaaaacaaacggattctttgtttgtgagggatgcccagaggtggtaaagataccagtggggaatggacacgatgctgttatgatatgcatttttttcccagaatatgtgtcagtaaaaaggagaaattgagta

SEQ ID NO: 595303 - DNA, 553 bp, Homo sapiens
gtctttagcttattggtaacttttagaaaaaaaagagtatagtacatagagttaaagaaagaaatctctacttcttcctaaataactaatttttaactctagtggtccttaaacatacaattccttcagtaacgaggctctcctgcagtgatcaayggttgtgtttcaaggccctccacagctagtgatttatttgattacttactgttgagttgggatagcaaggtggtctcagtgaacagcccctgggtacttgcacataagaaacatgtttaatgtacaagatgatagaattaaggagagggtggggaccagattagaggcagcctgggtaagccagatttctctaaatcggggggatattttttattcatctcaatatctgacttaattcatgaatttttaatttaaaattcaattagggagtttctattataaatgaagtgttgttttatgtaattatgaatttccctggatagcctaagagtaaaatagtagcaacaatttcattaaaattgctcacatcaaaacagggaacaaaacgtgtttttat

SEQ ID NO: 595304 - DNA, 553 bp, Homo sapiens
gtctttagcttattggtaacttttagaaaaaaaagagtatagtacatagagttaaagaaagaaatctctacttcttcctaaataactaatttttaactctagtggtccttaaacatacaattccttcagtaacgaggctctcctgcagtgatcaatggttgtgtttcaaggccctccacagctagtgatttatttgattacttactgytgagttgggatagcaaggtggtctcagtgaacagcccctgggtacttgcacataagaaacatgtttaatgtacaagatgatagaattaaggagagggtggggaccagattagaggcagcctgggtaagccagatttctctaaatcggggggatattttttattcatctcaatatctgacttaattcatgaatttttaatttaaaattcaattagggagtttctattataaatgaagtgttgttttatgtaattatgaatttccctggatagcctaagagtaaaatagtagcaacaatttcattaaaattgctcacatcaaaacagggaacaaaacgtgtttttat

SEQ ID NO: 595305 - DNA, 579 bp, Homo sapiens
agtgtgacaacagctcacaggtgagtagagcatcttactcttactgttactatgccagttccttgactgcccttcagcactgtagactgtgctttattgccctgattatgcactcttatacattcacaagtcaaaggttcttgcatatttcaatacaaatgagagttatttttggtgccatcttcaaagcttygctgtctgacattgctgtcataacaggcatattcaattaatttacatagagcaaaaatgggcaagcctacccatggagtttgagacatacagtttaagtgccatagtaacatttactgcacctattttggtaggtattcccaacgatagagctacttatatattttcttgattcccttttcaccaaaatattgaaggtaaataagcctgtgacatggttggagctcaacaaattcttttggaataatctgtaggctatttccttctaatatcatgatacattggatcaaaaaattcctttggaatagtctgtaggttatttattttaaaaatcatgatacattggaacttaatgtcctatggcacaacataattttgcaagcactt

SEQ ID NO: 595306 - DNA, 579 bp, Homo sapiens
agtgtgacaacagctcacaggtgagtagagcatcttactcttactgttactatgccagttccttgactgcccttcagcactgtagactgtgctttattgccctgattatgcactcttatacattcacaagtcaaaggttcttgcatatttcaatacaaatgagagttatttttggtgccatcttcaaagcttcgctgtctgacattgctgtcataacaggcatattcaattaatttacatagagcaaaaatgggcaagcctacccatggagtttgagacatacagtttaagtgccatagtaacatttactgcacctattttggtaggtattcccaacgatagagctacttatatattttcttgattcccttttcaccaaaatattgaaggtaaataagmctgtgacatggttggagctcaacaaattcttttggaataatctgtaggctatttccttctaatatcatgatacattggatcaaaaaattcctttggaatagtctgtaggttatttattttaaaaatcatgatacattggaacttaatgtcctatggcacaacataattttgcaagcactt

SEQ ID NO: 595307 - DNA, 590 bp, Homo sapiens
caaaataccatagcctggatggattattaacaatagaaatttattgcccaaagttatgaagaaaggtcctggcagattggctgtcttgtgagggctaacttcctrttttatagacagcactttttctctgtgtcctcacttagtttaaggggtgagaagtctctctctggtgtcttttttttttttagatggagtttccctcttgttgcccaggctggagcacagtgacgtgatcttgactcactgcaacttccacctcccgggttcaagcaattctcctggctcagcctcccgagtagctgggattacaggcacctgccaccacgcctggttaattttttgtatttttagtagagacagactttcatcatgttgaccaggctggttttgaactcctggcctcaagcaatccacctgtcttggcctcccaaagtgctaggattgattacatgtgtgagccaccacgcctggcctctggtgtcttttataagggtgattatcccattaatttgggttccactcccatgacctaattatgtcctaaagtctccacctcctaacatcattactgtagaggtcagggttccaac

SEQ ID NO: 595308 - DNA, 590 bp, Homo sapiens
caaaataccatagcctggatggattattaacaatagaaatttattgcccaaagttatgaagaaaggtcctggcagattggctgtcttgtgagggctaacttcctgttttatagacagcactttttctctgtgtcctcacttagtttaaggggtgagaagtctctctctggtgtcttttttttttttagatggagtttccctcttgttgcccaggctggagcayagtgacgtgatcttgactcactgcaacttccacctcccgggttcaagcaattctcctggctcagcctcccgagtagctgggattacaggcacctgccaccacgcctggttaattttttgtatttttagtagagacagactttcatcatgttgaccaggctggttttgaactcctggcctcaagcaatccacctgtcttggcctcccaaagtgctaggattgattacatgtgtgagccaccacgcctggcctctggtgtcttttataagggtgattatcccattaatttgggttccactcccatgacctaattatgtcctaaagtctccacctcctaacatcattactgtagaggtcagggttccaac

SEQ ID NO: 595309 - DNA, 570 bp, Homo sapiens
gggctaacttcctgttttatagacagcactttttctctgtgtcctcacttagtttaaggggtgagaagtctctctctggtgtcttttttttttttagatggagtttccctcttgttgcccaggctggagcacagtgacgtgatcttgactcactgcaacttccacctcccgggttcaagcaattctcctggctcagcctcccgagtagctgggattacaggcacctgccaccacgcctggttaattttttgtatttttagtagagacagactttcatcatgttgaccaggctggttttgaactcctggcctcaagcaatccacctgtcttggcctcccaaagtgctaggattgattacatgtgtgagccaccacgcctggcctctggtgtcttttataagggtgattatcccattaatttgggttccactcccatgacctaattaygtcctaaagtctccacctcctaacatcattactgtagaggtcagggttccaacatatgaattttggggagacacaaatatttttatatggtatttaaatctatagctgtgtattggagagactt

SEQ ID NO: 595310 - DNA, 599 bp, Homo sapiens
ccaccacgcctggcctctggtgtcttttataagggtgattatcccattaatttgggttccactcccatgacctaattatgtcctaaagtctccacctcctaacatcattactgtagaggtcagggttccaacatatgaattttggggagacacaaatatttttatatggtatttaaatctatagctgtgtattggagagacttatttttcrgttgttttatattttttttggagagaagcctaaattactgttgtatacatgaatcctttagtaataattctttttttaaaactttaattataccccatcttcttgcaataagattatttaaaagaactttcaataaaaagataaaaaggctatgtgtggtttgggcaagatcctagcaaatgttggaaaggcaggataaggaataagaacagatttcaattcgaagagtatccagctgtgagtcagaaaacactatagtatacactgagggcctgacaagtgggtgaatggagttaggagtcaaagtgggaattttggaggtcaggaccctgtccattcattcataatctttgaaaagccatacccagggtctggcttagacatttct

SEQ ID NO: 595311 - DNA, 599 bp, Homo sapiens
ccaccacgcctggcctctggtgtcttttataagggtgattatcccattaatttgggttccactcccatgacctaattatgtcctaaagtctccacctcctaacatcattactgtagaggtcagggttccaacatatgaattttggggagacacaaatatttttatatggtatttaaatctatagctgtgtattggagagacttatttttcggttgttttatattttttttggagagaagcctaaattactgttgtatacatgaatcctttagtaataattctttttttaaaactttaattataccccatcttcttgcaataagattatttaaaagaactttcaataaaaagataaaaaggctatgtgtggtttgggcaagatcctagcaaatgttggaaaggcaggataaggaataagaacagatttcaattcraagagtatccagctgtgagtcagaaaacactatagtatacactgagggcctgacaagtgggtgaatggagttaggagtcaaagtgggaattttggaggtcaggaccctgtccattcattcataatctttgaaaagccatacccagggtctggcttagacatttct

SEQ ID NO: 595312 - DNA, 643 bp, Homo sapiens
ttgtttatctcaaaatatctcaagtctgaaaaaaaaagcttcctttagtagctaccttgaaagtaaattgtctctccttcttgtctacataatgcatgttgcttttgtttggacaaaaagttcttgaactcttaacagccacatcagctttctcatcagcctggccttccatcatctcagaaataccacaaggttgtgacactacctctcacagcaggaagagtaatggcctttgttgtcgcttcttatctaaattgtcaaattctctttgttgaaaatcttccagtagcctgtacttagcttgattcaaataattttattcaaaattctagaccatctcagatttaataaaatattttataatattattatctatggtttagaatgtttattttaatttaaaaatgtggataaaaagcwgtcttaggtaattcttgccttcttcaagcgcatgagtaaaataaagctttgcattttcacagacattccccccaaaatgatgcactgcttttttacagaaaatgcaaaaaataaattatatataaaagtgtaaaattgtattaaaataacattttgtcaagattatcattcttaaatagtttttctataaagagttgacttttatgactacattgccaggcat

SEQ ID NO: 595313 - DNA, 643 bp, Homo sapiens
ttgtttatctcaaaatatctcaagtctgaaaaaaaaagcttcctttagtagctaccttgaaagtaaattgtctctccttcttgtctacataatgcatgttgcttttgtttggacaaaaagttcttgaactcttaacagccacatcagctttctcatcagcctggccttccatcatctcagaaataccacaaggttgtgacactacctctcacagcaggaagagtaatggcctttgttgtcgcttcttatctaaattgtcaaattctctttgttgaaaatcttccagtagcctgtacttagcttgattcaaataattttattcaaaattctagaccatctcagatttaataaaatattttataatattattatctatggtttagaatgtttattttaatttaaaaatgtggataaaaagctgtcttaggtaattcttgccttcttcaagcgcatgagtaaaataaagctttgcattttcacagacattccccccaaaatgatgcaytgcttttttacagaaaatgcaaaaaataaattatatataaaagtgtaaaattgtattaaaataacattttgtcaagattatcattcttaaatagtttttctataaagagttgacttttatgactacattgccaggcat

SEQ ID NO: 595314 - DNA, 612 bp, Homo sapiens
atgcactgcttttttacagaaaatgcaaaaaataaattatatataaaagtgtaaaattgtattaaaataacattttgtcaagattatcattcttaaatagtttttctataaagagttgacttttatgactacattgccaggcattgtaatattgagaatgtaagaaaatggacattgtaaaagcaaagatctgtactcagttttatgagaaaccatcaattaattgttcaaatrggttatgaggtaataaagtaaaatacaatataaaatagtagaaaatgagcttttgtaatatagttttttaaatgtataggcaatttaaactattctggagaaaaagaaaccagcgtctgttttagggcattttgctccaagatctaatcagcattagcattaagaatatgaaatacaaatttgcagaatttcaatatgaaggcttcaaatgggctgaaatattgcagtctttgtagatgcctgcattcaagggtccttgttgctccaggcaaggaaaaggtgactgagaaagaaaggaataaaataccagaagaaaattatcttacttccttttgtgactcacggacaaagacgggaatgatctgtaaactggtaatg

SEQ ID NO: 595315 - DNA, 487 bp, Homo sapiens
taccaatatgctataaaacctcttatctacacctttcttgttgctgccccatttcccagtcctctgttccagtaaattttttgataatgttatctatgtttgctatctctattcctctcttctaatatttttcagtacccatgacaatcaggcttttaattcactgaaacagctyttgtcaaggtctccaatgacctgtaaaaaacaagtgcaatggtcaattctctgttctcatctaatatttaatagagtagatcatttccttatttccactttcttcacttgacttctggcatatttctctctctatctcactctccctctctcagtgcccttcttccttagctatttcttcctaatcttctttgctggtttctattcatctctcctaactctaaattggagggccctatgacacagtactcagatgtcttccttcactccctaggtgagcgcaactagtctcatggctttcaacatgccctca

SEQ ID NO: 595316 - DNA, 506 bp, Homo sapiens
tattgcaacgtattggttttatgtttttaaatgcccttgtgcctttatttttaaattaagtaaatttcaattgtctctgaggatcttagattctttttgtaatttttaagcttgatcttcttctgtatcctttacttcaaatgctatggaagcaaaaaagtatacaaatgcaactgtgcacacacagaaataacaaacattttcttaatgtgtttatatgtgaacaagacaagttctatatcatcattttaatctaattcactagcatttgcaaaagtgattgaggyataacagttatgccttttatttataaattatgttagtgtaacacccttcacagatatcaaatcattccatctaaacaaatccttgaaggaggtgagctgattcagttgttcaaactgctaactgctcacgagtttaccaaatttttagcccctgcctcatcaaattcaatgggtcaaagtacgagataattatttgtctcatataaatatagcatatat

SEQ ID NO: 595317 - DNA, 275 bp, Homo sapiens
aataattccactttctctgcattcttgctggcatttgttatttttttgtctttttgataataaccattstaaatggggagagatggtgtttcattgtggttttgatttgtatttccttgatgattagtgatgttgagcaatctttcatatgcctgttggccatttgtatgtcttcttttgagagatgttcattcagctcatttgcccatttttaaattggattttttttctgctattgagttgagttcctggtatattttggatattaatccctt

SEQ ID NO: 595318 - DNA, 510 bp, Homo sapiens
  misc_feature 269: n = A,T,C or G
tgcaaaaatttaatttagggaaagtaaaatgtgtatttctggtttttaggggtgttcttttctcgcagtgatttctttattagctttttgtccagtggaagatatcaggcatatgcagtgatccactggaaatccactgagctcgcaaatatattaatgctacaatatgattgacttggcatgtattcaatttaattatcatcatcatcatcatcaycattttagagacaatatcgcactatgtcaccgaggctggagtgcagtggctntatctcagctcactgtagccttaacctcctgggctcaagtgatccttctacctcagcctcctgagtagctaggactacatgtttgcaccaccatgaccagcttattttttgtttgtttgtttgtttgagacagggtctcattctcttgcccaggctggagtgaagtggcgctatcttgactcactgcagcctccacctctcaggttcaagcaattctcgtgcctcaggactcccaagtagc

SEQ ID NO: 595319 - DNA, 451 bp, Homo sapiens
  misc_feature 389: n = A,T,C or G
gaaaacagaaaaacagtaggaaaaatcaatgaaatgaaaagcttgttctttgaaaaaataaataaaattgacaaatctctagcaagcctgacaaagaaaaaaagagaaaattcaagaatgaaacaartgcagacactgcagacataaaaaaaaaataagagaatactacaaacagctctcacagttaaattttatatatgagatgaaatgtactgattcttcaggaaacacacctactacactatactccctaatatgaaataggtaatttgaatattttgaacagttgaataaaattaatactataagtattaaagacattaagtgtataatggtttctttgtttgggctgctataataccagaaactggatgaccgataaacaacanaacttattttcttacagtctggaagctggaaagtccaacatcagggcaccagcagattcagt

SEQ ID NO: 595320 - DNA, 623 bp, Homo sapiens
ggacagctgatttgtaacctttggttaaattatgcctgtgcctttgtgcctgctgccactaagagttcctattctgagtatctcacttggggagtacctgcttctaattgccacactgagccaggaagtgaactttttaaatgcacagtctcttgcaagcacacttgacactattatacaagatgtttaattagcataaaacaacatataacatgatcagttcagaagttggtaaatgaaactgaaaagttggatttctaaataatcctacattctcaagtctttccacttgaatatcattctttccaccctatttcctccacttcttacccccktttaagttctatggccatattttatttccaggagacacaggggaaatggtctttctaccactgtgattaggagagaaagatgaaaagatttatatttttcaacttcgtgataacaaacatatgattgcattctcaaaactcatagcttttcaactaagtagtcataagtggttgaggataattctttaaattttgacgatgagttggttactcgtcttttagtttcaagaatggaggaaatttttgcttccaatggaatagaagacatttttctaatgataaatattg

SEQ ID NO: 595321 - DNA, 643 bp, Homo sapiens
accttatgctagattatgatgcaaatattctagaatttaaataaaaatacttgtttttgaaatcctatttacataagcaagtagaaagttgtagcaaaatcactaaaaatcaaacaaagaaaagtgtaaagattatcactgtttttttttaaatcatcaatattttagaaagtctgattttcataaaggaaaaaggggaggaaattttctccccattaatagcttagctgtattttatctttttaaacttcaaatgaattctcctattttctctgagatctcagactaaatttcacattgaattgaattaacttttactcttctgagaatcttctttctgtccattcaacaagaagtgtaaagtaggtgtaatacattgtgaatttttgtctttaacctcagttctaagttctagctcagcattaggccctaggtcagcaaaatttcagctcctatttyttctgcatttaccaagaaagaattctgatttaactatgaaaattccaaactatagaaaaatcctgggattactatgtatggtgtcttggtcactttttgttcatgcctagtaaatcaattgagatccataggctgcacagttaagaatattagcaatgacttaccttactgtgtgtttgctatg

SEQ ID NO: 595322 - DNA, 497 bp, Homo sapiens
aatgtgtggccgatcagaaaattgtttctgtccacactggttcttacagagctggaagtcaaatttttcaaataacattaataataagggagccttaatacatttatacagaggtcatatcccatccccttttatagagtcagaggcagaagagaggccattgaaacccacaaagcatcttatatttatatttttcaaggcaattaattatgctgatggcaggagacctcttatagctctcatctgktatggataattacctaaatgaattaggctacaatttgaggcagttttcctaggaccataaagctagcagtaaaaagaatgaaaatggctgtttatgcagggtatgtgtatgattccttgataccttagttgttgcagaaactgtgtacccaattctgtcttcatcattagcatctcttagctcatcaaatcgaatcctggagcattctttctttaccctctcccctggatgttttcttggcaatgtaaaa

SEQ ID NO: 595323 - DNA, 580 bp, Homo sapiens
tctcagcttattattgtatcccgatgtcctctcttgtatatatgtttgatcattgggttacatttatatcatctgaaatggaagtgattctgatttacaactcaaaatttgcytaagccaaatggtgaacatttcattatttccgttttatgggtcatgtctgaaggggtttggctcagaaaatagaccactgctcgaaaggaggaagtctgttcccatgaggcagtaggtatggagtcagcaaatcatggcacgttcacccccagagtgtcagggaaaccatttgttgcagccgccaaagtcaacccatcccactggcatgcacacgcctaagtatgcacatcaaacttctatagacagacagatgacacagttagcaaagtcctaccaaagaagagagagagcccgtatcacagtggtggagtgaagctgtgacccaggctcctgtgttttttccttgctttctctctctcacatatctttttccagtgccaatagcaatacagattgcaaataaagagagaggagcaagcagaatgtgagtgtgtgtgtctgtgtgtgtgtcttctctaaccatagg

SEQ ID NO: 595324 - DNA, 500 bp, Homo sapiens
ggctgaccttaattttaatttttcaaagtgatgacattacaaaaatcatctataacatgatgtcatactcgtctcctgacatctgttatgttggggaagtcttgcaaacacagctaatcaggattgtctatttttaagtcttcagatgctggatctggcactaaatactggttctttacaagtgtgtacaggtatggggtaaattgtgtaaatcaattactaaaaacattcactacttcagagmactacttataaaatctggccaagtgccaggtggttgtcacacacatcagaagattgattatctacctaactattctttttggtttcttttaccataatgagttacacacaccatccatgtctattccttatactgttaccttacattgttttctcacatttacatccatatgatcacatataatcttttctaaatgcccaggactaatatacctggattagtgctgatgccgagatcacctggtcgtggctgagtg

SEQ ID NO: 595325 - DNA, 474 bp, Homo sapiens
cagattgctttcttgtttaaagatactcttaatttttgttgagggtcagtttaggtaatgtcrtatgaaaacttttcacgtattttctatcaaatagtggtagaaaacattatccaatatcttactcagagtctcctaaacaacaatccatagaagtcctttttattagataatgagaattatatatgacatacttcttttccttttcaccttgtttttcatgaagttgaacattaaattcagtgctcaaatgaccatattgtcaaggtttcgagtttttttccttaaatacttctcatgagttttggacttctatttgactagtcatagtgtttatgtgtattttatcttgagatgcctgaattattttgggaagaaggaagttagattatttaagagatgcttcctagagcttgtccataatgtttcagcattttccccccagtcagatgaataaaaaaattggtatttgaa

SEQ ID NO: 595326 - DNA, 474 bp, Homo sapiens
cagattgctttcttgtttaaagatactcttaatttttgttgagggtcagtttaggtaatgtcgtatgaaaacttttcacgtattttctatcaaatagtggtagaaaacattatccaatatcttactcagagtctcctaaacaacaatccatagaagtcctttttattagataatgagaattatatatgacatacttcttttccttttcaccttgtttttcatgaagttgaacattaaattcagtgctcaaatgaccatattgtcaaggtttcgagtttttttccttaaatacttctcatgagttttggacttctatttgactagtcrtagtgtttatgtgtattttatcttgagatgcctgaattattttgggaagaaggaagttagattatttaagagatgcttcctagagcttgtccataatgtttcagcattttccccccagtcagatgaataaaaaaattggtatttgaa

SEQ ID NO: 595327 - DNA, 473 bp, Homo sapiens
gtgtttttaggggtctctggttgcagtcaacagacactggctctggctaacttaggcaaaagaaaatttattagaataggtttgggagcacacagaattaaaggaaagcwggaaaatcagacttggaaatgggacagtagtcaaggcatctccaaggagttggagatcaggataggtcttgtagcaggaagaatctgatatggattctgccactgaaatgaaaacctctaaatattttttgtatctttatttctctgtgcaagcatcaagttcacagaaaggactccaatgagtggtctaatttggcaaggctgccagcttgtaagagagatgggtttttgaatccagtttcttgtctatgttctgtgagtaacaggtgaatattcaaaaggaaatcagagcactgtaggaaaaggaagtagatcctggcctgcgagaaaacaataactacaatgaggatcataaataatgtt

SEQ ID NO: 595328 - DNA, 625 bp, Homo sapiens
tctgaaaatattccctctcaaaaatttatcagtaaaaatcacaagagcaacatcacttaaaattaggtgtttcctttgggtaataaaaactgagattgtcccctgttttaaaatattaaggtggaggaaataaaacacaaggcaagcagagaagacggtgaaatggtcagtgtaatgtttacatgttatgagaaggctgtataatcataacaattattttccctcaaaagctctacctctttgatctagctcaaatttcacaccaaccatcaaagatgattgctgcataaatctgtattctytcctaccgtttaaggttattggtactttgattaatttaaccacgttactgtcaggttgaacacactcatcttctgtttcaaagtgtgtactcgtcaatctctctatggttccttcccttcaggccttatttcatcacatttaaggagactctcctgccctttatcttgttaggctttcaacagcttaagttgaatcttcattctttcattcttgctgtcaagctttcttcaataggctctctcatttccctattcataaagtgtcagggctgtttctgtttcacacagcattatatgcagagtcagacgttgctacagattaa

SEQ ID NO: 595329 - DNA, 541 bp, Homo sapiens
cagcaacaataagtcatttttcacgtttattttccatgcacataaagacacaccactctgccatcaacatatcaggcgaawtcaaaaatggcttagcacaaaaattacccagagaatggccatcagaaaaacagttgtgacaaagcaactatgctaaaattgtaccttaacttgaattatatttgcattcatttgcttcctaatacttttggagaactttgtggagaaaagactgggctttttgttcagtagtttttaaaatatcaaacgttctgtccatcagctatcccttcttggatgtgacaatgtgatagaataaagaccgacttttcttttggaacctcattgacatggcctttggcagcttacaagacctgtcttcacttattgtgtcctttgtaccctgatgccttcttataaggaaggacaataagagaggcctatgacaatatctcaacttttccccctggagactgagattccatggttttttgtgaaatccagcatgagtaatacttgttatcagagaagaaaagcgcta

SEQ ID NO: 595330 - DNA, 541 bp, Homo sapiens
cagcaacaataagtcatttttcacgtttattttccatgcacataaagacacaccactctgccatcaacatatcaggcgaaatcaaaaatggcttagcacaaaaattacccagagaatggccatcagaaaaacagttgtgacaaagcaactatgctaaaattgtaccttaacttgaattatatttgcattcatttgcttcctaatacttttggagaactttgtggagaaaagactgggctttttgttcagtagtttttaaaatatcaaacgttctgtccatcagctatcccttcttggatgtgacaatgtgatagaataaagaccgacttttcttttggaacctcattgacatggcctttggcagcttacaagacctgtcttcacttattgtgtcctttgtaccctgatgccttcttataaggaaggrcaataagagaggcctatgacaatatctcaacttttccccctggagactgagattccatggttttttgtgaaatccagcatgagtaatacttgttatcagagaagaaaagcgcta

SEQ ID NO: 595331 - DNA, 541 bp, Homo sapiens
cagcaacaataagtcatttttcacgtttattttccatgcacataaagacacaccactctgccatcaacatatcaggcgaaatcaaaaatggcttagcacaaaaattacccagagaatggccatcagaaaaacagttgtgacaaagcaactatgctaaaattgtaccttaacttgaattatatttgcattcatttgcttcctaatacttttggagaactttgtggagaaaagactgggctttttgttcagtagtttttaaaatatcaaacgttctgtccatcagctatcccttcttggatgtgacaatgtgatagaataaagaccgacttttcttttggaacctcattgacatggcctttggcagcttacaagacctgtcttcacttattgtgtcctttgtaccctgatgccttcttataaggaaggacaataagagaggcctatgacaatatctcaacttttccccctggagactgagattccatggttttttgtgaaatmcagcatgagtaatacttgttatcagagaagaaaagcgcta

SEQ ID NO: 595332 - DNA, 475 bp, Homo sapiens
gtcactaaagtgttattgaagatgctttaactgaacatgaacatgcactttgaaataaaataggtatgtataaatgaaccttgaagataactaaaataaagtgtatttcatcaatattccattgaacacaattttatgtagggtgtgttttcatctcctgtaaaggaccytaacattccatagaatattatattatagtaggcacatttggcaatgatgacagtgtactgtatttttcttgtaactacatctccgatgaagtcactgcagtcatgacaaactccagtcccactggaatgaggttcagagaacggactaagaggtaggacatggtctaagggaaagggttctattatctgtcaaaaccaggtaaaaagggaaggtttctagttctttgaaggctaaacgattaggttctgatggcttttaaatgttgatcatttattattaatatgaaagatcattttaaaatgta

SEQ ID NO: 595333 - DNA, 575 bp, Homo sapiens
aaacacgatttatgcttcactatataatcatctatatttcataaacaaataacaattgtaagttttatttttgctctttttattggtttcttttttaaaaaaagatagatgytatcctagttaccagtataaggctcatttgtaccaataaatactctcaattatatgtttgaaagtcagagttctagctgagactttattcacatccctttgttattttatttgttgcctaagttgctgtgtgtgtaatgttaaaacttactgggaattagtgtaataatgaagagaaaactgatatgttctgtaggataaaatgaatgccatgatcattcacattccttaatggtgcttaatctaatcaaagtccaagccaaaaagcaaatacataaaactattaataatgcaactgagtttacaccagaaacaaaatatgttattcatataatacagcaaattacagagaaagagtaaattttcttttcacatatacaaaacttcatatttggttgcttcttttctttctttcttttttgtttacctagaacccaaaagcttttgtctaacagttcagatca

SEQ ID NO: 595334 - DNA, 588 bp, Homo sapiens
actctgttatatactacagaaacactcaacaccatatattcagcttaactacaataagaaaagccagacccagatgtcccaagctaaatcgagggaaaagaggaaaattaaaatttagtgttcatttgcagaaacccccccccacttgcatgtgcctcagataaccagttggaatcaacgaaaatttataagcttacagaataaaaatctaattctcctgtctcagaggaccttggagcactttcaattttttatgtactacacagatgacttcagtggcaccagatcacttatcaattaagagagaagaaatgtgcatgtccatgctctttgcacgagaaaacrgagctatgattaacaatctcaagttgtccatacacttgatctgcatttaacatgcaggcattctctcaaattctatccagatatggtcatagttgttgatacaaatcaaaaattttaaaaagatctgagctttaattcagaaattccatttacagaaataagattatgcaagaaaatgtatctaataaagagacaactctatgtaacatttgttgattatgaattaggccctgtactaaaact

SEQ ID NO: 595335 - DNA, 563 bp, Homo sapiens
aaagccctgttaggctatacatctatttcattcttcttctttactattgaattttaaaatgtgtgcacagtgaggtgacccttatatcaaagactacaaacagtgcttaaagatatgcagcacctttttaaagaaacacaccttcttataagcacagttaaaagggaaaaggttaaaggctacagtagattgttctattctgtgccaagattctgctccagctgcaactaaatagtggttctcaggcttaattaaataaagacccgtgtaaattctaactgtttactatgtgattagaacttctctgggcaaaaagctcatatttgatttccttgctgtctgcacttgcccaaaccctttacccaccaggtatgtactgaagctgtgtaaactcaacatttttcttttggaatcaagggtaagatataaaagtttatakaaacggtgagacccaattgtggaaaattcattttatgtaaatggaaaaaaagtattctatatattagaaccaatgttgtcatgatgaaatttctttgactaggccgggcatggtgactcacacc

SEQ ID NO: 595336 - DNA, 457 bp, Homo sapiens
ctcatccttgagatgtaaaagaaattgctctgaaccacccaatttcttgacccctttgtgaagatgtctacaattcccattgggtggaagaattaagtcttattggtgccctctgccacccatgccctagagttctcctgctccacctccatcttctcctataaaaatgcaccttctcattcagtagctagaaggtgtccaggcaaagcaggcattttgtaaattttagttgactgrgggagggaacagatgaataatgcaggatgtgaggctttgtaggttaagatcacaagaagaggtggatggttatctactatctccccccaccaagaacttttctgactctgagtttgagatgtccaaagaaaggcagaatcatacctttctcattgattcttatgtttacaaagtacctttataaagcgtctactgtgttccaggtaccatgttaatttct

SEQ ID NO: 595337 - DNA, 638 bp, Homo sapiens
gagggaacagatgaataatgcaggatgtgrggctttgtaggttaagatcacaagaagaggtggatggttatctactatctccccccaccaagaacttttctgactctgagtttgagatgtccaaagaaaggcagaatcatacctttctcattgattcttatgtttacaaagtacctttataaagcgtctactgtgttccaggtaccatgttaatttctagaagtaaaaatgtcaactctgtcactgtcttcaaggaatccatagtgggaagcagagcacacaaacagatgtttacagcacaacatgatgagtggtttattacacacaaagtattcaggaaacaactaagaggaagaaaaaccatctccacctggaaagactggaaaggctacacaccagagctcaaatttgaaatacatctcgaacaaggatttggccatgccaagacagttgagtggaaggaagtacattctaggcaaagaaaaagcacaaatgtgacctacaaatgaaagattggtgagtaactctgcatagctggaatataggcataaaagagaaggcaagaaatgaagctgaaatggtaagtcagaagtgtattatttaaacccttgtttgtggtgctaaatggctgggcaact

SEQ ID NO: 595338 - DNA, 588 bp, Homo sapiens
tttacagcacaacatgatgagtggtttattacacacaaagtattcaggaaacaactaagaggaagaaaaaccatctccacctggaaagactggaaaggctacacaccagagctcaaatttgaaatacatctcgaacaaggatttggccatgccaagacagttgagtggaaggaagtacattctaggcaaagaaaaagcacaaatgtgacctacaaatgaaagattggtgagtaactctgcatagctggaatataggcataaaagagaaggcaagaaatgaagctgaaatggtaagtcagaagtgtattatttaaacccttgtttgtggtgctaaatggctgggcaactaggagtcatggtgtgatcagatctgtagtttggaaattcaactggaaactgctatggatgagagctaggagaggggagaaattagaagctattatagtgatgatggyaaccaatggtgaggtgatctttaggtcatcactggaacctgacctatagtagacattcaaaaaatattttcatgtaattgaatttgtctcatgagctccttgatctaatatactgagcaactagccttgctac

SEQ ID NO: 595339 - DNA, 591 bp, Homo sapiens
aatcacagctgcctgtgtgtgcaaaagtagcagtagcaaaacacctagctgataaagtagttctttaacctttatagaaagcatgatttaaggcatcttatgggaaatcaaaggcttcagccaattccaaggatcttacagaccaatgggagcagtaggaaccctggtgagatggtttcatgccatgctttttaagtttacatttagtcaccaaaaaataataggctgatatttttgaagaagagctaccttctttcttcatctttgttatataactttgttatccctttccaaattcactatccaaatattcgctagtgtatttccaaatacactagcgtgtaactgggctctcaatcgccaaaccctggtggcattcyaaagtgtaaattttagacacctctgagcagattttccatgaacctagagatccagtgagagacaaattctaccaacaactcaatcctctagccagtgaaggtagccccagcagacagcagggaaagcctatactctcaatcaaaggtaacagctcaacatgccagagttcaagcattatatagatgtaatattattcttacaccaaaagac

SEQ ID NO: 595340 - DNA, 644 bp, Homo sapiens
gggggctattgatttttggtccattctctttaaaagtgagatctaaaaagttgacagagggtcattaatttcatcatatacttgtcgtctcatccataaccaatccagagtctgagtgtgcttgtcactctgtgtttgcactttatttgtttggggttttcttggtgattccactcttttttttcctctttcayttcggcctctttaaataaagaaagaaaagaaacatgccagtttgtggctctttcctgaaaatgatttggggatggggaaagttatagatacagatacatagagagagattctggtaataggaaacagtcagaaaatagcctcttccagctgccttctaacctgggtttaaaaaaagaaaaactccatataaaattcatcaatcctaattattcaattagcctccaattgaataaacacttacttaggtgaactagtggacttgttttaatgaaatattaaaatacaagttgccaacattctttttcaaaaagcttctgggttctcaacaaatgttgttgaaatgtacaaaaataattgatagtaatcgttaattgagtttctttggctgtaaattcagaacaggtctaccaatcctgcaagaaacaccaaactgaatttcaagatatcgt

SEQ ID NO: 595341 - DNA, 569 bp, Homo sapiens
tgaggttcccagccactgaaaaaagagaaaagagagaccactatccctaaatattgtgaaacttgaaattcagcaacacgattttgagaacattaagaagtcactactttcttgctgtcctacaggttaggcgaaggaagaaatatgtttaaacaccagatacggcagggcgtggtggctcatgcctgtaatcccagcactatgggaggctgaggtgggtggatcatgaggtcaggagatcgagacaatcctggccaacayagtgaaaccctgtctctactaaaaatacaaaaattagccgggtgtggtggcacacacctgtagtcccagctactcaggaggctgaggtaggagaatcacttgaatctggggggcagaggttgtagtgagccgagattgctccactgcactccagcctggtgacagagccagactccctcttagaaaaaacacaaaaacaaaaacaaaataccagacactattagttttgggtacaagagagggaagccaattacacatatagcaaaagagaaggaagaataaatactatatatatgtagtattcatta

SEQ ID NO: 595342 - DNA, 569 bp, Homo sapiens
tgaggttcccagccactgaaaaaagagaaaagagagaccactatccctaaatattgtgaaacttgaaattcagcaacacgattttgagaacattaagaagtcactactttcttgctgtcctacaggttaggcgaaggaagaaatatgtttaaacaccagatacggcagggcgtggtggctcatgcctgtaatcccagcactatgggaggctgaggtgggtggatcatgaggtcaggagatcgagacaatcctggccaacacagtgaaaccctgtctctactaaaaatacaaaaattagccgggtgtggtggcacrcacctgtagtcccagctactcaggaggctgaggtaggagaatcacttgaatctggggggcagaggttgtagtgagccgagattgctccactgcactccagcctggtgacagagccagactccctcttagaaaaaacacaaaaacaaaaacaaaataccagacactattagttttgggtacaagagagggaagccaattacacatatagcaaaagagaaggaagaataaatactatatatatgtagtattcatta

SEQ ID NO: 595343 - DNA, 286 bp, Homo sapiens
gcattccaattttcacctccagcaagaaagggaaacaggtgtgaatgtgaggggtgtgtgtgtgtgtgtgtgtgtgtgtgtgtgtgtgtgtgtgtgtgatttgagccacagcctaaaaccatctctgtgctcaatgtttttattgcttgtaccctgcrgggtaaaaccctactgggaagatagttctagagcttgtactgtgtgcttctgtttaaattattctgcttttaaaccacagcaaggcaatttgtaatgacccacatggtaggaatgtcatggtacaatt

SEQ ID NO: 595344 - DNA, 286 bp, Homo sapiens
gcattccaattttcacctccagcaagaaagggaaacaggtgtgaatgtgaggggtgtgtgtgtgtgtgtgtgtgtgtgtgtgtgtgtgtgtgtgtgtgatttgagccacagcctaaaaccatctctgtgctcaatgtttttattgcttgtaccctgcagggtaaaaccctactgggaagatagttctagagcttgtactgtgtgcttctgtttaaattattctgcttttaaaccacagcarggcaatttgtaatgacccacatggtaggaatgtcatggtacaatt

SEQ ID NO: 595345 - DNA, 555 bp, Homo sapiens
gtctgctggtaacaaaatttttatctccaatttgtacctctcacctgaactctaattttgtgcatccaactcttccttaatagttctacacagttgctaatattcacctcaatctaacatgtcaaaaccagaagtcatcaccacaaccaaaaattaaaacaaaacaaaacaaaacaaaaatggaaaaagaagaaagtaaaaatcccttcttcccttgcagtgttttccatgttaattaatgtcaatgactcaattgaagactcaggaattatttttgagctctttctgtccttcccaacctacatctgatctttcaggaaatcttatagagtctgtcttccaagtacaagcagaatctgaccacttcttcccactttctctcctaccttctctaagccatctccattgtaccctggaggcacarcattcacattttagctggattcctgattccaatgtttccccttgtagactactattaacacataggcagagagacactgttctatgatagaatgtatcatgccagcctctgtctgctccagctttccagga

SEQ ID NO: 595346 - DNA, 516 bp, Homo sapiens
gtcctctctatttgtcctcacatgttggaaagaaggaaaagaagaaggaagctactttgtgtctcttcttataarggcactaacgccatcctgagggcaccacccttatgatctcatcacctcccaaaggcccccacctccaaatatcagccactgggggttagagatttaacatatgattttatggggatataaaatacagtttataacaactaataacatgtttaatatcactgggttttcttcatctgtagagattgcacattcctttagtgcatttattcattaaaataagtatcaaggatataccatgcaacacacaagtagtgtattggatgctgagtatctaaaaataaggggaggattggtgcagtatctcatgtctgtaatcccagagctttgggaggctgaggcaggaggatcacttaaggcccagagtgtgagatcagcatgggaaacatggtgagaccctcatctctacaaaaattttaaaatattacctgggtgtggtggcat

SEQ ID NO: 595347 - DNA, 489 bp, Homo sapiens
ggtccatattgcctttaaatttcttcacattggtaatagcataatttctgacttagggtaaatgttttcactttaataattgtttcaatttattttgaactattaccctattcttagacaatattcccaaaatagtcctcctatgtttcagaytgttacacctgcagagagtccttttgtggctaaaccagatgaacccccctgtaacagttgtatgcattgggaaatggtattctcaacaaatagaaactttccctgcagttaaattgagtattgggccaatgaatcactacccttctgaccgaggaagagttgtataaatcaatggtactctccaaataatatatgagagtgaatactcaatctgtttcacattgagtttgcgggggagtaggtttgggttaggcagagtagagattaatgagaccatgtgtatttcctgctctgtaggtaaatagctcaatattcaccagggaagtcagtgaagga

SEQ ID NO: 595348 - DNA, 643 bp, Homo sapiens
tgatcattaagttccatctccttgcttacttgttcattggcacatagccatgtttatcttgtccggaggcacatcaacatgctgcttgcccagcatcgtatcttataacaatgattgcrcattttcacttctgaccatgatccttgatgtctgttcttactcttattcagtagccacagcccaacctcataaagtagtggattatcaagaggggatagacagagtaggctgtttatcaagatttgatcccaaatataaccgaagtatatccttaaatgacttttaaaacctacctgaagtttggggccataaaacatatttatattcaatgtagttcaaaacaagaaagcctgtagaaaatgaaaagattactgtagttatttttcaaatcctaaaactttagattatcccataaattttgggttcaagaaaaagctgggaaataggttacaaaaataagtctcatacccagaattgccttttgaaatactgtgctaagaaaatattatggatgtaattgtcatttctttttcatgggcatgctgctgttttagatatattctttttttgaaatgcatgaagtctttctgaaataggtacagcacatcagaaagaaagatctatctaaaacttgaggttttac

SEQ ID NO: 595349 - DNA, 643 bp, Homo sapiens
tgatcattaagttccatctccttgcttacttgttcattggcacatagccatgtttatcttgtccggaggcacatcaacatgctgcttgcccagcatcgtatcttataacaatgattgcacattttcacttctgaccatgatccttgatgtctgttcttactcttattcagtagccacagcccaacctcataaagtagtggattatcaagaggggatagacagagtaggctgtttatcaagatttgatcccaaatataaccgaagtatatccttaaatgacttttaaaacctacctgaagtttggggccataaaacatatttatattcaatgtagttcaaaacaagaaagcctgtagaaaatgaaaagattactgtagttatttttcaaatcctaaaactttagattatcccataaattttgggttcaagaaaaagctgggaaataggttacaaaaataagtctcatacccagaattgccttttgaaatactgtgctaagaaaatattatggatgtaattgtcatttctttttcatgggcatgctgctgttttagatatattctttttttgaaatgcatgaagtctttctgaaayaggtacagcacatcagaaagaaagatctatctaaaacttgaggttttac

SEQ ID NO: 595350 - DNA, 502 bp, Homo sapiens
acagcacaacagagtgactatagtcaataatttaattatgcattttaaaataactaaaataatcttgcttgtaacacaaaggataaatgcttgaggggatggatacctaattttccataatgtgattatgatgcattgcatgcctataccaaaatatctcatgtacctatgaatatatacacctactgtatatctacaaaaacttaaaacaaattttgaaaaagaaaataataaatataattaacattttaaaatatgcctaggttgtctctgatgactagttttgccttttcctacagatcagtctaatttgtctataataaatgttagtcttatgtatgtttatatttcataaaaagagaaaaatgaaatacataagacyagaaaattagtctttaaatcaatgagcaagatagacaaaactctataaaatacaacaaaaaggcaaaaaaagagaaaatttaaaaattagacctgacaaattgaataggacagagaaaag

SEQ ID NO: 595351 - DNA, 502 bp, Homo sapiens
acagcacaacagagtgactatagtcaataatttaattatgcattttaaaataactaaaataatcttgcttgtaacacaaaggataaatgcttgaggggatggatacctaattttccataatgtgattatgatgcattgcatgcctataccaaaatatctcatgtacctatgaatatatacacctactgtatatctacaaaaacttaaaacaaattttgaaaaagaaaataataaatataattaacattttaaaatatgcctaggttgtctctgatgactagttttgccttttcctacagatcagtctaatttgtctataataaatgttagtcttatgtatgtttatatttcataaaaagagaaaaatgaaatacataagactagaaaattagtctttaaatcaatgagcaagatagacaaaactctataaaatamaacaaaaaggcaaaaaaagagaaaatttaaaaattagacctgacaaattgaataggacagagaaaag

SEQ ID NO: 595352 - DNA, 596 bp, Homo sapiens
attgtctcctagagccagtttttaagagggatttgtctcataaaaagttcatatagcagctgtattaaagaaaatgcaaaagttattttttatgtctgattttggctgggcatgatagctcaggtttataatctcggcactttgggagtcgggagtgggaggattgyttgagcgcaggagtttgaaaatgtagtgagctatgatagaaccactgcactccagcctgggcaacagagaaagaccctgaaaagaagtagtcagagaaagctggagttacagaaagccagtctaatgtgaaatgggtgagtatttctggggaaatattttgataagggaaccaagctcagaaaacgtaaacagtttgtatgattactatgccacttgcactattttttcctatatatccattattcccatggtgcttttgttggagtttgtggtaataaattcagtattgcacagtttgtccataaatacctttaatagagttattctaatggtgatggtgttggtgttctgcaattgaaagaagaatcctgatttacacgtgttaagatagaaagtcattcctgactttgtacacacacacatgcaca

SEQ ID NO: 595353 - DNA, 586 bp, Homo sapiens
ttactaaatattttataagtacaggcattataggaaacatacacatggcatatacctatgtataataatccccacgagtcaagggtgggaccaggtgcatatatatatatatatatatatatatatatatatatatatatatatatacacatacacacacacacacacacacacacacatatgccacatacatatttyctattgtatctgtatttatttgtaaactatttgcccattttgaccacgttcatgggcatatatatacatacaacaaattacacacatatacacccatgaccacttcattctacacgtaggtgtttatggacacacacatgaattatcatttcaacttgtttcgcacaggccttaaggtaaaagcagccaaatgccctttaataggagaatacgcagctacactgcaatgtttttcatataatgaaatgctgttcaatagttaaaatgttttaagaaaggtaataggcacaacaaagtgaatgaatcccctaaacattatgtgtagtaaaaggggctggagaaaaaaaaatgcctactataagatgctgttcataaaaaatttcaagag

SEQ ID NO: 595354 - DNA, 562 bp, Homo sapiens
gcattataggaaacatacacatggcatatacctatgtataataatccccacgagtcaagggtgggaccaggtgcatatatatatatatatatatatatatatatatatatatatatatatatacacatacacacacacacacacacacacacacatatgccacatacatattttctattgtatctgtatttatttgtaaactatttgcccattttgaccacgttcatgggcatatatatacatacaacaaattacacacatatacacccatgaccacttcattctacacgtaggtgtttatggacacacacatgaattatcatttcaacttgtttcgyacaggccttaaggtaaaagcagccaaatgccctttaataggagaatacgcagctacactgcaatgtttttcatataatgaaatgctgttcaatagttaaaatgttttaagaaaggtaataggcacaacaaagtgaatgaatcccctaaacattatgtgtagtaaaaggggctggagaaaaaaaaatgcctactataagatgctgttcataaaaaatttcaagag

SEQ ID NO: 595355 - DNA, 554 bp, Homo sapiens
cattcagaatcctaattgaaagacaaatgaaaagattctactactgtgcaagaaaaccttctaattcagaacaattccatacattatgttacttaagagagaataagatgagtttaaaagttggatgtcctggaataattaagagaagcttctatgattgccaacagtgaaaccagaaacacaacatactacttgataagtgattaaactctcataagttctgtttgtgtaaattctgcttgggtggcagtttcctgtatgattgaactaatttttgcatgcattagcctatgctttttggagctataaatagaactgtacaatttttattraaatatacataagtgaaagtcatggttttaaatatacaatttgtattagtccacttttatactgctatgaaagaatacccgagactgggtaatttataaagaaaaaaaggcttaatggactcacagttcagcattgctgggggcttcaggaaacttacaatcatggcggaagaggaagcaaacatggccttcttcacatggtggtagcaaggagaagtgctg

SEQ ID NO: 595356 - DNA, 536 bp, Homo sapiens
tcttcctctgtttctctctccctttttctgtctacctctgtcactctgtttcttcctccctctctcccctcttctatttctgcctttttgtctctctctgtctctctgtccctctctctctccccatcctttctctcctcccatctcctcccatcagcactccctctggggaagccagctaccatatcctgagcagccttgtgkagcagcccatttgattggaaactgaggcctcttctgttggaacagccatgtgactgggcgtggcagcagaatctcaaccccagtccaggtttcccatggctgcatccataactgaaagcttgatgtttacttaatgggggaccctgttgtgggaagtcagggaccctgaatggagggaccaggtggagctgtggcagaggaacatgaattgtgaagatttcattttaatatggacatttatcagttcccaaataatacttttataatttcttatgcctgtctttactttaatctcttaatcctgttatcttcgtaagctgaggatgtatgtc

SEQ ID NO: 595357 - DNA, 564 bp, Homo sapiens
cttttcctagcaaggaatattaatattaatatcctgggaaaggaatgcattcctggggggaggtctataaatggccgctctgggagtgtctgtcttatgcagttgagataaggactgagataagccctggtctcctgcagtactctcaggcttactaggttggggaaaaacctctgccctggtaaatttgtggtcagaccagttctctgctcttgatccctgttktctgttgtttaagatgtttatcaagacaatacgtgcaccactgaacacagacccttatcagtagttctgcttttgccttttgtcttgttccctcagaagcatgtgatctttgttctgctttttgccctttgaagcatgtgatctttgtacctactctctgttcttatgccccctccccttttgaaacccttaataaaaaacttgctggtttgaggctcaggtgggcatcatggtcctaccgatatgtgatgtcacccctggcagcccggctgtaaaattcctctctttgtactctttctctttatttctcagctgacacttatggaaaatagaaagaac

SEQ ID NO: 595358 - DNA, 500 bp, Homo sapiens
cttccttccttccctctctccttccttccttatactcttcctttcttcaacgaagattcattgatcaacttayttcagctaacaaaaaacatcattcttttcctccacttgcattctatccctacaactatatgtttagttttgcacttccaatacatttatcgctcctcctttaactgtagactattcagtattctaccagtcactagctcaactttgtagctgtgctcatggccaggcaacagattagctggcaggtcctggagtgactgtcttaaaagacagggtgaggctagatgtggtggctcacgccttaatcccagcagtttgggaggccaaggcaggtggatcacttgagctcaggagtgtgagaccagcccagcaacatggcaaaaccctgtctctataaacaatacaaaaatgaactaggtgtggtaacatgagcctgtggtctcagctacttgggaggctgaggtgggaggattgcttaagcccaggag

SEQ ID NO: 595359 - DNA, 500 bp, Homo sapiens
cttccttccttccctctctccttccttccttatactcttcctttcttcaacgaagattcattgatcaacttatttcagctaacaaaaaacatcattcttttcctccacttgcattctatccctacaactatatgtttagttttgcacttccaatacatttatcgctcctcctttaactgtagactattcagtattctaccagtcactagctcaactttgtagctgtgctcatggccaggcaacagattagctggcaggtcctggagtgactgtcttaaaagacagggtgaggctagatgtggtggctcacgccttaatcccagcagtttgggaggccaaggcaggtggatcacttgagctcaggagtktgagaccagcccagcaacatggcaaaaccctgtctctataaacaatacaaaaatgaactaggtgtggtaacatgagcctgtggtctcagctacttgggaggctgaggtgggaggattgcttaagcccaggag

SEQ ID NO: 595360 - DNA, 500 bp, Homo sapiens
cttccttccttccctctctccttccttccttatactcttcctttcttcaacgaagattcattgatcaacttatttcagctaacaaaaaacatcattcttttcctccacttgcattctatccctacaactatatgtttagttttgcacttccaatacatttatcgctcctcctttaactgtagactattcagtattctaccagtcactagctcaactttgtagctgtgctcatggccaggcaacagattagctggcaggtcctggagtgactgtcttaaaagacagggtgaggctagatgtggtggctcacgccttaatcccagcagtttgggaggccaaggcaggtggatcacttgagctcaggagtgtgagaccagcccrgcaacatggcaaaaccctgtctctataaacaatacaaaaatgaactaggtgtggtaacatgagcctgtggtctcagctacttgggaggctgaggtgggaggattgcttaagcccaggag

SEQ ID NO: 595361 - DNA, 500 bp, Homo sapiens
cttccttccttccctctctccttccttccttatactcttcctttcttcaacgaagattcattgatcaacttatttcagctaacaaaaaacatcattcttttcctccacttgcattctatccctacaactatatgtttagttttgcacttccaatacatttatcgctcctcctttaactgtagactattcagtattctaccagtcactagctcaactttgtagctgtgctcatggccaggcaacagattagctggcaggtcctggagtgactgtcttaaaagacagggtgaggctagatgtggtggctcacgccttaatcccagcagtttgggaggccaaggcaggtggatcacttgagctcaggagtgtgagaccagcccagcaacatggcaaaaccctgtctctataaacaatacaaaaatgaactaggtrtggtaacatgagcctgtggtctcagctacttgggaggctgaggtgggaggattgcttaagcccaggag

SEQ ID NO: 595362 - DNA, 547 bp, Homo sapiens
gtgttattccttgctctgctactggattttaaacaaattttaaaggtactgatatcattaggaagattgaattatatttgtctatgctataataattattttagtaccaaagatgaatatatgctttatgtagatagtaccttatttcatgtgttaactcacgtaatccaaaaaagagtcatctagcctaggcaacataacaaaaccttgtctctacwttatatatatatatatatatatatatatatatatatatattagccaggcatggtggtgcacacccgtggttcctgctacttgggaggctgaggtaggaggtttgcttgagctcagaaggtcaaggctacagtccatgggccagttgcagtggctcacacctgtaatcccagcactttaggaggctgaggcaggcagatctcttgaggccacgagttcgagactagcctggccaacatggtgaaaccacgtatctactaaaaatacaaaaattagtcagatgtggtggtgggtgactgtaatcctggctactcaggaggctgaggcagga

SEQ ID NO: 595363 - DNA, 547 bp, Homo sapiens
gtgttattccttgctctgctactggattttaaacaaattttaaaggtactgatatcattaggaagattgaattatatttgtctatgctataataattattttagtaccaaagatgaatatatgctttatgtagatagtaccttatttcatgtgttaactcacgtaatccaaaaaagagtcatctagcctaggcaacataacaaaaccttgtctctacawtatatatatatatatatatatatatatatatatatatattagccaggcatggtggtgcacacccgtggttcctgctacttgggaggctgaggtaggaggtttgcttgagctcagaaggtcaaggctacagtccatgggccagttgcagtggctcacacctgtaatcccagcactttaggaggctgaggcaggcagatctcttgaggccacgagttcgagactagcctggccaacatggtgaaaccacgtatctactaaaaatacaaaaattagtcagatgtggtggtgggtgactgtaatcctggctactcaggaggctgaggcagga

SEQ ID NO: 595364 - DNA, 575 bp, Homo sapiens
gactcacaatagtgttatgtgaggatctattgaaggattccacattctttcatttatctattttttaaagaccgggtgtcactctgttgcttggttaggggaggtcagcatcggagatgagtctaaaaatgatcagctgtgctgaatggacagctcatgatttgaccacagactttagaaagcactgcctgcaaagcaaaacaaagacctgccattttctaagaagctattattaagtcacagcttacacgtggtctgttatttttttattttttttttttttgagacggagtctcgctctgtcgcccaggctggagtgcagtggcgggatctcggctcactgcaagctccgcctcccgggttcacgccattctcctgcctcagcctcccragtagctgggactacaggcgcccgccactacgcccggctaattttttgtatttttagtagagacggggtttcaccgttttagccgggatggtctcgatctcctgacctcgtgatccgcccgcctcggcctcccaaagtgctgggattacagggtctgttatttttaacccagacaacatttttg

SEQ ID NO: 595365 - DNA, 612 bp, Homo sapiens
ccaaaaatgtggaaccaacctaaatgcccatcaatcaaggagtggataaagaaaatgtatgtatacaccatggaatactactcagccataaagaggaatgaaataatggcctttccarcaatttggatggagctggaggccattgttctaaatgaagtaactcacgaatgaaaaaccaaatatcatatgttctcacttataagtgggagctaagctatgaggacacaaaggcataataatgatgcaatggactttaggaactcagggggaagtgtggtaggaagtgagggataaaagactactccttgggtacagtgcacactgcttgggtgaggggaacaccaaaatctcagaaatcaccactaaagaatttatctatgtaaccaaaaaccacctgtacccccaaaaactattgaaataataaaaaatatattttacagttttcatatatatatatatatatatatatatatatatgtgatcaatttatggttacaaagtaaacacaggccccaacagctttgtgtgtgtgtgaaatttaactgatatattactgtgaaagtatctaacactaagtagatgccgatatgttgaacttttgctaccaggcat

SEQ ID NO: 595366 - DNA, 555 bp, Homo sapiens
tcttgtgggtatatacttatgattgacattactggatctttcttctacaaaattttcagatactayattttaaaatttcaacatgccctgcaagaatggccataatcaaaaaatcaaaaaatatgatgttggtgttgatacagtgaaaagggaacacttctacactgctagtgggaatgtaaactagtacaaccactatggaaaacagtgtggagattccttatagaactaaaagtaggactaccatttgacccacctatcccactactgggtaaccatccagaggaaaagaaaaacatacttgcacacgcatatttacagcagcacaatttgcaattgcataaatgtggaaccagcccaaatgcccatcaatcaatgagtggataaagaaactgtggtgtatatatacaatgggatgctactgagccataaaaagaataaattaatggcattcacagcaacctggttgggattggagactattagtctaagtgaagtaactcaggaatggaaaaccaaacattgtatgttctcactcataagtgggagctaagc

SEQ ID NO: 595367 - DNA, 337 bp, Homo sapiens
acctgctgggccttttatttcttgtttcctcagtctaaggtgtcctggaggagagggctcttctatcttggttggaggtgccttrttgctggtgttgagctgggaacactaggtgtgctatggctccaggcatccccgggaatgtctggaaggaaccgggaggggtggggccgggggtgcagaaggcagggagggacccttgggggcaggttgtgggtagccagttgcagtctgtggcctccctcagaggtttggagtcgggcgtgcatgctgctgttggcctctttccgaggagtgccatcgcactaccctgtgccactgtccgcggtgaggacag

SEQ ID NO: 595368 - DNA, 507 bp, Homo sapiens
gttgaagctgacttgctgcatcgcagttttgtcctttagttcatcagctctggaactttccacttctggtgtttttggtttccaaacagaggattgaggacgtatgagagcaatgtttagagtaaggtcaaagatgaggtggatctaactgggccttggsgatgggcgcctacctgtcagactctgtccttctcagacagctgcccaggcaggagctgcctcttgggacagtgagtgggccatctccattgagagagtagggggacaaagggaaaaggcagggactgggtcactcctggggatgctgtttgacatagaccatgagggtcagccccactgggcctggctgacctggtagatgggtaggtctagggtatgaacatggatattagttggccagggtgtgagaacttgtgtgaaagggtcggcccctgggtgactcagtctcctagcaaactataaaagggaagtgactcatttccagccctgaacaagaactcctaaggc

SEQ ID NO: 595369 - DNA, 507 bp, Homo sapiens
gttgaagctgacttgctgcatcgcagttttgtcctttagttcatcagctctggaactttccacttctggtgtttttggtttccaaacagaggattgaggacgtatgagagcaatgtttagagtaaggtcaaagatgaggtggatctaactgggccttggcsatgggcgcctacctgtcagactctgtccttctcagacagctgcccaggcaggagctgcctcttgggacagtgagtgggccatctccattgagagagtagggggacaaagggaaaaggcagggactgggtcactcctggggatgctgtttgacatagaccatgagggtcagccccactgggcctggctgacctggtagatgggtaggtctagggtatgaacatggatattagttggccagggtgtgagaacttgtgtgaaagggtcggcccctgggtgactcagtctcctagcaaactataaaagggaagtgactcatttccagccctgaacaagaactcctaaggc

SEQ ID NO: 595370 - DNA, 546 bp, Homo sapiens
ggcacatatacaccatagaatactatgcagccataaaaaagaatgagttcatgtcctttgcagggacatggatgaagctggaaaccatggttctcagcaaactaacacaggaacagaaaaccaaatattgcatgttctcactcataagtgggagttgaatgatgagaacacatgaacacagagaagggaacatcacacactggggcctgttgcgggggtggggggcaaggggagggagagcattaggacaaatattgaatgcatgtggggcttaaaacctagacgatggattgataggtgcagcaaaccaccatggcacatgtatacctatgtaacaagcctgtactttctgcacatgtagcccagaacttaaagtttgaaaacaaaatccaatgtagagtcagatattgctttaaattgtcatrtgtcattagcctccttaatctggaagatttctatagcctttctttgattttgatgaaatggatatttttgaagactatagtttctcctccatttttttaaatggaaaattccccatttgtg

SEQ ID NO: 595371 - DNA, 633 bp, Homo sapiens
ggcccagggacatgtgcaaagtcatacagacacttggcactggggcaggacaggggcccagtgatggtcctgggccaagacctgattttgaactgtggctccatccttcaaagctatgagaccttaaggatattccttcatgcctctaagcctcaaatgctggagatcataacatcccagggctctgaggattaagggaagtaaaaactctggaagcacgttctcgagcctgccgcaggtgcctctctttctggacattgccccactgacaggcagcaggggctggttggaaactgatatggtttggctgtgtccccacccaaatctcatcttgaatkgtagctctcacaattcccacgtgtcatgggagggaccaagtgaaaggtaattgaatcatgggggcaggtctttcccatgctgttctcatgatcgtgaatacatctcagaagatctgatgattttataaacaggagttcccctgcacaaggtctctcttccctgccaccatgtaagatgtgacttgttcctccttgccttccgccatgattgtgaggcctccccagccatgtgggactgtgagtcaattaaacctcttttctttataaattacccagtctcgggtatgtctttatc

SEQ ID NO: 595372 - DNA, 569 bp, Homo sapiens
tttactgcatttttctccttcatgtctctgtcatttgtcttggtgatttcaatagccatgagtacaattcttctcataccttgttcttgacctcttcccttcaaaatgttttgccttttacttacctctgacacctattctcttgatcatcctctagacctttacctctgaaacctcaattaatagcatctcacttactagccatcactttttgtttttccctcttaaccccattgttatgggctgaattgtgtctttcccaaatttatatggttaagtcctaagccccggtacttcagaatgtgaccatatttggaaatagggtttttaaaaaggtacttaagctgaaatgagggcattagagtgagccctaatccaagtgactgttgttcttataagaagaagaaattaaggcacagaggggagatcatgtgaagatactggaagaagatggcagatatgatttggctgtgtccccagccaaatctcatcttgaattgtagctcccataattcccacmtgttgttggagggacctggtgggagataattgaatcatggggacagttt

SEQ ID NO: 595373 - DNA, 578 bp, Homo sapiens
acactgttgagacacatagaaggtacggctctctaaaatactgaaatgttttccatggatgcccgttacactacaaatcctgaacaactcatttaatccaaaaacagctgaaacactatttgctgcacccatttaacccatgtgaaagcccgtgcccatagatcagaaatgtcatctttagtgttagagaatgctctgtcttaccagaatctgtctcttccatagcctttcttcatctgttayaaaagcagggtgttctttcttaaggtttattcatcctaagagagcacttgagaattccactaactgtatctcactttcttgttgtggctgtaaccctgtcaccaccaaacccattattttgcatgaatgtctctgacaatacgtacataatccacagacaactccatctgatgttgtctttagatcttgcttagaggggtcttgtcaaaatctccatggattcattttctgccagtttctctgtgtatttccacaaagatctgaaactatttataaactgcttcacttcctggaaattttttgttactccaaggaaacttctaaggttttagagc

SEQ ID NO: 595374 - DNA, 557 bp, Homo sapiens
acttgaaattgtgccctagaattattttattacagtgcaaaagtagatgtccagagatccaaaagctacagtttgttacttgatggtgcacaaaaccacataaatgttgctatgtgttcagcttcttcactctcagccctcgcttgctcatttccaaagtttaaaataagcagtgaatgcagattggcagagaaaaaaatcccatcaccaaaggacagtatagagactgaatgtttgatatctargaaaggtaactctactctttctttaagaaaggctatgagaggtttgtgtgtattttctttatgtagaccggggatatttttagcatcagtttgtaaggtcactttcttctgctctaatggctactttccttagaattgccaagcacaacaaactccaaaaccatagttccccttacgacagctctgattagctcgatgccaaatacaatcagaacagcattcaaccatttgggcagaaacacacaaacaaactctagtacaggcatacctcacttcattgcccttccttttactgctcttcacagataataa

SEQ ID NO: 595375 - DNA, 627 bp, Homo sapiens
tatttgaactattttgataggagtaactattttgatagttcaaatccagagtctttcaaggagtcctctttgtagamcactctgttcatacttctttcatatattaagtctgttactaatcctatatctgttttctatcttttaaaaaattattgaagtctttcaatttcagtagtcttatattattttcttctccttggaacttgtaccttttatattttatttctcatattgttatttggggaaaatttcaggacagagaagaaatagatgtacatattcaatctactattgttccaaataaatttattatgcttttgtttgctaattttcctttgccacattcactggttatgtgaagaacatactctactacttattccttctaaagcaatgacactttaaatttgtcctttccagtcactgtttaagtgcaatgagtgtgttgttggcaacataaggcaacacctttatagaacacggcctatagatgaatgagaaactaaccttctttagaaattctagaaaaaatcaacttgcaaatatatctaatcactaaaagcatattctgtgcagatagtctttatttactagttatcaaagggttattttcatgcaaaataaaaa

SEQ ID NO: 595376 - DNA, 627 bp, Homo sapiens
tatttgaactattttgataggagtaactattttgatagttcaaatccagagtctttcaaggagtcctctttgtagaacactctgttcatacttctttcatatattaagtctgttactaatcctatatctgttttctatcttttaaaaaattattgaagtctttcaatttcagtagtcttatattattttcttctccttggaacttgtaccttttatattttatttctcatattgttatttggggaaaatttcaggacagagaagaaatagatgtacatattcaatctactattgttccaaataaatttattatgcttttgtttgctaattttcctttgccacattcactggttatgtgaagaacatactctactacttattccttctaaagcaatgacactttaaattygtcctttccagtcactgtttaagtgcaatgagtgtgttgttggcaacataaggcaacacctttatagaacacggcctatagatgaatgagaaactaaccttctttagaaattctagaaaaaatcaacttgcaaatatatctaatcactaaaagcatattctgtgcagatagtctttatttactagttatcaaagggttattttcatgcaaaataaaaa

SEQ ID NO: 595377 - DNA, 579 bp, Homo sapiens
aagtcatcagtcttgcatatgtctttttctgctacagatggtacaatggttgatttggtacaaggatcataccaaatatgtatgcaggaagccaaaaaatagaatcaaatcaaacatgattttatagttgttattattcctaaaaatatctgtgctcctgtaggcatatgtcttagataggagaatgctgttggaatttctggtctctgcattgaggggctgttggtcttttggaaagatgtgcttattgaatgggacaagcttgccccaagaggcattgctagggctgctcccagacctacttgtgattcaaggctgtgcttctcctctgcacgtgagacaggtgagttatgttacttgctaggtaagaaggaggggaggagataagttacctgaaatcatctgatgcattattatccccttcagtatggacataacgtcagaagaggatcactgaatcagataggrtaaagcattctttcgacctccctgctgggggcttgtctgtcctgttgtgctgtacttctgtgcaggtggaaacaagatgaactcaaaccacttgtctgattaaatgggcca

SEQ ID NO: 595378 - DNA, 626 bp, Homo sapiens
ttctccttgaccataatcatggtcaaagacttgaaatagttggaagtttcctcaggtggacaaaggtgctgagattagatgttctaaaacataacttcagtagtcattaaggccataatctgaattaagtttcctagtaaattactgaagaatgcttatttaagtcttctgatcactgtaccttgtatgtatcaagatatcgttttgtatcccatgaatatgtacaattattatttgtcaattaaataaaaaattttaaaacacacataaaaataaagttatctgaaagctattcatctaaaactgatccaattagacagatgtatcactgcaagctacagtgctcaaatttatgayattcatagtgaaataatttactgttacaatatatttaagctccctggaaccttaatgtcaaccatattgttaggcacacatagtaggttctcaataaatatttggtggaaaattgatgtattttaatgtatgtatatttgagtgagctatttctgtttttggtgtcctgtcctgatttatagtgaaatctctcagtctagattattttggcacattgccaaacataatgtaatgaaatagaaaattctgttcatactaatttatgacca

SEQ ID NO: 595379 - DNA, 537 bp, Homo sapiens
cactttgaagccatgtcagttgtgtattggaaggaattaaacatgcaaatgtaatgagtgcaatagattttaagagtctgttttttcggaggtgatgcagtaattgctgtggttgggactgtctcttgaagtggaaactagacaagtgggtttagacattaaaattcctaacagtggtttgctccctctgtagccttggatagagcacctgtcccttaacacattagagctcccataaaataaactgctttaccccagctaaaaggaacagtctctttgatggaacttgagctacagtcatggtgattttccactaggtacttcaaagaggacatcctctcctgaagaacagaagaacctgaaatgtttggagcctaaggtttctaggatcttcttttgccagtcttccccatttattgctctcctcccatcaaccacactgacagttgaagggttaaagagtggtgttgcatgagggtttgcackagggagtccattttctcctaagaattattatattacattatgttgccaaga

SEQ ID NO: 595380 - DNA, 546 bp, Homo sapiens
atcccaggttgacttcagactgctgggctggcagtgagaatttcaagctagtggttcttaacttgctgggctctgtgggcatgggacctgctgaggaagacctcttggctccctgacttcagccccctttccaggggagagaacagtcctgtctcagtgggattccaggcgccattgtgatatgaaaaaactcctgcagctagctcagtgtctgtcgaaacagccrcccagttttgtgcttcaaacccagggctctggtggtgtaggcacatgagggaatctcctgatctgcggattgcaaaattcatgggaaaagcatagtatctaggccttgtagcacagtctcccatggcttctgttggcttggggaatgaggaccccggcttcttgcatttcctggttgaggcaatgcctcaccctgcttctgctcaccctctgtgggctgctcccactgcccagccagtcccagtgagatgaactgggtacctcagttggaaatgccgcaatcacttgccttctgtgttggtctctctgggagctgcagac

SEQ ID NO: 595381 - DNA, 546 bp, Homo sapiens
atcccaggttgacttcagactgctgggctggcagtgagaatttcaagctagtggttcttaacttgctgggctctgtgggcatgggacctgctgaggaagacctcttggctccctgacttcagccccctttccaggggagagaacagtcctgtctcagtgggattccaggcgccattgtgatatgaaaaaactcctgcagctagctcagtgtctgtcgaaacagccgcccagttttgtgcttcaaacccagggctctggtggtgtaggcacatgagggaatctcctgatctgcggattgcaaaattcatgggaaaagcatagtatctaggccttgtagcacagtctcccatggcttctgttggcttggggaatgaggaccccggcttcttgcatttcctggttgaggcaatgcctcaccctgcttctgytcaccctctgtgggctgctcccactgcccagccagtcccagtgagatgaactgggtacctcagttggaaatgccgcaatcacttgccttctgtgttggtctctctgggagctgcagac

SEQ ID NO: 595382 - DNA, 577 bp, Homo sapiens
taattacttttttgttcttactttggatttaacttgtttttctaccttcataaattggacacttagaatactgtttttaaaccttttgtcttttctaatataagcatttaacattacaaattttcctctaagaactgtgttggctgcattccacaaattttgataggttgcatattcatttagtttaaaatattttctaacttcttttggcctattcttaaaactgtggtttattcctagaacaatgggttatttttaaatgtactgcttaatatcrtaactcatctacaaatagaggtcccaacaatgcctcccctctccgtgtgcaaatgctactcactcctcacatcaggagatgaagattatttctcttactcttgacttggcgcttaccttgttaattggcttgaccaacagaatgcaacagaaatgatgctgtgccagttccaggctgagtaggtctaatgtgtacttgagctgggtctggatttgttgtggctttacttaaattctagtcaccaatgccttcaaatatttccatggtgcaatcagaaattgttatttgaacaccagcaat

SEQ ID NO: 595383 - DNA, 558 bp, Homo sapiens
ggtgagattactctacatgaaagcaatatcttctgtcaagagctgagctgagttgaactgagttgccaggtgatgtagctgtcaattaagacaataatacaaaatgaaagtagcagtcaaaccttccatcagttactgccataatataagaaagaggccaaataggagaaagtgccagctccattgccgttcgttttttttgccatggatcagcagtggggaatggtcagatggagcagcatgggacacagatgtgaggaatcatcactgccaagggagtctcaaacaaaagactcttgctgttttatggaaccaaaggtctggaggagggagaaagggaagggtcaggaatggaaaagtactgactacttttcttctagtgaagacactataaaaagtgtcttcaaggtttccccgtcccatagataaggccgtctcrgcagaggcacctgaggaaagtttctgccaaactttctcagtaaggaggtctccaaatagaggcacctaggctaccaatgcagctaagactaagagcatagcctgccagaggggatgaga

SEQ ID NO: 595384 - DNA, 617 bp, Homo sapiens
ctaggctaggacaaagtgatcaattctgagacagcttatgaaattatctatgaggtagtggggaattcaacacggaaaacactagtattgttatgattctcaacaatagatgagaattaaacaaagcctagggtcatcttcattctatttatcacttaatgtattgtattaaatgtattgtatcactaatacaatatccatggatattaaatattacaaactcatgcacaccttcaggagatgtagttcttatgctgaaacaacttacattctacagacatgcttagaatgtctataagggttagggaaaagcctttagaggacgtagctctgctggttaatgtcaacaataataaaataaatgaatagcatggagatggagcctccattcaatgtagtcttacattaaaaaagtttagtttcttataaagactcaatagatattattttgctattacatatacacagcttttggacaatagaaccttgtttttttttgatagrtcaaaaagtaatagtatggagtggtttgtaataccagccttaaacagtgattctgggtaatgtatggaatacttgagacaatgaatcacattttagtaggatttgtaatgaaa

SEQ ID NO: 595385 - DNA, 615 bp, Homo sapiens
ttgatttagcttaagtctgtattaatgatagctttagaccaagatctgtttcatgccaatatccatattttaatcattatactatactaccagcattattcaatatggtgtttctatggctattttggtaactaatacaatgattgaaatagccactgcacatccaattttatgtattgatgttctgattttcacaaaaatcttttaccctttttagcccttatttatagccgatgctggggagaatggaggccacaggttaacataattttctttttcttccttctacatttatccagtaatttctatctgatttccctccctcagtattcctacacttacccattcactctaacctacccaatgcagcaggggtaggctttttaggaaaggtatctgattgtgtcattacttagaagcctttaatggatcactcataacttcagacacaaggtactgcatgatccactccctgctttattgcaattttatgtcttgctagttcacttcagactctgttccagccaccstggcagtttagtatctcctcaagctcggtgtgtgtgcattttcatattctttgaattacctctccacactgccccctgcctcctt

SEQ ID NO: 595386 - DNA, 611 bp, Homo sapiens
tgtagtttctttttatctggcgtccttgtcttattgggtgtgagggtaattctggcctcgtaaaatgactttggaagtattccttcgtcttcaatttttggaagaatgaaaataattggtgttcttctttaaaagtttggtagaattcagctgtgaagccaacagctgctggacttytctgatggatgattttttattactgatttaatctcttgactcattactgggctgttcaatttttttatttcttcataattaaatcttggtaggttgtctatgtccaggaatttatccatttctcctagcttatccaatttgttggcatataattgtgtttataacagtctcttgtgatcctttgtgtttctacagtataagttgtaatgtctcctttttcattctcattttatggatgtgagtctctctctttttttctcaatttatcagctataggtttgttgattttatttatctttttaaaaagcaactcatttcattagtttttttctcatgatttttctagtctctattttatttatttatgttctgatatttattctttgcctccttctactaattttgggctcagtttaacttaagggtcaacattc

SEQ ID NO: 595387 - DNA, 540 bp, Homo sapiens
acttctctaaaaaaataaagtctgttaacttttcttttctgtttcaatgttaattaaaatggcaaacaaaaattttggagaaaatagggttgagagaggatatagaaaataaatcattaacacctattaagatctgcttattaaaaagtgctctgggataataatctaggtttcaaaagttgaataacaaattttttgaataggccattggttttgtttagtgatcccattcttaaaataggtactaaataagcayagaaataatttcagaatgaaaaatttattaacactcttaaatataatatcatttagataatacagataatgcatgagacaattcaagatccaaaaatgtaaaacctatatggacatcaagcactcccctactagaattattgttaaaagatgcacattacctaaagcatgattctccttgctagtttgcagcattaatgagttgtttggttgagcagcaccctccgcttctgaattttgaaaaagacatagggggtagagagagaaatatgcattaatagatct

SEQ ID NO: 595388 - DNA, 583 bp, Homo sapiens
ttacctaacatctaataaataatttgtaccaattgctctcaaattctttcaaaatactcaataagaaggaacactttcaaactcattttatgaggcaagcattaccttgatatcaaaaccagaacaagacaccacaagaaaacaaaactataagccaatatccttgataaagatagatgcaaaaatcttcaataaaatactaacaaactggattcaacagcacattaaaagaatcatataccataaccatttgggatttaaccctgtggtgcaaggatggttcaacatacaaaaaccaatgtaatataccaaattaacagtatgaagggtaaaaaaaaatctcatgattatctcaatggaggcaaacaaaattatttgatgaaattccatgctctttcacaataaaaagctmtcaagattttgtcaccaccaggcctgccttaaaagagctcctgaaggaagcactaaacatggaaagaacaaccagtaccagccactgtaaaaacaggccaaattgtaaagaccatcaaggctaggaagaaactgcatcaactaacgagcaaaataaccagctaacatcata

SEQ ID NO: 595389 - DNA, 506 bp, Homo sapiens
atcattttgaaaatgacaggcctagcctatatatttagaatgtgaatacaccttttgttcttttatatctttatttttkgggagaagagagagtctttatttttgtgatcgtctacaaaaaggcaaaagtaggggatggagataagattataaatgaaggaaggatgatttgttccctatgggtcagggtgtttttttttaataaggtggtattaagagttgaagattattccaatgagtcaaaaggaaagacagccaggcatagtgccttttgcctataatcccagcattttgggaggccgaagtcagaggattacttgaggccaggagttagaaaccagcctgggcaacagccagactccattcctacaaaataaaaaaataaaaaaataagccaggcatggtggcatgcgcctgtaatcccagctgcttgggaggctgagatgggaggattgcttgagcccaggagttagaggctgcagtgagccatggttgtgccactacag

SEQ ID NO: 595390 - DNA, 464 bp, Homo sapiens
gcatttctctaatggtcagtgatgttaagcttttttttaaatatgattgttggccatatgtatgycttcttttaaaagtatctgttcatgttctttgcctactctttaatggggttgtttggtttttttctttcttataaatttgtttcaggtgctgaatataagacctttgtcagatgcacagtttgcaaaaatgttctctcattctgtaggttgtctttttattctgttgatagtttcttttgctgtgcagaggctgtttattttaattagatcctgatatgatttgactgtgcccccacccaaatctcatcatgaattgtagtgcccataatccctacgtgttgtgggagtgacctggtgcaaggtaattggatcatgggggcagttacctccatgctgctgttcttgtgagagtaagtgacttctcacaggatctgatggttttataagggacttttcct

SEQ ID NO: 595391 - DNA, 587 bp, Homo sapiens
atagtttgctgttgtatctcttgacctccctgcagcctgtggtcaccagcatcagattgtaaagtctcatttatttatccaaatatttccttaggaatgacttcagcctctatctcaatcatctttggttagagtgtgatcatttgtgctgctaacaatagcactgcttagcttccttcagactgaacacttgcattgtatcatctacaaatgcattttaattcagtcatacctccaaagtggttttgttccagaacattacaatggggactascgttgtaaactttagacacatgaggccaagcaactgtggtccatcaaagcttctgtggtgactgcagtccatctgacgcagggtaggagagccccgacattgggtgggccagtggtgttaaatagcaacttttattgaagcagcagtgcacagccacagcagaggtgctgctccttgtaaagctgggttacgctacaggcagtgcgcccagagtagcagctcagaggcagttctgcagtcatatttatgcccacttttaattacatgcagattaaggggcagattttgcagaggtttctagaaaaaggatgat

SEQ ID NO: 595392 - DNA, 594 bp, Homo sapiens
gggccgggcgcggtggctcacgcctgtaatcccagcacttcgggaggcggaggcaggtggatcacctgaggtcagaagtttaagaccagcctggtcaacagggcgaaaccccctctctattaaaaatacaaaaattagccgggcgtggtggcgtgtgcttgtaatcccagctactcggtaagctgaggcaggagaatactttgaacgcaggaggtggaggttgcagtgagccgagatcgtgccattgcactcccgcctgggcaacaaaagtgaaactccgtctcaaaaaaagaactaaaaagtagaagaaaggatactacaagctgggaacgttaggggtaagagaagatagggagaaatttgttgaaggacacaaaattatagttacataggaggaataagttgtactgttctataccactgtaggatgactatagatattgaatgttcayaacacaaagaaatgatacatgtttgagctgatggatacacgaatgaccctgatgagatcactgtatgttgtatatatcagaacttcactgtgccatgtgaatatatacaattattatatgtaaattaaaaattaaatttaaa

SEQ ID NO: 595393 - DNA, 569 bp, Homo sapiens
gtgtgatttccttctttttcttcctgcaaaaatgatcaccaccaaaactgtacatgtaaatttcctgccacttagtcattagaatttgtttgcgcttcgttttagtatctgaaatataatccatagtgtcacaaaatatgtcagatttcaggctccctcctccttgtttactattttarttataaaataaaatttgggaaattggcttatatatatggtctaatgaacaatttggactgtgagtagactttttgacttttaagtttaccttgcactttatctgttagaagttctggaatatgctgtgagaatcttcttccagggttgagtcccaaagttccttgatagatgcaggttctcaatgaagccagcattaagctacttccagggaactgcctggtccacctcccaagctgcttggttctaacgtggtcaaggccatgtgtgccacgacctgtacctgcacaatgatttctcacacctgcctctctgatcacctaagtcagctctactttcatatctcacacaagtgtatttaactcaaagaacataagtttgacatctggctg

SEQ ID NO: 595394 - DNA, 636 bp, Homo sapiens
tgtatgaaggaaagaccatgccatttttgcaaagtcttcttattttggataagagctgcctgctttttacagggtcctggtagaaattgttcagcttaccatcagagtcgtgtggtcatgcatcttgaggcacacatcagaaattacgtgatttccatcccaatgaacaagtgagcccacggacacttcattatgaaggggaagtagctgtataaagtagggatcagacaggtctagtagatataagttgtttgagcaaaatattcatgtttaccaatgtgccttctcttgcatgtggccccttcatggccctatggaaagagaccagtgatcatgtgtttctccagagaaaaagaactaataggagatagataattggacagatgaatacatgaatagctagctagatgaayggatggatgggtgacagatggatgaatagatggatagatggatggatgaatgatagatgaatgaatgaatggatggaaaaatggatgaataaataagccaacagatagatgatgaatagatagatagatagcaagatagataagatgtattatactaagtgtcccacatggttatagaggcttagaagtcccacaacctgctgactgcaaactgagaaccaga

SEQ ID NO: 595395 - DNA, 423 bp, Homo sapiens
tttttgtttgttcagaatttaaaaactaggctgggcactgtggctcacgcttgtaatcccagcactttgggaggccgaggtgggtggatcacctgaggtcaggagttcgagaccagcctggccaacatggagaaaccccatctctactaaaaaaaawaataataataataataattagccaggcatggtggcacatgcctgtaatcccagctactcgggaggctgaggcaggagaattgcttcaacccgggaagcggaggttgcagtgagccgagattacaccactgcactccagcctgggtgacagagtgagaccctgtcccctaaaaaaagaaaaaaaattaaaatctaaataactcctaaaacaagtactggtacacttattaattcaaatttctgttcaaaatggtgaattaagaattc

SEQ ID NO: 595396 - DNA, 606 bp, Homo sapiens
ctaagggcttttggaaggattaaagacaacgatgtccccaaactgcccaactcctaatggttcaaagtgaccaccccatgatcctagcttcttagaggccaaggggtccttctcaattacatacacacacacacacacacacacacacacacwctctctctctttctctctctctctctctctctctctctctctcaatcttttattgttcttacggaaaaaaatattagagacaaagaaatgcatgtaataatcaaagcatcttaactatcctgaaagaaaaaccagtccatataaacagatctagagaagacctatatattggacttacgtgacaaggagttgaaaataagtgtcataaatacagttatgcaccacatatgacatttcagttaatgtccaaccacataaacagccacagtcccataggtccacataagtaaccatgttctctctagtagagctgaaaaattcctatcttctgttgaagtcttggtgatcctgacctgtgtgggcctaggctaatgtgtgtgtttctgtcttagttttcaccaaaaaaattttaaaagtattgaaaggaaaaaaaatttaatttacaaacagaaa

SEQ ID NO: 595397 - DNA, 471 bp, Homo sapiens
ggaaagagagagaagaagaagggagaggaaggaagagggagagagagggggagggaggcagagagasagagaggacagaggaagaggggtggagagacagagatggaaggagggagagagagagaaagagagagagacagaaggagcaacagaaaggaagagggagacaagggagagagaggaggaggaaagggaaagagagggagagacagaaagggagagagagggagggagagaaaatgagaaaagagggggaagagagaggggagaaagaaaaaggaagggagggagggagagagacagggagaaagggagaaacacagagagagagagagacagagagatagcaagagaggaagaggggacagagagggagagacagggagagagagaagaagggaatcgggagagagtgagggagagaaacagaaggagagagggaatgagagaaatagaaggagagagggaagg

SEQ ID NO: 595398 - DNA, 471 bp, Homo sapiens
ggaaagagagagaagaagaagggagaggaaggaagagggagagagagggggagggaggcagagagagagagaggacagaggaasaggggtggagagacagagatggaaggagggagagagagagaaagagagagagacagaaggagcaacagaaaggaagagggagacaagggagagagaggaggaggaaagggaaagagagggagagacagaaagggagagagagggagggagagaaaatgagaaaagagggggaagagagaggggagaaagaaaaaggaagggagggagggagagagacagggagaaagggagaaacacagagagagagagagacagagagatagcaagagaggaagaggggacagagagggagagacagggagagagagaagaagggaatcgggagagagtgagggagagaaacagaaggagagagggaatgagagaaatagaaggagagagggaagg

SEQ ID NO: 595399 - DNA, 559 bp, Homo sapiens
aattccaggaagcaaataactctataattcagataagaagtgtgagaggaaaataaaatctcgggaccccaaactcactatgtcaaaaaaaaaaaaaaagttaagcttggaaactgagtcacacacacacaaaacctctcttttcttttgttcctaaacagatatctccccaggtggcctccttcactctcaccatgtaacttagattatcttcacagctatgggacaataggagactagaaatcgactctctggccacgctgagatgaatgtatatttgacttctactctatgtttacattatcttatgtaaagtgcagatttactgagcacaggagaaatgtataactgattgttcctctgcacyctcctttcatatgcaacatgaggactcagtgagtgctaatcaaaacctcaaaataatgcaaccacttgtctcaccttcccttatttttgttctttcttcctttcccttctgcctgcttcttcccctttaaatatcaaagccctcaaaacactctttggaaaaagtgggagccataagtcttactgtgacctg

SEQ ID NO: 595400 - DNA, 559 bp, Homo sapiens
aattccaggaagcaaataactctataattcagataagaagtgtgagaggaaaataaaatctcgggaccccaaactcactatgtcaaaaaaaaaaaaaaagttaagcttggaaactgagtcacacacacacaaaacctctcttttcttttgttcctaaacagatatctccccaggtggcctccttcactctcaccatgtaacttagattatcttcacagctatgggacaataggagactagaaatcgactctctggccacgctgagatgaatgtatatttgacttctactctatgtttacattatcttatgtaaagtgcagatttactgagcacaggagaaatgtataactgattgttcctctgcactctcctttcatatgcaacatgaggactcagtgagtgctaatcaaaacctcaaaataatgcaaccacttgtctcaccttcccttatttttgttctttcttcytttcccttctgcctgcttcttcccctttaaatatcaaagccctcaaaacactctttggaaaaagtgggagccataagtcttactgtgacctg

SEQ ID NO: 595401 - DNA, 624 bp, Homo sapiens
agttagctcactgcaaccgtgccattatgagcactgcatgtaccactcttcagcataaacatcattccataaaattcccagcaagcctttgtttcctgacagtcagcttctctctggctggtctgcccatttcacccttgcaatgcattttcacactttctctaataaatctgcctttctttacctgccattatcttggtaaattactttactacccttgcaataccagcccccgagggctggtgctcatccatgacaaaatatagaaaatctaacatgatgcatagaattatatggtgacagagactgaatacatcaaacatgtcaattaatgtgcaaggaacttatctcatttactgagagacagaaaaaaaaaatcaatgggcccatacagaagcaccccaagataggccatccacaagaaatatacctaaaacaaggttattyagaaaggctaaaaaaaagatgaagaaataaaaaaaattgttcttccaaaaagacacatgcacttgtattttcatcacggcgtgattcaccatagcaaagacatggactcaacctagatgcccaccaacagtggattggatttaaaaaaaacaaaaaagtggtacatatacaccatgg

SEQ ID NO: 595402 - DNA, 548 bp, Homo sapiens
aaaactctatatatgaaagttttgcacygtgacatttgtaatgccaacaaaaatcttacttcggctctatgcagcctacttactactaagatgacaaatagtaatttgttcttgcatttttaataccagatgttttgctgtttcttcaaataaaaatatgcaatccattgtaatgtttgcaaacagtgaaacagcttgcttatggcctgaaagcatgaaagtgttaaaatggtatattagctcttttctcaaacatggcctatatcctagaattttatatgcctgtagttctctgtgcaagcaaactagaaaccagagctaggggttatctcctgtgcaattaatgagtattgtttcagatggcagctctccttaaaaacaggattctatgtccagaaaataggatttgaagctctcttggtgaaatgtaaaattaatcacactccatcatttatatgaatgccatgaggctattctcttttttcttctgggatgaggcaaaagcatacctaataagttcaaaacattgtttttctaatatgtggttt

SEQ ID NO: 595403 - DNA, 608 bp, Homo sapiens
taaatatctttttgcctataacctatgcatatcctcttgtattctttaaatcatctctgattacttataatacctaatacagtgtaaatgctatgtaaatagccatttcactgtattttctggatttttattgttatattgttatgttttaactttttaaattttttcccataatgttttccatcagcagttggcagaatttttagatatgggacgcatggatagagaaggctgattttactcccattttataaaaagtagaaattatagtcaatgtttaaactcacacaatttctaaactactccacgattcttgattcaagaataaaggggactgaaaactgaaaatatttacatcaaatagctawagcagaggaggtgaaattgcatgcatttgaactccgatttttctttttagggattttattggttgttctgtcttgctggtctcttgagaacaccacaaaatgaacattaagtatagcctatggaatgtacgtgtgagaagcatataaacgtccaatgtcatctctagagagataaggacttttctctggctcaataatttgtgaaagagtaaaagtaaaaatgatagctttctaaaaact

SEQ ID NO: 595404 - DNA, 608 bp, Homo sapiens
taaatatctttttgcctataacctatgcatatcctcttgtattctttaaatcatctctgattacttataatacctaatacagtgtaaatgctatgtaaatagccatttcactgtattttctggatttttattgttatattgttatgttttaactttttaaattttttcccataatgttttccatcagcagttggcagaatttttagatatgggacgcatggatagagaaggctgattttactcccattttataaaaagtagaaattatagtcaatgtttaaactcacacaatttctaaactactccacgattcttgattcaagaataaaggggactgaaaactgaaaatatttacatcaaatagctaaagcagaggaggtgaaattgcatgcatttgaactccgatttttctttttagggattttattggttgttctgtcttgctggtctcttgagaacaccacaaaatgaacattaagtatagcctatggaatgtacrtgtgagaagcatataaacgtccaatgtcatctctagagagataaggacttttctctggctcaataatttgtgaaagagtaaaagtaaaaatgatagctttctaaaaact

SEQ ID NO: 595405 - DNA, 590 bp, Homo sapiens
aaatagaaaaatatatgtgggttttatatatatatrtaattataaatgtgggagataaagcaccatgcatataattctattatacatacatacatacatacatacatatatatatatatatatatatatatatatatataaaattgaataccatgcagccatgaaaaagaaggaaattatgccttttgtattactagtaacatgggtggaactggaggccattattttaactgaaataattcagaaagagaaaatcatgttctcacttataaatggagctggacaatgtgtacacgtgggcataaaggtgaaaatagtagacactggggattccaaaaggaggtgggggaaaggagtgacagatgaaaaatcacatttagagcacaatgttcactatttggctgataagtacactagaagcccaaactctaccagtatgcaatatatccctataacaatcctgcccatgaactcctcgcatctctaagcattaaaaaatagtctaatatggatcatagacttaaatataaagcataaaactgtaaaaaactttagaagaaaaataacaacagcaagaagagaaattcttc

SEQ ID NO: 595406 - DNA, 590 bp, Homo sapiens
aaatagaaaaatatatgtgggttttatatatatatataattataaatgtgggagataaagcaccatgcatataattctattatacatacatacatacatacatayatatatatatatatatatatatatatatatatataaaattgaataccatgcagccatgaaaaagaaggaaattatgccttttgtattactagtaacatgggtggaactggaggccattattttaactgaaataattcagaaagagaaaatcatgttctcacttataaatggagctggacaatgtgtacacgtgggcataaaggtgaaaatagtagacactggggattccaaaaggaggtgggggaaaggagtgacagatgaaaaatcacatttagagcacaatgttcactatttggctgataagtacactagaagcccaaactctaccagtatgcaatatatccctataacaatcctgcccatgaactcctcgcatctctaagcattaaaaaatagtctaatatggatcatagacttaaatataaagcataaaactgtaaaaaactttagaagaaaaataacaacagcaagaagagaaattcttc

SEQ ID NO: 595407 - DNA, 667 bp, Homo sapiens
cccaaactctaccagtatgcaatatatccctataacaatcctgcccatgaactcctcgcatctctaagcattaaaaaatagtctaatatggatcatagacttaaatataaagcataaaactgtaaaaaactttagaagaaaaataacaacagcaagaagagaaattcttcagtgcctaaggccaggcaaggagtttttagagatgacacaaaagacatgatacataaaaggaaaaaaaaatggkgaatttgacttcatcaaagttaaaaacttttggtctacaaacaaccttattaacaagatgcaaaggccaattatagattggcagacacgtatgcaaactaactaatagttaaaataaaaaaggatcctccaaactcagcagtaaaaacacactcgaaatccattcagaaaattggcaaaggagataaaaggacatttcactgaagagaatgcacaaatgacaaataagtatgtgaaaagatgttcatagactttcatcactaggaacatgctatttagaaacactatctgccagccatggtaactcatgctcatagtccccacactttgggaagctgaggcaggaggattgcttgagaccaggagtttgagaccagtgtggacaacatagcaagactccatatctacaaaatattttttaaaa

SEQ ID NO: 595408 - DNA, 564 bp, Homo sapiens
taaaacagaatgagaggtcagatatatgaacttttccaaatgacatatgggaagtccttggtttttttaacctaccttggtgatggaaaattagagttgtctccatcaacaatgacttttaattaattaggtgaattctcagggtgaccagctaatgacaaggataaaatctgtcatgctgggacccattaagaaggggcatggtgccaggcattcattcttcattcagcagttttccacagttgctgagcatttgacttgtctgaagtggtacttaaacccaaacaagtctgagcccaggtccagacagacgtggttatgcaggcaacaactggcttccccttctagctgatattcttacatctttgatcaatacttatctggaggccaggctgaggaccacctggggggaaggmaggcaaaatcgaactcttgtatttgttgtctcctccagctctgtgaccattcagagttagcttttatcttgtatattcctagagcaaaacaaagttctccatgtaaaccagagttaccttgtgtaggttacagctggtagcctgttag

SEQ ID NO: 595409 - DNA, 608 bp, Homo sapiens
tgttgtctcctccagctctgtgaccattcagagttagcttttatcttgtatattcctagagcaaaacaaagttctccatgtaaaccagagttaccttgtgtaggttacagctggtagcctgttagtgttcttcagagaaacagaagamaatggattgagaaaggtaggcagatagatagatagatagatagatagatagatagatagatagatagatgatagatagatagatagatgatggatagtggatgaatgatgcatctgtagatagatagtagataaatgatgaacaaatagatagatatatagataagtagaaaatggatagatgatggatggttatatagatagattgagtcattgatttatagatatttatagaaactgacttgcataattatgaaggttgaaaattctgctgtctacaagctggagaaccaagaaagccactgtgtcctgagaaccaggatacgaagctgatgatgtacgtccatatctgagtccaaaagtctgaacaccaggattgctgatgtcggagggcaggagatgaatgtccaactctaccagagagagcgaattcactcttcctctccctttttgttctatcc

SEQ ID NO: 595410 - DNA, 608 bp, Homo sapiens
tgttgtctcctccagctctgtgaccattcagagttagcttttatcttgtatattcctagagcaaaacaaagttctccatgtaaaccagagttaccttgtgtaggttacagctggtagcctgttagtgttcttcagagaaacagaagacaatggattgagaaaggtaggcagatagatagatagatagatagatagatagatagatagatagatagatgatagatagatagatagatgatggatagtggatgaatgatgcatctgtagatagatagtagataaatgatgaacaaatagatagatayatagataagtagaaaatggatagatgatggatggttatatagatagattgagtcattgatttatagatatttatagaaactgacttgcataattatgaaggttgaaaattctgctgtctacaagctggagaaccaagaaagccactgtgtcctgagaaccaggatacgaagctgatgatgtacgtccatatctgagtccaaaagtctgaacaccaggattgctgatgtcggagggcaggagatgaatgtccaactctaccagagagagcgaattcactcttcctctccctttttgttctatcc

SEQ ID NO: 595411 - DNA, 608 bp, Homo sapiens
tgttgtctcctccagctctgtgaccattcagagttagcttttatcttgtatattcctagagcaaaacaaagttctccatgtaaaccagagttaccttgtgtaggttacagctggtagcctgttagtgttcttcagagaaacagaagacaatggattgagaaaggtaggcagatagatagatagatagatagatagatagatagatagatagatagatgatagatagatagatagatgatggatagtggatgaatgatgcatctgtagatagatagtagataaatgatgaacaaatagatagatatatagataagtagaaaatggatagatgatggatggwtatatagatagattgagtcattgatttatagatatttatagaaactgacttgcataattatgaaggttgaaaattctgctgtctacaagctggagaaccaagaaagccactgtgtcctgagaaccaggatacgaagctgatgatgtacgtccatatctgagtccaaaagtctgaacaccaggattgctgatgtcggagggcaggagatgaatgtccaactctaccagagagagcgaattcactcttcctctccctttttgttctatcc

SEQ ID NO: 595412 - DNA, 454 bp, Homo sapiens
aaccccgtgaggacagtttcagatttacagtttcgcattgtagcaaatctcatttagcagccaattatgtgacacagaacaatctatcaccccacccactatctcaacaggcagacagaattcctttgtcctggaatcttaaggcaaaaaaaaaaaawatacaaatatatgtatatatataaatgcatatgtacatctatacatacaaatgtaaaataaaggcaaaaccagggcttgccccatggagcttatagtctggtttccctaccctctaagtgtgaggaatgactgtgccttatcagcatccatacctgtaggacctcacctacttcctattccatactgggaactttacaaggtttcttacatacatcttgtcatttagatattgaagaaccttggaaagaaatgcattttccccagactacagagaaagaccacgaggcagagcttc

SEQ ID NO: 595413 - DNA, 546 bp, Homo sapiens
gtattccaatcacattgcatttgaattctagtttctaaacttatgatgcgatcccccattcaagttactgtctgacagagatcattaatttgattaactatcttttgatctgtttggacctgagagttccataatttcatataattattttgccatttatcaacaaattaaacagtttgcgcagatgagtgtaaagccgcaccagctactgcagcagtagtggtaactgcaatgaggccaattacagcaaatataagagcaattataaatctttttgaatgagataagagttttttaaggatctcagttataatatgaatggatggtgatgcctcccatggtctatttagagacacagggatccaaacttctgtggctctaattaacaagatagtttkatttttatcaaaggttgagttaatgcaagtaaacaagtgacattcgtggcaggtgataaaacaggtattcatgtcaagagtaatatttcctattgctaacataaaaggtggcaggacacaactttgaatccaaaggtcctgttagaaa

SEQ ID NO: 595414 - DNA, 560 bp, Homo sapiens
catcacttgtatcaggagttctggctcttcccagagtcttctcttcctggtgtggctcatgacagatcatcagatgtttggtgggcacacacacaggcacctgattgtcacctggagagacacaagcaaatcytcctccccatgtaattatttttcctttttcccaactttttgtatgtgcatccccccaccatatatcttgtccagcttttttattttccttttgtcctattaagtgttgttcagctgctgtcatgggttgatctttttgtaaatttaaaaaatgtaatgttaataaagctaggtgtaattgtatatgtggggttttatagtcctggtctccctctctctgtttttgtaactgagtttttaaggtatgattagctcattcaactattgcttgtccttgtgagttttatggaatacctgtagtatgagtaatattccactgctgaaaaaatgcagccatggctttgctgcaataccctgcaccattatcagttttgattttttctgggattcccataactgcaaagcaagagaaaagatgttttttaaca

SEQ ID NO: 595415 - DNA, 586 bp, Homo sapiens
acatgttagcctgctggaggatgagatcccactggggaggaaaaccaaggtgccccagctgacacccagaagcagagccacttagtcaaccagcagctgaccacacacgcctgaaggagcccagctgagaccagaagaatggcccagttgagtccagcctaaatgactgaccatcccaatcatgagctaataaggtttagggtggtttttaatgcagcaatagctaactgatacatacacctgcagtcaggttgccaggattcaaatgacaggttggtcactacttgttgttacctggcaaacagaaggcactgtataaggtattgatttgcttttccctttatttaaagtggggcctcttgttggatagggataaattatacagaaatgcatgttgacatgcttggtgcttaaactcacacagtscccacaccataggaggaaacagcccgccatagcctaaccatcagggccaagggcaaattgcaaaataaaaaaaatttgcttttattccctccacatccaaactttggaggtcaaggctgtagacagatctgaagtcaggggtttcctcctgaagcctgac

SEQ ID NO: 595416 - DNA, 557 bp, Homo sapiens
cagtgtttgcccgacagactgagatgtcaggggcagcatggaaaagcagagaggtgggagggcaggtttcaggtattctcagtcctctgtggtttggggaatgtagacctaagtgcaggagccggcaggagctggggttgcctttaggctggtgcctgagaacacsggcttaagaagcttgattttggctgggtgtggtggctcatgcctgtgatcccagcactttgggaggctgaggcaggcggatcacctgagcttaggaccagcctggccaacatggccccgtctctactaaaaatacaaaaattagctgggcgtggtggcacatgcctgtcccacctacttgggaggctgagacaggagactctcttgaacccaggaggcggaggtttcagtgagccaagatcacaccactacactccggcctaggcaacagagcaagactccatctcaaaaaaaaaaagcagcttggttttgtgagcagtgtgcttcttagaagggttccaaggggcattcttgaaataggagatgggaaattgaggttgggtgactagata

SEQ ID NO: 595417 - DNA, 557 bp, Homo sapiens
cagtgtttgcccgacagactgagatgtcaggggcagcatggaaaagcagagaggtgggagggcaggtttcaggtattctcagtcctctgtggtttggggaatgtagacctaagtgcaggagccggcaggagctggggttgcctttaggctggtgcctgagaacacgggcttaagaagcttgattttggctgggtgtggtggctcatgcctgtgatcccagcactttgggaggctgaggcaggcggatcacctgagcttaggaccagcctggccaacatggccccgtctctactaaaaatacaaaaattagctgggcgtggtggcacatgcctgtcccacctacttgggaggctgagacaggagactctcttgaacccaggaggcggaggtttcagtgagccaagatcacaccactacactccrgcctaggcaacagagcaagactccatctcaaaaaaaaaaagcagcttggttttgtgagcagtgtgcttcttagaagggttccaaggggcattcttgaaataggagatgggaaattgaggttgggtgactagata

SEQ ID NO: 595418 - DNA, 528 bp, Homo sapiens
agataagaatcttgtccttcccagccaggcacggtggctcacacctgtaatctcagcactttgggaggctgaggcgggcagatcacctgaggtcagaagttcgagaccagcctgaccaacatggagaaaacacatctctactaaaatacaaaaaaaattagctggacgtggtggcacctgcctgtaatccctgctactctggaggctgaggcaggagaatcgcttgracctgggaggcagagattgtgatgagctgagattgcgccattgcacactccagcgtgggtaccaagagtgaaactttgtctcaaaaaaaaaaaaaaaaaaaaaaaaaaaaaagaatcttttccatcccaaagtacatcagcagtttccaggggctacagaaagggtggatggggagtgactaaaataggcatggggtttctttgtagggggagtaaatattctggaattagatagtggtaatggttacataacttgtgaatattctaaaaaaagattctcacttgtgaatattctaaaaaa

SEQ ID NO: 595419 - DNA, 528 bp, Homo sapiens
agataagaatcttgtccttcccagccaggcacggtggctcacacctgtaatctcagcactttgggaggctgaggcgggcagatcacctgaggtcagaagttcgagaccagcctgaccaacatggagaaaacacatctctactaaaatacaaaaaaaattagctggacgtggtggcacctgcctgtaatccctgctactctggaggctgaggcaggagaatcgcttgaacctgggaggcagagattgtgatgagctgagattgcgccattgcacactccagcgtgggtaccaagagtgaaactttgtctcaaaaaaaaaaaaaraaaaaaaaaaaaaaaagaatcttttccatcccaaagtacatcagcagtttccaggggctacagaaagggtggatggggagtgactaaaataggcatggggtttctttgtagggggagtaaatattctggaattagatagtggtaatggttacataacttgtgaatattctaaaaaaagattctcacttgtgaatattctaaaaaa

SEQ ID NO: 595420 - DNA, 584 bp, Homo sapiens
gatgttgaggggcttgattccaaacagcgcttgggtcccttcctctctcccccaccacagtgcatgttataggaaaaaggaaccaggccttataggtgttgaattattrttcactccattcctcttcatttttttttttttgctttgtttatgacttagattaattctgaatctcttgtacctggactcctttgaaaattccaataaagcaaaaatgattaaaattgaattgcccatagaagctgagatgccttttttcccctggagctaggctcagcatctaaataagggaggaggcccacaccctgcatatcagcctttcaaacaaggcaccgtgggagtacctgagtttggatccataaatacaaaacaggaaatcttaaatggaacttttctctatgtttttttaaagatctaatatgagattatagctttgatcataacttaatttttcatttccatttgaactctaattttacttaaatttccttctgacaaatctccaaaggaatatttaagtgacacagcataatgctggcagattattcatatatcagcccttaggctaccaaggaaggcttcat

SEQ ID NO: 595421 - DNA, 572 bp, Homo sapiens
tcctcctcagcatcctttaagcttcttaggcgaccctactgtccagcgtgacatcatggagggagcccaagcaggtgcgtttcacagatggggtycaaatcccaaatctgcccttgctaattatgtcaacaagccaagccccatagctggtccccatctccccatctttaaagcagcacctgcctcacagggatgtgtgaggtgtctgccacagaatcagctcaacctttgttctattcactgtttggagattcctaaagagaagcaggtacccagggttttccgagatgcgtgtagagcacaagtgcttggcataaaggaatgggttccaaaaagcagaatgtaaaaaattcattagggagagatttttagatagagaatggagtaagtatcatcacaaagagaaaaatcttttctacaaacatagaaggacgtccctattgccagatcccttgcatcgggaaccaagaaagtaagttcctcttggctgaggctgtacttgccattggcagcctgtaattggaaccggaatatttcttaggtattgccaagtcgattggcaactggcttgt

SEQ ID NO: 595422 - DNA, 584 bp, Homo sapiens
gatgttgaggggcttgattccaaacagcgcttgggtcccttcctctctcccccaccacagtgcatgttataggaaaaaggaaccaggccttataggtgttgaattattgttcactccattcctcttcatttttttttttttgctttgtttatgacttagattaattctgaatctcttgtacctggactcctttgaaaattccaataaagcaaaaatgattaaaattgaattgcccatagaagctgagatgccttttttcccctggagctaggctcagcatctaaataagggaggaggcccacaccctgcatatcagcctttcaaacaaggcaccgtgggagtacctgagtttggatccataaatacaaaacaggaaatcttaaatggaacttttctctatgtttttttaaagatstaatatgagattatagctttgatcataacttaatttttcatttccatttgaactctaattttacttaaatttccttctgacaaatctccaaaggaatatttaagtgacacagcataatgctggcagattattcatatatcagcccttaggctaccaaggaaggcttcat

SEQ ID NO: 595423 - DNA, 572 bp, Homo sapiens
acataatcaagagatgttaaatgtgagaattggcaagtcccatagagatcacgcacttcagcatccccattttatgagtgagaaagcggaggaccagagaggaaaccattaaccacagttccctgttaaatgctaaactatgactcccygaaaattcatatgaaaggcaaccaaagcaaaaatggacaaatgggatcacatcaagttaaaaagcttctgcacagcagaggaaatgatcggcaaagaagctcaaacgactcaataggaaaagtctaacaatctgatcaaaaaaataggcaaaagatttgaatagacatatctcaaaagcagacctaaaaatgacaaacaggcatatgaaaagatgctcaacatccctaaccatcagagaatgcaaatccagactacagtgagatgccatcgcaccccagttaaaatcacttttatccaaaagacaggcatgaacaaatgctggcaaaaatgtggagaaaaggaactcgtgtacactgttggtgggaatgtaaattagaaaaccactgaggagaacagtttggaggctcctcagaaaactaaaa

SEQ ID NO: 595424 - DNA, 596 bp, Homo sapiens
tattacacattgcatgcctgtaccaaaacatctcatgtaccccatacatatgtacacctctatgtacccacaacattttaatttaaaaataacttttaaaaaattttaaatgcatgtgttaaagtcttaacccctaatacctcagagtgtgatttatttgaaaatatgcaggcataaaaagattacagtaggtcatactggaacagaatgggccctaatcccataaaactatgtccttataaaaaggggaagcttggacacagacactcacacagggagaaggcctagctaatgtgaaggyagaggtcagggtgatgcatctataacccaaggaacggcaagccaaaggttgccagcaaaccaccaggagcaaggagaaagacatggaacagatgatttcccacagccctccagtggaagccatactgccgacatcttggtctcggagtctaagcctcctgaacaatgtgaaaataaagttgtgtcatttaagccacccagtctgaggtactttgctacagcagctctaggaaactaataaagtcccccagcaatttttaatgtattccaaactcactattagtattcctaatcgt

SEQ ID NO: 595425 - DNA, 596 bp, Homo sapiens
tattacacattgcatgcctgtaccaaaacatctcatgtaccccatacatatgtacacctctatgtacccacaacattttaatttaaaaataacttttaaaaaattttaaatgcatgtgttaaagtcttaacccctaatacctcagagtgtgatttatttgaaaatatgcaggcataaaaagattacagtaggtcatactggaacagaatgggccctaatcccataaaactatgtccttataaaaaggggaagcttggacacagacactcacacagggagaaggcctagctaatgtgaaggtagaggtcagggtgatgcatctataacccaaggaacggcaagccaaaggttgccagcaaaccaccaggagcaaggagaaagacatggaacagatgatttcccacagccctccagtggaasccatactgccgacatcttggtctcggagtctaagcctcctgaacaatgtgaaaataaagttgtgtcatttaagccacccagtctgaggtactttgctacagcagctctaggaaactaataaagtcccccagcaatttttaatgtattccaaactcactattagtattcctaatcgt

SEQ ID NO: 595426 - DNA, 559 bp, Homo sapiens
ggggattgcctgaggccaggaggcagaggctccagtgaactatgatcacaccactacactccagcctgggtgatagattctggctgggtgacaaagagatcctatctaaagaaaaaactttaaagtaaaactttcaaaatcttttccarccttaaaattggctagtctatgcatctttccttaataataaatgtatattgttcagtcataaaaaacatgaggaactggaagataaagctggaaatctgtcaagaaggttaccttcaggatctctggtcttcagacggccctagtttctgattctctctccagatcttcttcattttctctctgcaaaccagctgtcctgcttctccttggcaagaaaggtcaactcacagttcccaaggtcccacagacaggcaacagcaaagattaacaagcatctctacttcccaattataaagtcccaggagagagaatctgactggtccagcttgatcatgtgtccatctctggctcaatcagctatggccaagattctgaggtcgtggaataaaaacgtggctcccaaggcatc

SEQ ID NO: 595427 - DNA, 571 bp, Homo sapiens
attcctatgaaccctataattatattgtaaagagaacaatcgttttgtatttattatatatgtgcacatgtgaacatcctaaaagttcaatttgtcaagcacacacttgaaaaatataccayagctttttaaaatcctgttagggtattattcctcctcctcttttcttctcctgttccttctgttccttcttcatcttcctttatttactagaatcctccaaaaatgagcaagacccaaccatctcttttctcttctgaaaagatatggacctgagacaaccccagagagagaattccatacagtctgacagagcaggaacatagccatcttgaacaagcactgccattttaaggttccccttaatcaaaaactgcctaaatccaacccaaagggcatcagcctaatggctaacatcggcatgaccataaaccacaaatgacatctctgaccagaaacattccaaacccctccctgagcagagacataccagccctgagataacctctcctctggccggagagatgtcagccccaagatatcctcccctctgaccagacacattccaact

SEQ ID NO: 595428 - DNA, 571 bp, Homo sapiens
attcctatgaaccctataattatattgtaaagagaacaatcgttttgtatttattatatatgtgcacatgtgaacatcctaaaagttcaatttgtcaagcacacacttgaaaaatataccatagctttttaaaatcctgttagggtattattcctcctcctcttttcttctcctgttccttctgttccttcttcatcttcctttatttactagaatcctccaaaaatgagcaagacccaaccatctcttttctcttctgaaaagatatggacctgagacaaccccagagagagaattccatacagtctgacagagcaggaacatagccatcttgaacaagcactgccattttaaggttccccttaatcaaaaactgcctaaatccaacccaaagggcatcagcctaatggctaacatcggcatgaccataaaccacaaatgacatctctgaccagaaacattccaaacccctccctgagcagagacataccagccctgasataacctctcctctggccggagagatgtcagccccaagatatcctcccctctgaccagacacattccaact

SEQ ID NO: 595429 - DNA, 578 bp, Homo sapiens
ccggagagatgtcagccccaagatatcctcccctctgaccagasacattccaactccacaataaacttctcctccacacaaacattccaagcctgtgataagctctcgccctaaacccttaaatactcttagtctgtaagaaagagtactcctgacagaaatcggccagaagcacctctcaggtttattcaccaaaataaacccatctttgacttgttgagccactttttgtgttcctttcctctgtctttaactcttacaaagtcatgtactgcataatgctgtttcagacatctccagaatgcacttgcaatggtggtccataagattataatgctgtatttttactgtaccttttctatgttgagatatgatacacaaatactaaccactgtgttacaaatgcctaccagattcagtaaaataacatgctgtagaggtttgcagcctaggagtgataagtacaccataatatagcctaggtgtgtagcagactataccatctaggtttgtataagtgcaccctgtgatgttcttacattgacaaaatcaaccaactatacaattctcagaacacg

SEQ ID NO: 595430 - DNA, 626 bp, Homo sapiens
tagactcaatgggttctggggatgtaaacatctcccaagtgggaaatttgaatgcagtgaggatgcagacttacatgacagtgtgggaagctgtctcctgctgttctagcaaagaatcctaaatgaggaagagaccaagtcatgagaggccacccgaaacatagtccctcaaagatgcatctacacagatgcagatgctgcttttcataaaatgctacaccgagtctgaatgcccagctagcttagtgcatgcttcagacaagtcagattggaaaaaagattcagggctcaagattagatctccaaggctgaatgaagaaggcgtctgtgagaacaacacaggagaagctcagggggaacccgggsgcaatggagggagatgcctttcacaggcaggagaccgatgaccagtatcaacctgatgatattaacaatggtagtaataataaataacagtgaagttaatatttatgaagtccttactctctgataaggggcattcatgcatactctcatttaatatgcactacagtcctagaggtaagaagcataattatccccattctatgtagagaaaactatggcaaccagatgcctcccatcctggtactgacacccttgtacaa

SEQ ID NO: 595431 - DNA, 223 bp, Homo sapiens
acttactcctctgccgtcgccacctgtctgggtgccggtctcctccctgcccggcccgcggcgcgtcctkcccgtcctcgcagtcctcgggctgtgcgcttcccccctccagccccagccgcagcctcttctcttcgggagggacgtcgtcctcctccctcctgggccggccatccctgcctcggggcttgccagtggcttcggagctgccggaagggctggc

SEQ ID NO: 595432 - DNA, 223 bp, Homo sapiens
acttactcctctgccgtcgccacctgtctgggtgccggtctcctccctgcccggcccgcggcgcgtccttcccgtcctcgcmgtcctcgggctgtgcgcttcccccctccagccccagccgcagcctcttctcttcgggagggacgtcgtcctcctccctcctgggccggccatccctgcctcggggcttgccagtggcttcggagctgccggaagggctggc

SEQ ID NO: 595433 - DNA, 223 bp, Homo sapiens
acttactcctctgccgtcgccacctgtctgggtgccggtctcctccctgcccggcccgcggcgcgtccttcccgtcctcgcagtcctsgggctgtgcgcttcccccctccagccccagccgcagcctcttctcttcgggagggacgtcgtcctcctccctcctgggccggccatccctgcctcggggcttgccagtggcttcggagctgccggaagggctggc

SEQ ID NO: 595434 - DNA, 223 bp, Homo sapiens
acttactcctctgccgtcgccacctgtctgggtgccggtctcctccctgcccggcccgcggcgcgtccttcccgtcctcgcagtcctcgggctgtgcgcttcccccctccagccccagccgcagcctcttctcttcgggagggacgtcgtcctcctccctcctgggccggccatccctgcctcggggcttgccagkggcttcggagctgccggaagggctggc

SEQ ID NO: 595435 - DNA, 632 bp, Homo sapiens
atagtgagaccccatctctacaaaaaaaaaaatacaaaaattacacaggtgtagtggcacacacctgtggtcccggctactagggaggctgaggcaggaggatcacttgagccctggaggtagcggttgcagtgagtgctgattgcatcactacactccaaccttgatgacagtgagaccctgtctcaataagaaataaaaataaataatcttttttacaaccatggaggtggatattattattattcccttttaacatatgaggaagatgaacctctgagaagttcaacaacttgtccaaggtcacccagctagtaaaggatggagctgggactcgcatctcaatgatctgcctcaagcccatgctggtaacctctcaaagacacttaccttccagaactttctggggaatcactataagatcaagctgactgcttaggaccagcaagaaccatggtgcattgtgtaataatttcagggttgacattaacaaaaagccttacccccttcattctctcwtcttcagataccagtcaccacccaggggcctccatctctgcatcagtaacaaaacaagaagagaccacatccaagaccacagtgaaggtcagaaatgacttcaatgcaggcat

SEQ ID NO: 595436 - DNA, 520 bp, Homo sapiens
tagtaatttcatatttctgcactaaccagccagcaaagattgccaaagttttgctgagatgcctgccatggggaaggtgaaataagcctcacccccactggctgctgcttctagacatgattctccttgacttagaccaaattatccttgaaaatcctgatgatagcagagaacatggaggaggctgaaacttgttctgatccagctgtgatgtgatgctttgtcttacggtcctgcaagacgcagaacagagcagactgggactctaacagataaaaggcataaagtgatcygggtgatggagggcagggcagcatgggcgtgctctctcggaagcaaccttaccttgctccgcagagcattgctgtgcatttaactcgatctttcatgataaagctctaatcatcagaattctacaagaccccggccaggcatggtgactcacaccgtaatcccagcaatctgggaggccaaggcaggtgggtcacttgaggtcatgagctcaaggtcatggtaaaac

SEQ ID NO: 595437 - DNA, 364 bp, Homo sapiens
tacaggcataagcaaccccacctgaacacctaactcactcttgagaggccggaagtgatgctggaaccttcttcttctgtgggttaaaaagggaaaattaggaagaacacaaggcatgagagatgcagcgatggatatgtctatatggagcttctgtctgcatccagtagaaaatgcacttctacgtaccaggtttaagagcraaaacctgcagtcttgtctgttagcattctccttccccacaaacctgagagggaatacattttcctccagcacacccggatgtaggaaatgtcacattcctatttctgtaaattcagttaaatctgctcgagtccctggatacctggcaggtggggaattc

SEQ ID NO: 595438 - DNA, 364 bp, Homo sapiens
tacaggcataagcaaccccacctgaacacctaactcactcttgagaggccggaagtgatgctggaaccttcttcttctgtgggttaaaaagggaaaattaggaagaacacaaggcatgagagatgcagcgatggatatgtctatatggagcttctgtctgcatccagtagaaaatgcacttctacgtaccaggtttaagagcgaaaacctgcagtcttgtctgttagcattctccttccccacaaacctgagagggaatacattttcctccagcacacccggatgtaggaaatgtcacattcctatttctgtaaattcagttaaatctgctcgagtccctggatrcctggcaggtggggaattc

SEQ ID NO: 595439 - DNA, 548 bp, Homo sapiens
taatcccagctacgcgggaagctgaggcaggagagtaacttgaatctggaaggcagaggttgcagtgagctgagattgtgccactgcactctagcctgggcgacagagcaagacttcgtctcaaaaaaaaaaaaaaatagagaaaataacaagtgttggttaggatgcagagaaactagaaccttcatacactgctggtgggtgttaaaatggtgtagccactgtgagaaacagtttaacaacttcccaaacaattctacatagagttaccaaatgacccagcaattgtactcccaggtataggcccaacttgggctcttttaatctatggaaaatgaactatgggtacttggcaagaacaaagacggagagaggcagaaatggtgccatgagggcacaytgactggtctctagtgcacatggctcccagtgcaaatggcctctaaatgacttcatcagttgctcataaaaaaaatcaccctctgctccaatcgtggaggaagaagtgtggattggacctggtgagccacagtaagactgactgctaa

SEQ ID NO: 595440 - DNA, 606 bp, Homo sapiens
gactgaaatagtccaagtcttggctaagctcctataaaggggtgttaggagctgataaaataacctggtctttacagacatcccacactgtagttctctaagctacagattctcagattttttctattttataaaccagtaaaaatatttttttaatttgagaaccaacataaggttgctatttttttttctttttggtaagaaggaacttttttaaactaccagttttacacacacacacacacasagagaaattccaccatgatcagtcagaataggttaggttttgctgcaataacaactcctaaatcttggtaacttcaaacattagaagttgtttttctcacttatgctacatctgcagggaggtgtggggtgctctgtttcccatcaaacttgccctaagactaaggctaatgggggttgcattacctggagtatcaccaagcagggaacagagggagaagaatgctagagagccctgtactaagaattaaaagctcctagctagaagtctcacactgcacctctgcccccagcctactggccagtactagccacatcccctcccccatcacagggcaatgcatgaagacaggagaattg

SEQ ID NO: 595441 - DNA, 551 bp, Homo sapiens
agcatgtagacagcctgttgtgagtcttctcagcctttataaatgagtgaaccaattcccttaataaatcctttcttctctctctctctctctcaatctctcgatatatgtatgtgtattttctattggttctgtctctctagacaaccctgacaaaatcacctagtctgcakatctactgtgaagattaaataaaaacacattcctggccaggcgcagtggctaatatctgtaatcccagcagtttaggaggctgaggtgggctgatcacttgaggccaggggttcaagccagcctggccaacatggtgaaaccctgtctctactaaaaatacaaaaaattagttgggcgtggtggcgcacgcctgcaatctcagctacttaggagactgaggaacgagaatcgcttgaatctgggaggtggagtttgcagtgagctgagatcacgccgttgcactccagcctgggcgaaagactgagactctgtcttgaagtgaaaaacaaaaaaaagcgaacaaaaagaaaaagaaaaaagcatccctgaaagtgcct

SEQ ID NO: 595442 - DNA, 551 bp, Homo sapiens
agcatgtagacagcctgttgtgagtcttctcagcctttataaatgagtgaaccaattcccttaataaatcctttcttctctctctctctctctcaatctctcgatatatgtatgtgtattttctattggttctgtctctctagacaaccctgacaaaatcacctagtctgcatatctactgtgaagattaaataaaaacacattcctggccaggcgcagtggctaatatctgtaatcccagcagtttaggaggctgaggtgggctgatcacttgaggccaggggttcaagccagcctggccaacatggtgaaaccctgtctctactaaaaatacaaaaaattagttgggcgtggtggcgcacgcctgcaatctcagctacttaggagactgaggmacgagaatcgcttgaatctgggaggtggagtttgcagtgagctgagatcacgccgttgcactccagcctgggcgaaagactgagactctgtcttgaagtgaaaaacaaaaaaaagcgaacaaaaagaaaaagaaaaaagcatccctgaaagtgcct

SEQ ID NO: 595443 - DNA, 551 bp, Homo sapiens
agcatgtagacagcctgttgtgagtcttctcagcctttataaatgagtgaaccaattcccttaataaatcctttcttctctctctctctctctcaatctctcgatatatgtatgtgtattttctattggttctgtctctctagacaaccctgacaaaatcacctagtctgcatatctactgtgaagattaaataaaaacacattcctggccaggcgcagtggctaatatctgtaatcccagcagtttaggaggctgaggtgggctgatcacttgaggccaggggttcaagccagcctggccaacatggtgaaaccctgtctctactaaaaatacaaaaaattagttgggcgtggtggcgcacgcctgcaatctcagctacttaggagactgaggaacgagaatcgcttgaatctgggaggtggagtttgcagtgagctgagatcacgccgttgcactccagcctgggcgaaagactgagactctgtcttgaagtgaaaaacaaaaaaaagcgaacaraaagaaaaagaaaaaagcatccctgaaagtgcct

SEQ ID NO: 595444 - DNA, 582 bp, Homo sapiens
tgagaccatgttggcctgttggccaggctggtctcaaactcttgacctccagtgatgtgcccascttggcctcccaaagtgctgggattgcaggagcgagcctaaaataattttttttttctgtcgccaggctggagtgcagtggtgtgatctcagctcactgcaacctccgcctcctgggttcaaacgattctcctgcctcggcctcccaagtagctgggattacaagcacctggctaatttttatatttttagtagagatggggttacaccatgatggccaggatggtcttgagctcttgacctcatgatctgcccacctcaacctcccaaagtgctgggattacaggtgtgagccaccacgcccggcctaaaataattttttgaattaagtttttgagtcacaggctggtcttgaactcttagcctcaagcaattctcctaccttactctcccacagtgctggcattacagacatgagtcatcatggccagccaaggcaggcttttttcagctgaggttcaccttggaggatcattgcagcagccaggggaacaaggccttcacccaaagcacatatct

SEQ ID NO: 595445 - DNA, 582 bp, Homo sapiens
tgagaccatgttggcctgttggccaggctggtctcaaactcttgacctccagtgatgtgcccaccttggcctcccaaagtgctgggattrcaggagcgagcctaaaataattttttttttctgtcgccaggctggagtgcagtggtgtgatctcagctcactgcaacctccgcctcctgggttcaaacgattctcctgcctcggcctcccaagtagctgggattacaagcacctggctaatttttatatttttagtagagatggggttacaccatgatggccaggatggtcttgagctcttgacctcatgatctgcccacctcaacctcccaaagtgctgggattacaggtgtgagccaccacgcccggcctaaaataattttttgaattaagtttttgagtcacaggctggtcttgaactcttagcctcaagcaattctcctaccttactctcccacagtgctggcattacagacatgagtcatcatggccagccaaggcaggcttttttcagctgaggttcaccttggaggatcattgcagcagccaggggaacaaggccttcacccaaagcacatatct

SEQ ID NO: 595446 - DNA, 582 bp, Homo sapiens
tgagaccatgttggcctgttggccaggctggtctcaaactcttgacctccagtgatgtgcccaccttggcctcccaaagtgctgggattgcagsagcgagcctaaaataattttttttttctgtcgccaggctggagtgcagtggtgtgatctcagctcactgcaacctccgcctcctgggttcaaacgattctcctgcctcggcctcccaagtagctgggattacaagcacctggctaatttttatatttttagtagagatggggttacaccatgatggccaggatggtcttgagctcttgacctcatgatctgcccacctcaacctcccaaagtgctgggattacaggtgtgagccaccacgcccggcctaaaataattttttgaattaagtttttgagtcacaggctggtcttgaactcttagcctcaagcaattctcctaccttactctcccacagtgctggcattacagacatgagtcatcatggccagccaaggcaggcttttttcagctgaggttcaccttggaggatcattgcagcagccaggggaacaaggccttcacccaaagcacatatct

SEQ ID NO: 595447 - DNA, 493 bp, Homo sapiens
tcatcagaggcccccacacccatttctatccccagcttatagctcagacctatggcaggcagggtgtgtttgacttggggagatcttgcaaagaagtgagtttccatcccctcatggcarcagtacatagagtgacaaagagctgacccccaggtcaacagccaagagtgagagtagccctgttaacaccagaaaacactaaccacggaccttgctctgccaagacaagagatgttctgccaccccgagttaagctgcttgacagaaatacgacatagacccagccaggaatgcatttctaacagttacttccatttgctttttacaaaacaccagcatgcatattatctcatttcggctcatcaacaatcctgtcaggtaggtggagctggattattatttctataacaatttatttcgttgtgcaagacagcgtgtatacaatgcagccatgctgtacctatgctatccaaaagcaagcgtagaaacatgc

SEQ ID NO: 595448 - DNA, 546 bp, Homo sapiens
tgataaaccaagttagtggttgaagaaaggaagaacaagctaaggagttatggaggcacaggtctcttgatttggagcaggagtcattggaagaggtcaattgtcaaacggcagcctgatctggtcgcaggctgtcctaggattcagcctgaatgtattgtcatccatcacagggaaagcccaataaatccttcctccttgagcatttgtaactcarcttctgtttctaaatccataaatccaggaggtaaacagggatagcatctctcatttctcctacacacacaattccttttggccctgcaccaatcagtgggaccagttcacatgcttatactttgcacttcaggtctctgaaatctttcatcatcacgccacagccatcatcaccaacatcaacaatttgcatttacactctttaaagtattttacatttattatcgaatctgacccaatcagatcatccccattttatacaggaataactggagatcctaaagtcaatttataccaacagcagtaatgagagcgtccactcatcacacc

SEQ ID NO: 595449 - DNA, 612 bp, Homo sapiens
ttcggttaggtagtaaacttcacagattggaataaataatgcatccagcctaaataacctcttaggccaaatcaagtggtgccgagtttaaatctggattggaaattgagtctatgactctaagggcgtacagaatccccagtttacaaagggagctccactttcctcagttcctttgctaaggacacatgagattatttagctgctctgcaaagctgtggtcagaggcagaaaaggtagcacttctgggaatgggtagaatcatctcggccctgggtgagagggtacagaggagttctaagtcagtactttttggttgcaagtaatgataatctctgtatgtcattggtgcagacaaaaaaaaaaagatgaataagtaatagtcatcacacctactgcagcaaaattttaccaacattcagtaactagtggaagagtcayttttacaatgttggtgggagtgtaaattagttcaaccattgtggaagacagtgtggcaatttctcaaagacctagaggcagaaataccatttaacccagcaataaatcattcaattataaagacacatgcatgcgtaagttcaattgcagtactattcacaataacaaaga

SEQ ID NO: 595450 - DNA, 544 bp, Homo sapiens
aaattatgtgatacaccacataaacataattaaaaacaaaaatcacatgatcatcttgatacagaaaaagcattcaacaaaatccagcatccctttatgattaaaactctcagcaaaataggcatacaagggacatacctcaatgtaataaaagccatctatgacaaacctacagccaacataatacggaatgggcaaacgttgaaagcattccctctgagaactggaacaaaacaaggatgcccactccaaccacttctcttcaacatagtactggaagtcttagccagagcaatcagacaagagaaagaaagaaagggcatccaagttggtaaagaaaagggttgaatcaagtgtactctcagatgcgtttccattaaactgaataacctcggcatgtcagctggttctacagagctctgggtgaatcaagagaatgtttgagatgatggaaatgytaaatatgaatttcatcattacataatgtatatacatatcaaaacaactgactatacaccataaatatgtacaattattatgtgtg

SEQ ID NO: 595451 - DNA, 404 bp, Homo sapiens
gataatgcactgaagagaggcaaggacattgccagattaatttctacatctctgcttgaatcttcttgytgttcctgcaagcagggcaggggctttgattgtgctattaagaattttgctaaaacctccatggtagcagaataattatcgtaggcagaataatgacccctcccatccccaaagatatccatatcttagttcctggaatctgtgaacatattgggttacgtggcaaagggggattaaacttgcagatggaattaaggttgctaatcagctgacactgagatggaaagattatcctggattattgaggtgagtctgttgcaatcacaggggttcttataagagggggagaaagagagaaaagaaagggagccaggagacaagagcatgagaaggat

SEQ ID NO: 595452 - DNA, 404 bp, Homo sapiens
gataatgcactgaagagaggcaaggacattgccagattaatttctacatctctgcttgaatcttcttgctgttcctgcaagcagggcaggggctttgattgtgctattaagaattttgctaaaacctccatggtagcagaataattatcstaggcagaataatgacccctcccatccccaaagatatccatatcttagttcctggaatctgtgaacatattgggttacgtggcaaagggggattaaacttgcagatggaattaaggttgctaatcagctgacactgagatggaaagattatcctggattattgaggtgagtctgttgcaatcacaggggttcttataagagggggagaaagagagaaaagaaagggagccaggagacaagagcatgagaaggat

SEQ ID NO: 595453 - DNA, 404 bp, Homo sapiens
gataatgcactgaagagaggcaaggacattgccagattaatttctacatctctgcttgaatcttcttgctgttcctgcaagcagggcaggggctttgattgtgctattaagaattttgctaaaacctccatggtagcagaataattatcgtaggcagaataatgacccctcccatccccaaagatatccatatcttagttcctggaatctgtgaacatattgggttacrtggcaaagggggattaaacttgcagatggaattaaggttgctaatcagctgacactgagatggaaagattatcctggattattgaggtgagtctgttgcaatcacaggggttcttataagagggggagaaagagagaaaagaaagggagccaggagacaagagcatgagaaggat

SEQ ID NO: 595454 - DNA, 404 bp, Homo sapiens
gataatgcactgaagagaggcaaggacattgccagattaatttctacatctctgcttgaatcttcttgctgttcctgcaagcagggcaggggctttgattgtgctattaagaattttgctaaaacctccatggtagcagaataattatcgtaggcagaataatgacccctcccatccccaaagatatccatatcttagttcctggaatctgtgaacatattgggttacgtggcaaagggggattaaacttgcagatggaattaaggttgctaatcagctgacactgagatggaaagattatcctggattattgaggtgagtctgttgyaatcacaggggttcttataagagggggagaaagagagaaaagaaagggagccaggagacaagagcatgagaaggat

SEQ ID NO: 595455 - DNA, 608 bp, Homo sapiens
aagaacttaccccgtggatgtggattgtccatggcccatctcccagctgtcccgagagctcagtggcagcaggactcagactccaacttgcatctttgtccctcagcacccagcatgaggcccggctccccggaggtgcacagtcgatgcggatcagattgaaaattgccttgacaaaatgaagttctcagttgggcactacagataattaggggccagaacagacgttagtaaaccactgatcgtgtgagcgagacaagcaggaytggatcagagtgaagtggagctggaaattggagtctgactgtcctgcttgcacacagaagaaagctgaggcacagagaggggaagggactggcataaggtcacacagctagtaagtttagagagagatttcaaacctgtgtctactggacttcagggcgtcaagctaactgcccttcctcctcaggtcagctcctcgcagcagctgcaaggcacgagccatgtctgcagttggaggagagctggggtctccaagaggggagtgctgcccctagaggctggctgcctcctggggactctgattagagcctgcagccccacagctcagccagaatcccacgtga

SEQ ID NO: 595456 - DNA, 566 bp, Homo sapiens
aagtgactcatccaggattacacagtttagtaagtggcagggagagatgtgactttggctccaaagctgatgcttttagctatgctgacattctgttttctcttcctcttgggctggaattgtcattcctggaccatcaggacctccacaagcacttaagactttagagaggtctccatcaaccatcccctgcccctgcaggtgagcctccttccaggccctccctatagcctaggcccccgtgttggttggaggtataatcccagctctggctctttcctggttgtgtgacctgggatgagtcacttcacctctcctcacctgactctgcacctccacgaagtgcagggaagtatcccattctgacaaggctgtaggaaggatggaagtagagaaggcaatttgccccacccctaccagtcccgcacctccttcttggggaagctcgagttctagacayggtcccctccactctcctcttgtactcactctcactctagcaggtcctgaatcagcattcaacacacatcgctctgccttgtgcaacgccattatctcccgaggac

SEQ ID NO: 595457 - DNA, 621 bp, Homo sapiens
tggtgctatttaactcctccagggctggcgttttcatttaatacccgtggaataattaacagtgctgcatctgctctgtcattagtggcattcactgccatttggagaaagggctcttatcttcctcagtcattagtctcggggaggctattatgggggaaatggaggaggagaggaggaagtggggcgtgcaacttccctccccttgcctggagaactggcgcctggtgcggggagcagccgatcatcctatccaatggtccaaacctcttggctgtatgaactgagcatgcaaagccaagaggggaaagaacctgcccacggtcccccacaggcttgaggcccagcagaaggcggctctcccacttctttctcaggtctgcaagcccargcctcggagccctgcagctttggatctgattcccagctctgccctgtgtcagtggtatgaccttgggcaacttcttgagctccctgagcctcagtttccttattgaggatcctgggacaatgcttgtgaagtactggctcagtgcctaggtcacaggcagagcccaagactgagagatgtacatatcagatcattctgtgtcattatgctgaaccaacctgctaaaaatg

SEQ ID NO: 595458 - DNA, 620 bp, Homo sapiens
caagatgctacggcccttttctccccagcctcacagccgtgccttcccacgctctcttgtaagtctcgatctttgagtgctctgtgctctgcctcctaccagatctggcctcatctgggctccttctcaaggggctacctggtgaacttggatttcagcctagcaaaggtgattttcatcagctgggaaactaggggacagagatgaggagtcagggctcactgagcctcaggttcatcttttggatggggataataatggtaccaataataacaataaaattaccttcacttgaagttcccagggctgtcacaagcttcgactgagaaaacactttgaaaactgaaattctacataagtgttaacstgtgcatgtacgcacatgtgtgcaaaggagcctcatttgggtcaaggtcattctgatttgggctttataagaaaactagctttaaaaaaatcactctttattggagagaggattcttctccaggatctcaaggaccatattttcttcccctggaatacttcatacatgatcaaaagaaaaagcagctgcaagagcatttttagcaaagtataaagtgcggttctgatgaccgggagtatcgtgatcagcgcta

SEQ ID NO: 595459 - DNA, 473 bp, Homo sapiens
gctacttttgcttgcctgacattcatttcaacttctttgggtgacagaacctcaattttcatttgggaaacttcccctccttcactcatattcaatatggttgggtggggctccctcctcctggagacagacatgtgacccagggcacagataatcagagcacatcactctgacctcaatgaggggacrtgtgacatatgctgggccaatgagaactctgtctgggacttttgctaaaactattgtcaaacagaaactcaatctccaccaaagctcctaagcatagaggtgttggcagccatctttgcagaacttgagcagacccgacctaaaatgaagccaacatagaggagagcagaactgagagacagagagtggagtgagtcttgatgtatatcaggtccctggatccagccatacctgaaggcagtgtcagctatttatatcattaaattgtttttcctatgctacac

SEQ ID NO: 595460 - DNA, 562 bp, Homo sapiens
gcctcctaggttcaagcaattctcctgtctcagcctcctgagtagctgggatttcaggctcgcaccaccatgcccagctaatttttgtatttttagtagagatggggttttgccatgttggccaggctggtcttgaactcctgacctcaggtgatccgactgccttggcctctcaaagtgctgggattataggcatgagccaccacctccagctggaaacatgcaataaatatgtattgaatagatgaaggcactaaggaaaaccatgcatttgtgtctcactcaagtataaatttttgagggcctgggcrtccacccctcaatggacaggatgtgaggagcagggctcagagttcaaaaccccttattttttcttccccgggcagtgccagcctcctgggaataagagccctgcccagttggcaaggattggaatgtcaccggtcacctgtggtgtctgacagctaacacagactggatcctgtgtgctgcacaccgaggacactgatgcatgtctatctggaaacccaaggcttatctggagggcagcgaggtggttggg

SEQ ID NO: 595461 - DNA, 564 bp, Homo sapiens
ggagccgtgccctcctgtgatggggggagtcaggggggcagcggagacctggcctgggtccttggaatcccaggcagcctaagccaaggcctgttggcaacagcaggagctccagagctctggctcagggactggagttctcattggattttccacttggcccccaggtcctgggcagcgctaggaggtggcataatctgaagacctctgactcctggttggtaggtccttgcagcctcaggggcttctgaggggcacgcatcagttccctcccctccgctgtctactcctgggagagcccttctctctcaggcatctcccacccctttcccactcccttcmtctgtctcactgcctctttttctcttcaacacctctgctcctctcccacctctccctctcccctcctctccctcctccccatccctactcccccaggctccttcctttcctctccacactcctgctgcctcaacttcctcctcccctctttaggcgcctctccctgtctgctacctccatgctgcttatctccccacctcaaactctctctttctctctctc

SEQ ID NO: 595462 - DNA, 460 bp, Homo sapiens
tggtctggccgaccttccaccaccattgcctgcacctctgtgcctgggggcttttctataaccccagaaggctgttgtgcccaagtgctcgctagtccagagactgagaaactaacaccctgagaagcagccctcaactgatggctggcaggatctggtgtacaaataccccagctccctctctccttgagtaggataattctgaggtgcatgtgctacgctatttcctagagtttcctccaggcaattaaactctggttgcccacccctggtagctggctcaatcatacaccctatattggctgccttccyttcccaatctcacttccctacccaggttctctgcatctcccaaataaactgcctgcactcaagtcctcatctcagggtatgcttctgggaaagaccaaacaataacctccttcagaagctgagatccagacacactctaacagaagct

SEQ ID NO: 595463 - DNA, 609 bp, Homo sapiens
tccaagcttgagcagtccctcccctccccaggccttggtttcctcatctgtcaagtaagaaggttagcataaacgctcgggttctgccattaggagtatctgtggatttggtttttattccccagggtcttcccaccccaccatggatgcagctggtttaggagcagttgacgtgggtgagaggagagaggaagtcttccctccccagtgagtctacacttgggacatcctttgctagggacagtccctctacctggatcaggaaggacattgtggtgtttactgtccagtggactgggaggtgagtgttgagggggctgtgcagagaatggtgttgggggagcttcctgtaaagatcctctaaacgaggaggtgacatttgaaatgagacgctccaggggaaatgtgcacacatgtacagacacaccatgcacacactgcatgcatgcacacatgtaaacatgcatgcacacaccacacacaagaatgtgcrtgcatacttgtgcacatgctacatgcatgcacatataaacacacatgcacactacacacatgcattgcatgcacatacacatgctgcatgcatgcagacatatagacacaccacac

SEQ ID NO: 595464 - DNA, 606 bp, Homo sapiens
catattctactggcttcacagaccaacactgatacagtgtgggaggggctgcaaggatgtggataccaggtggaattcacagaaagtaagatgggggaagtcacagaggtcartagtggatgtgatatcaagccaggtcccactgtgggcactgagaggctaatcccacaggggaacgctggaagaaagtgtagagcatgcctcggagttatctccaacaaacaggtgaggatgctgggggcattttcccatccaatcctctttcatcattggttgaaggttgcctctatgggccctaacaccagcattttcagctgtggcttcctctctctggacccaagtttcctggcctgtaagtgaggatggcatcaacaatttcatgatagagtacttgtgcagtggttatgcctggcacacagtaagtgttcagtaaagctgctagtggtgtggtgatgtggctacgatggtcattctgatggctggttgggatgaaatgagatgatgtcaacaccgctcttggtaaatccctacttcctgattctcattcctgtgttctttccagctcagcacatcacttctcaagctccagataataacactgcagga

SEQ ID NO: 595465 - DNA, 595 bp, Homo sapiens
gcatcaacaatttcatgatagagtacttgtgcagtggttatgcctggcacacagtaagtgttcagtaaagctgctagtggtgtggtgatgtggctacratggtcattctgatggctggttgggatgaaatgagatgatgtcaacaccgctcttggtaaatccctacttcctgattctcattcctgtgttctttccagctcagcacatcacttctcaagctccagataataacactgcaggactcattgctctgatgttcatatgagcccagaaacagactgggaatgggagcaggttatgtccaaagttcccgccaacttccgcatccatgagatgtgtagggccctgggagcaatgtagtatcagcaccttggacagcttccaaaggcgtggtcctggccctggttgctcccctccttcttagcaaggactccacactacttagatgtcttaaggccctcctgcgtgttagtaaagtgatttgtctgaggctccacagctagaaaggggcagagccaggactcatactgtctttgagaagtgccttacctctctattcctcagtttcctcatctgtaacatggaaacaaggcag

SEQ ID NO: 595466 - DNA, 595 bp, Homo sapiens
gcatcaacaatttcatgatagagtacttgtgcagtggttatgcctggcacacagtaagtgttcagtaaagctgctagtggtgtggtgatgtggctacgatggtcattctgatggctggttgggatgaaatgagatgatgtcaacaccgctcttggtaaatccctacttcctgattctcattcctgtgttctttccagctcagcacatcacttctcaagctccagataataacactgcaggactcattgctctgatgttcatatgagcccagaaacagactgggaatgggagcaggttatgtccaaagttcccgccaacttccgcatccatgagatgtgtagggccctgggagcaatgtagtatcagcaccttggacagcttccaaaggcgtggtcctggycctggttgctcccctccttcttagcaaggactccacactacttagatgtcttaaggccctcctgcgtgttagtaaagtgatttgtctgaggctccacagctagaaaggggcagagccaggactcatactgtctttgagaagtgccttacctctctattcctcagtttcctcatctgtaacatggaaacaaggcag

SEQ ID NO: 595467 - DNA, 636 bp, Homo sapiens
aaacactcgccaggcctatgacagttctagttggaaggaagaaaatgctccactattttcattaattcctcctctcccatgttgtccaggtagaatttcgcaggaaaaccgcaagggcacttttaagaaaaccacagagagagctgttggctggagaagcttggccaagctggtggggaagggatggtgcgtgctccccatgaagtgctcacccaagagtccacctgtcttsagggttggatcctcccagaaacagaccttgagacaagcaagcagttaatttaggaggaagcactagtggggcagggaggaggagaaggaaaggaagtaaatagcctatttcagagcaggctaccaccagtggcaatggggtctcaatccctcctacacagaccccaccttggggccatcccacagaagggcatcaagctgggtactcatcctcccacttctgtccctctccctcactgttcaagagctgccaccagggctgagaagctcccgcatgtccagcctcccctgcacagccaagagaaagcccttgggtggaggggtgaagggcattgcagggggagctacccacaccaccatcacctgatatgcaccattaatcaattaatcacccatcagcaggct

SEQ ID NO: 595468 - DNA, 583 bp, Homo sapiens
aagaaggaaacattgactataatcatcagctgcctttytaacaccttctaagaaaaaccttggggtatgtttcagctaagaggtggtaagatttcttaatcatgatccaaactgtttttaacaagtttcaacaaaaactatatatagccaagaaccaccatctgtttcacatatttttgtgtcagtgatagatgagggaaaaaagctacttgaagtcactgtcttgaaggtctttagaattgtcccttgaagcctgtgctaacatttttttttttttttttgcttttccacaatctccacaaactggccagcattaactatacgtaaatggaattcaatataatatttattttcaagaaaaagaaggcctccttgctaaatgggtctaagtatcaatcttgaggagttttttttttttttttgccgttgtgactcagtcttcatgcctccatgtggaagtataagcatagaagttcctcaatttacaaacaggttacctttcaaagtgttttattgatgttctggttgtgtagaaaacaaaaatgaattttcccatataaattacgttacaatttggtggtta

SEQ ID NO: 595469 - DNA, 544 bp, Homo sapiens
agaaggaaacattgactataatcatcagctgcctttctaacaccttctaagaaaaaccttggggtatgtttcagctaagaggtggtaagatttyttaatcatgatccaaactgtttttaacaagtttcaacaaaaactatatatagccaagaaccaccatctgtttcacatatttttgtgtcagtgatagatgagggaaaaaagctacttgaagtcactgtcttgaaggtctttagaattgtcccttgaagcctgtgctaacatttttttttttttttttgcttttccacaatctccacaaactggccagcattaactatacgtaaatggaattcaatataatatttattttcaagaaaaagaaggcctccttgctaaatgggtctaagtatcaatcttgaggagttttttttttttttttgccgttgtgactcagtcttcatgcctccatgtggaagtataagcatagaagttcctcaatttacaaacaggttacctttcaaagtgttttattgatgttctggttgtgtagaaaacaaaaatg

SEQ ID NO: 595470 - DNA, 544 bp, Homo sapiens
agaaggaaacattgactataatcatcagctgcctttctaacaccttctaagaaaaaccttggggtatgtttcagctaagaggtggtaagatttcttaatcatgatccaaactgtttttaacaagtttcaacaaaaactatatatagccaagaaccaccatctgtttcacatatttttgtgtcagtgatagatgagggaaaaaagctacttgaagtcactgtyttgaaggtctttagaattgtcccttgaagcctgtgctaacatttttttttttttttttgcttttccacaatctccacaaactggccagcattaactatacgtaaatggaattcaatataatatttattttcaagaaaaagaaggcctccttgctaaatgggtctaagtatcaatcttgaggagttttttttttttttttgccgttgtgactcagtcttcatgcctccatgtggaagtataagcatagaagttcctcaatttacaaacaggttacctttcaaagtgttttattgatgttctggttgtgtagaaaacaaaaatg

SEQ ID NO: 595471 - DNA, 558 bp, Homo sapiens
ccattttgttacaaatagttggacattacaaaaaaattacaaaagatagaaaattggaaagaccatcccatagaagagcttttaagaaaagcccaaaaagcatatgtacagagggatgaggaaaagcaaaggcaaaaagcaagaattatgttttctgccatgccacagagaactctccaggagagagcctagggaaatggagcttgtaaatcttctaagtgtctggctgttagaccctacatgggaaacaaagggatcaaaccagagggtcaaggaatgagaagggaaaaagggcaaaataggcgtttcaaatatgggaaaataggtcacttcaaacgagaatgccttgaatgggaaaaggaaagtaaggtcactcatggcctttgaagaagaatagcgggatcagggactctgtctctttcatttcagatcccacccagagcccttcataaattcagargtgggacttacatctgaatttattacctttttaatcgactcaggggcgacttgctcctctgtctcttattccccatctggtgcaacttgttcagaaga

SEQ ID NO: 595472 - DNA, 558 bp, Homo sapiens
ccattttgttacaaatagttggacattacaaaaaaattacaaaagatagaaaattggaaagaccatcccatagaagagcttttaagaaaagcccaaaaagcatatgtacagagggatgaggaaaagcaaaggcaaaaagcaagaattatgttttctgccatgccacagagaactctccaggagagagcctagggaaatggagcttgtaaatcttctaagtgtctggctgttagaccctacatgggaaacaaagggatcaaaccagagggtcaaggaatgagaagggaaaaagggcaaaataggcgtttcaaatatgggaaaataggtcacttcaaacgagaatgccttgaatgggaaaaggaaagtaaggtcactcatggcctttgaagaagaatagcgggatcagggactctgtctctttcatttcagatcccacccagagcccttcataaattcagaagtgggacttacatstgaatttattacctttttaatcgactcaggggcgacttgctcctctgtctcttattccccatctggtgcaacttgttcagaaga

SEQ ID NO: 595473 - DNA, 502 bp, Homo sapiens
tgtatgtgttagatttatggtttttgacaaaatacatattttaatcttaacaacactaaggtgtttaagttctgtcttattattaggtctgtcttaaagttgagaaagctgaagcacagagttaagtaactttcccaaagtcacaaagtaagtggtggaactactactatcaactcaggcagtatcaccttggaactcactttcttaatctcaatgccatgctgccccttgagagaactgattattcagcctaggcatgtaagaagacttcttctctagaaaaaattaataatacaaaaaaattaggcaggcatggtggtgtgtgcctataatcccagctacctgagtgaaggctgcagtgagctgtgatcatgctactgtactcaaacytgggtgacagagtgagatcctgtccagaaaaataaataaataaataaacaaaaacttatttttgagaaggcaaagctcataactttttttgttttgtttattttgttttttt

SEQ ID NO: 595474 - DNA, 494 bp, Homo sapiens
gaaatgagacagcaaatgtagaaaatttgccagcttagctacaaaaggttagaatgagataagattttagttggtttggaggtgtggtttcaagggagatttatttccrtatgtttgtttgataaaaagagagagatttgaacttgtgtataagtcatgagaaggattgaattgaaaaggagaggctaaatatttaagatggagaaagattaactaacactgacaatttcctgagaaggtgaatgggcacaaaatctataactgaagggaaaagggaccggccttaggtggcaagaagggagggaaggaaagacggatgtggatactgatatatttgcatgttttctagggagaaattaaggtagttcttgtctgatggctttaattttctcagcaaagtagatacgttgggttagggacagataacaagcttgagggaaagtaaagggaggtttgaaaagagtttgagagtgatttgaaccaatcaacatagg

SEQ ID NO: 595475 - DNA, 494 bp, Homo sapiens
gaaatgagacagcaaatgtagaaaatttgccagcttagctacaaaaggttagaatgagataagattttagttggtttggaggtgtggtttcaagggagatttatttccatatgtttgtttgataaaaagagagagatttgaacttgtgtataagtcatgagaaggattgrattgaaaaggagaggctaaatatttaagatggagaaagattaactaacactgacaatttcctgagaaggtgaatgggcacaaaatctataactgaagggaaaagggaccggccttaggtggcaagaagggagggaaggaaagacggatgtggatactgatatatttgcatgttttctagggagaaattaaggtagttcttgtctgatggctttaattttctcagcaaagtagatacgttgggttagggacagataacaagcttgagggaaagtaaagggaggtttgaaaagagtttgagagtgatttgaaccaatcaacatagg

SEQ ID NO: 595476 - DNA, 494 bp, Homo sapiens
gaaatgagacagcaaatgtagaaaatttgccagcttagctacaaaaggttagaatgagataagattttagttggtttggaggtgtggtttcaagggagatttatttccatatgtttgtttgataaaaagagagagatttgaacttgtgtataagtcatgagaaggattgaattgaaaaggagaggctaaatatttaagatggagaaagattaactaacactgacaatttcytgagaaggtgaatgggcacaaaatctataactgaagggaaaagggaccggccttaggtggcaagaagggagggaaggaaagacggatgtggatactgatatatttgcatgttttctagggagaaattaaggtagttcttgtctgatggctttaattttctcagcaaagtagatacgttgggttagggacagataacaagcttgagggaaagtaaagggaggtttgaaaagagtttgagagtgatttgaaccaatcaacatagg

SEQ ID NO: 595477 - DNA, 494 bp, Homo sapiens
gaaatgagacagcaaatgtagaaaatttgccagcttagctacaaaaggttagaatgagataagattttagttggtttggaggtgtggtttcaagggagatttatttccatatgtttgtttgataaaaagagagagatttgaacttgtgtataagtcatgagaaggattgaattgaaaaggagaggctaaatatttaagatggagaaagattaactaacactgacaatttcctgagaaggtgaatgggcacaaaatctataactgaagggaaaagggaccggccttaggtggcaagaagggagggaaggaaagacggatgtggatacygatatatttgcatgttttctagggagaaattaaggtagttcttgtctgatggctttaattttctcagcaaagtagatacgttgggttagggacagataacaagcttgagggaaagtaaagggaggtttgaaaagagtttgagagtgatttgaaccaatcaacatagg

SEQ ID NO: 595478 - DNA, 568 bp, Homo sapiens
caatttctgtgacatttaattgtctgaaaatgcccttattctaccttcatatttgattgatagttagtttgggtaaaaatttgtaagctgaatattacgtctctcagaattttaaagacattgttttactgtcatctagctttcaaagggccaaatttctagtcttctgtatacaacctactttttttttcctttgggaactttcaatatacattctttgcccaaatgaaattttgtaatcatattctttattgttgttcttttcaaatgtattacacaaggcattcaatgtaccctttcaaaacatgtattttattgttctggaaaacttattgagagttagctcatctgcattttctctcttctcactttctttgacttctgttggtcatatatttcattttctgcattattttcctcattttaaatatttttattcattattttcttctaatttctatgtaatttcctaaaatttacscttcacctttaaatctcaagtgaaaattttcactctgttatcttaactttaattttcaattccactttaaactttctggtgtttctt

SEQ ID NO: 595479 - DNA, 638 bp, Homo sapiens
gtgtctaaatttcctaatcaaaggtttttatgtattgaaaggaaataataaagaaaataatacttcccagtgttgcttatgtgtgcatcactgaacagctgctttctaatttagctttcacaaaaatctttcgaggtaggttctaccatattgccgtaactatttttatatagggaaccccaaatcagaggttaagggaactttcttagtgcaagacgtagctagagaataaaggagtcagggtccaagccaggtctgacttcaaagcctacattctcctacaatttaaccaastgatgtgactcattgcccctcccaaggtgagactgacacattctgcagaaattgataggttttgtcagcgttcaagtgatagactataatcaattaacatctccttgtatatttttctgtaaatcgtggcttacaaattgttttctatatgtcatagctatctctaaaattatgtattcacattgaaaggtgaaaacacatttcaagaaacacacatgcatagttaaatgcatttttcttattaaagtattttacttttaaaaataattttaaagacactgcctcaggacactgctcttttgattttttaacttagaacccacctattaaaaccctacatatgg

SEQ ID NO: 595480 - DNA, 638 bp, Homo sapiens
gtgtctaaatttcctaatcaaaggtttttatgtattgaaaggaaataataaagaaaataatacttcccagtgttgcttatgtgtgcatcactgaacagctgctttctaatttagctttcacaaaaatctttcgaggtaggttctaccatattgccgtaactatttttatatagggaaccccaaatcagaggttaagggaactttcttagtgcaagacgtagctagagaataaaggagtcagggtccaagccaggtctgacttcaaagcctacattctcctacaatttaaccaagtgatgtgactcattgcccctcccaaggtgagactgacacattctgcagaaattgataggttttgtcagcgttcaagtgakagactataatcaattaacatctccttgtatatttttctgtaaatcgtggcttacaaattgttttctatatgtcatagctatctctaaaattatgtattcacattgaaaggtgaaaacacatttcaagaaacacacatgcatagttaaatgcatttttcttattaaagtattttacttttaaaaataattttaaagacactgcctcaggacactgctcttttgattttttaacttagaacccacctattaaaaccctacatatgg

SEQ ID NO: 595481 - DNA, 638 bp, Homo sapiens
gtgtctaaatttcctaatcaaaggtttttatgtattgaaaggaaataataaagaaaataatacttcccagtgttgcttatgtgtgcatcactgaacagctgctttctaatttagctttcacaaaaatctttcgaggtaggttctaccatattgccgtaactatttttatatagggaaccccaaatcagaggttaagggaactttcttagtgcaagacgtagctagagaataaaggagtcagggtccaagccaggtctgacttcaaagcctacattctcctacaatttaaccaagtgatgtgactcattgcccctcccaaggtgagactgacacattctgcagaaattgataggttttgtcagcgttcaagtgatagactataatcaattaacatctccttgtayatttttctgtaaatcgtggcttacaaattgttttctatatgtcatagctatctctaaaattatgtattcacattgaaaggtgaaaacacatttcaagaaacacacatgcatagttaaatgcatttttcttattaaagtattttacttttaaaaataattttaaagacactgcctcaggacactgctcttttgattttttaacttagaacccacctattaaaaccctacatatgg

SEQ ID NO: 595482 - DNA, 478 bp, Homo sapiens
gggaaaaacatacactggggcctgtcaggagtgtggagggaagcagagyatcagggtgaatggctaatgcctgctgggcttaatacctaggtgataggttgataggtgcagcaaaccaccatggtatacgtttacctatgtaacaaacctgcacatctggcacaggtattccggaacttaaaattaaattaaattaaattaaacaacaacaacaacaaaaaccctcctagatgcaatactttggcatacatggaacacaatggcatttgagcaaagaaggttttaaaataattgttttgcttttgtacctacctttttaaaaataagataatatagcacaaaagagctttagcacttttgatatggtttggctgtgtccccacccaaatctcatcttgaattacaactcccatagttcccacgtgttgtgggagggacccagtgggagataattgaatcatcagggcggtttccccca

SEQ ID NO: 595483 - DNA, 478 bp, Homo sapiens
gggaaaaacatacactggggcctgtcaggagtgtggagggaagcagagcatcagggtgaatggctaatgcctgctgggcttaatacctaggtgataggttgataggtgcagcaaaccaccatggtatacgtttacctatgtaacaaacctgcacatctggcacaggtattccggaacttaaaattaaattaaattaaattaaacaacaacaacaacaaaaaccctcctagatgcaatactttggcatacatggaacacaatggcatttgagcaaagaaggttttaaaataattgttttgcttttgtacctacctttttaaaaataagataatayagcacaaaagagctttagcacttttgatatggtttggctgtgtccccacccaaatctcatcttgaattacaactcccatagttcccacgtgttgtgggagggacccagtgggagataattgaatcatcagggcggtttccccca

SEQ ID NO: 595484 - DNA, 597 bp, Homo sapiens
aggggcaatcaagttaagatgaggtgattagagtgggcmgtagttcactacagttgtgtgtttatgaaaaggtgaaatctgcagacagacatagacacaagagaatgccatgtgtcttagcttgggcttctataacagaatactatagactgggtggcttaaacatcagacaattatttctcaagttctggaaactgagaagttcaagatcaaggtgatgacagaattggttcctcatcatggcctgttttttggcttggagaccatggacttctcacttatgtggcttttcctctgtttgtgtgtgtggagacagtgtcatagaaaaggccacaagagagagggtccaagatggtcgattagaagcagctgcggtctgtggcactcacagaaaggaatgaaagcagcaagtgaattcagcaccttcaacttgaatatccaggttctagtgttgggactgactaggcaaacaactcaacccttggagaatgaaaaaaagcagggcgggtgacagaccacccaggagtggcacggagccaaagaaacccccaatcccagccaggggaagcagtgagtgattgtgtgacaccacctgaa

SEQ ID NO: 595485 - DNA, 594 bp, Homo sapiens
cattgcagcactattcacaatagcaaagacatggaatcaacctaaatgcccatcagtgatagactggatacagaaaatgtggtatatatatatatgtatatatatatatataaaatggaatacyatgcagccataaaaaggaatgagatcatgtcccttgcaggtacatgggtgtggttggaagccattatcctcagcaaactaacacaggaacagaaaactcctcatattctcacttataagtgggagctgaatgatgagaacacaaggacgcagggaggggaacaacacacactggggcctgttggaagctggggagggaggagggacagcatcaggaagaatagctgggctgaataccaaggtgatgggatgatctgtgcaggaaacctccatggcacatgtttacctatgtaacaaacctgcacatcctgcacatgtacccctgaacttgaaataaaagttggaaaaaagaaaaaagggcatgaatcccatcatggggcaccccccctccatgacctcatctatctgattacctcccagaggccccacctccaaataccatcacactgggggttagggcttcaacatatg

SEQ ID NO: 595486 - DNA, 594 bp, Homo sapiens
cattgcagcactattcacaatagcaaagacatggaatcaacctaaatgcccatcagtgatagactggatacagaaaatgtggtatatatatatatgtatatatatatatataaaatggaataccatgcagccataaaaaggaatgagatcatgtcccttgcaggtacatgggtgtggttggaagccattatcctcagcaaactaacacaggaacagaaaactcctcatattctcacttataagtgggagctgaatgatgagaacacaaggaygcagggaggggaacaacacacactggggcctgttggaagctggggagggaggagggacagcatcaggaagaatagctgggctgaataccaaggtgatgggatgatctgtgcaggaaacctccatggcacatgtttacctatgtaacaaacctgcacatcctgcacatgtacccctgaacttgaaataaaagttggaaaaaagaaaaaagggcatgaatcccatcatggggcaccccccctccatgacctcatctatctgattacctcccagaggccccacctccaaataccatcacactgggggttagggcttcaacatatg

SEQ ID NO: 595487 - DNA, 594 bp, Homo sapiens
cattgcagcactattcacaatagcaaagacatggaatcaacctaaatgcccatcagtgatagactggatacagaaaatgtggtatatatatatatgtatatatatatatataaaatggaataccatgcagccataaaaaggaatgagatcatgtcccttgcaggtacatgggtgtggttggaagccattatcctcagcaaactaacacaggaacagaaaactcctcatattctcacttataagtgggagctgaatgatgagaacacaaggacgcagggaggggaacaacacacactggggcctgttggaagctggggagggaggagggacagcatcaggaagaatagctgggctgaataccaaggtgatgggatgatctgtgcaggaaacctccatggcacatgtttayctatgtaacaaacctgcacatcctgcacatgtacccctgaacttgaaataaaagttggaaaaaagaaaaaagggcatgaatcccatcatggggcaccccccctccatgacctcatctatctgattacctcccagaggccccacctccaaataccatcacactgggggttagggcttcaacatatg

SEQ ID NO: 595488 - DNA, 594 bp, Homo sapiens
cattgcagcactattcacaatagcaaagacatggaatcaacctaaatgcccatcagtgatagactggatacagaaaatgtggtatatatatatatgtatatatatatatataaaatggaataccatgcagccataaaaaggaatgagatcatgtcccttgcaggtacatgggtgtggttggaagccattatcctcagcaaactaacacaggaacagaaaactcctcatattctcacttataagtgggagctgaatgatgagaacacaaggacgcagggaggggaacaacacacactggggcctgttggaagctggggagggaggagggacagcatcaggaagaatagctgggctgaataccaaggtgatgggatgatctgtgcaggaaacctccatggcacatgtttacctatgtaacaaacctgcacatcctgcayatgtacccctgaacttgaaataaaagttggaaaaaagaaaaaagggcatgaatcccatcatggggcaccccccctccatgacctcatctatctgattacctcccagaggccccacctccaaataccatcacactgggggttagggcttcaacatatg

SEQ ID NO: 595489 - DNA, 296 bp, Homo sapiens
gagaattctttgaaaaaaaaaaaccacacacacacacagagtaataattgctgagcasgcataataaagttaaactcagagggtttttaaaccacaccaaaaccctgagaggcgtcagcgtccctgaagctcccgtggccaggctgtgaccacaactccgcctgcagaaggaggtggcagggctgagggggagagcagcgtgcactcgcagcagccatgcaggtcacccagaggggctgcacgacagagcaggactggacaattctgtgcccagtaggatacctggaatgacaaac

SEQ ID NO: 595490 - DNA, 518 bp, Homo sapiens
gaattctggttgcctgagcatcaactgtttaaaagcaaggggatcgtgcctaaaagccctaattattgtcagtagcaattacgaatgtttattaagtgcccatttaaaagccaatattgttatcctggcagtatgaggaagtagtatatttatcatgtagtatttgtcctyaaagatttctaatctacctgggaagctggactatatgtgttaaaacatgatgcaaataaaatcctaggcagtctggctgtgttgagtggagtggtctggaaatgaggtcacaggggtgcggactgcagagaggggcggggaagacctcagagagggacactcagtctgtgggcatgacgaaggacgaggggttggggggctgtgtacgtgtgggcttattgctgaattttgccttattttgctttttcaacttcagtcatctgtaatgaaaggagcttttgctacatgtaagccagccttttagagttgaccaccagttatgtgcacaggacatttgtaggctcttc

SEQ ID NO: 595491 - DNA, 572 bp, Homo sapiens
ggatgatggagggtggtcgctgtggaactgcacttagggctggggaatgtttccctgtagactcactgcagtccattgtaagagtcctgatgttcctagacaataataccttttaaggaattgtaattgcttyaaaaatctccaaacactagaatgtgtatctcccctttgtatgctacctggataatagtataaacatgttcccaactctcagccagcatgagtctagtacagtatttcaactacagccttaggtccaactgttttttttttttttttttttttcttcccccctgagacggagtctcactctgtcgcccagcctggagtgcaatggagcgatctcagctcactgcaacctctgcctcccaggttcaagcgattctccctgcctcagtctcccgagtatctgggattatgggcatgcaccaccacacctggctaattttgtatttttagtagtgtttcgccatgttggccaggctggtcttgaacttccgacctcaggtgatccacccaactcggcctcctaaagttctgggattacaggcatgagccaccttgcctggccc

SEQ ID NO: 595492 - DNA, 559 bp, Homo sapiens
ttgagatattttctatcccatctaaagtgaagtataagttgctgcatttggcccctcctacaaccaagaaagaagcacaatacctagtgggccttttgaattttggaggcaaaacatttctcatttggttgtgttactctgacccatttattcagtgacctaaaaggctgccagttttgagtgggatccagaatagaggaaggctctgcaacaggtccaggctgctgtgcaagccgctatgccacttaggccatatgacccagcagatccaatggtgcttgagatgtcactggcagatagagatgctgtttggagcctttggcaggctcgcataggtgaatcacagtggagggctttaggattttggagcaagaccttgccatcttctgcagatagttattctcctttagagaggcagctcttgacctgttactgtcttttagtagaaactgaacatttgactataggtcwtcaagtccccatgtgacctaaactgcctatcatgaacagggtgctttctgacccatctagccataaagtgtgtcatgcacagcatcat

SEQ ID NO: 595493 - DNA, 561 bp, Homo sapiens
gcaagagcacaaccaaaccttataaaagaggcacctgtggtttttaaattaagcccatttgctgtaattagccagctttatttttcataagcccacttttttcattgttttttaaactatccctgtggtggtcataaacaccatgcagtttttatgggggaggattttgtttctcaaaaccccaggtgaattgaaatcaaatcacctaggccactactaaaggaaagaaataaaaaaagaaattgcgggctctggttaactcagctctagttgtaggygattcaatctaaataaaattgactggcattaatgcagttctgtcttgtacaatctcagtagatttacctttcccttggaggttaatttccagcatggttattattgattcacagcttacatttctgcatgattaaccctttaaaaataactgtgcatccaaaaagaaacacaatttgaaataaaatctcaaggaattccatagaataattgtggccatttaaaaaaatttgaaatatatttaagaatagccaatgatgtttaaaatcaatgcaaaacaattac

SEQ ID NO: 595494 - DNA, 647 bp, Homo sapiens
ctctaattgaaataagttgctttttgctcagagcactggtttcctttctttcatagacagcattagtttctaagcatgagtttatttctttgttgtttgctttctcttcttattggccaataaatggtgagtgctgtttctcttttgcccatattttatcaataagaagttctagtatagtaaatagtggatgatgaatgataattttgttgtaatgtccccctcaaatttcatttctttctacaaatccaacacaatattgggcatgtttacatgcataagtcattgttccctgatggatcatcccttttaccttttctcttcataaagttcatcttatctcaggaggatgcacttatcaattcttcttcaaagtacttcaaatcagtttggtgtcccctttgttgtggaamtttcagtgcctctgaaatatcattgcaagtttcattataatttttttatctccattttccctacccttataggtaacaaattcaaacatgtattcaattcatgatatcttctatcatttcttcctaaactatttacaaacttgtgttcccatgttttcttaatttatctactaattatttttaattttgaacaacttcaattaaaagaatgaataataaccataatagtacaat

SEQ ID NO: 595495 - DNA, 314 bp, Homo sapiens
tgatggatttatcaggagtttccacttgtgcttcttcattccttcttgctatgtggcaagaagtgcagttttcacatcctaatgatttcatctcctttgtcccaaccaatcaatgaccccaattttccaggccctcaccctccataatccccttaaaaaccctagggcttgaggattctgttcacttagtggcctattattaaactctttctcttctgcaaactttgttttctcagtgtattggtctattgctgtgcagcaggtacaggaaactggcaattgtatygcaacattatgggaaaagatgtctgtgg

SEQ ID NO: 595496 - DNA, 618 bp, Homo sapiens
cacagatatggaagaagataaaagttgtatgtaaggaacatgtttacaataggatttaggtaggtagctgtatgtaaccgtctgatgttcacgggagttccttgggctgaggttatgttttggagagtcatgaatgttaagatattaattggaatcataggggtgaatgaggtgtcttattgtatagaaagaaaagagatgagggcacagcacaggattttctggaggaaaaacattgaacagaaaagcatacttcaaaaaagaaaaaaccagggatgtggaatgaaaagaaaatggaaaattcagggagaattaggacaagtatggaagtctgcttgatatgagatgggtcttttatagaatgcaacagataagagagtggcgttagttatacatgggggaagagcagagttgcttcactaaatcattttatatctaagacactaagacagaacaggaagcaggttgagattacctgactgcagattataaaaggagtmattccagttgttatctggtagataagtttgctgttctgatctcccaaagatactatattttgagaaactatataaaattttgataaacactagatctggaattctaatataacacaat

SEQ ID NO: 595497 - DNA, 552 bp, Homo sapiens
agttttaaattttagtacagtccagcttattaattttttctttcatgaatcctgcttttgatgtggtatctaaaatctcattgctaaactcaagtttacctaaattttttcccattttatcttttagaagctctgtgtattatctataatagacaatcatatcatctctgaatgaagacaattttatttcattccttccttctgtatgtctttaccttttcttgtcttattgcattagctaggacttccagtatgatgttgaataggagatgtgagaagcatatccgtgccttttttttcctgatcttagggaaaaattccttagtttgtcataattaagtgtgatgttagttgtagggtttttttgttgttgttgaggttgtttcawttttttttttttttgtagatactctttatcaaattgaggaagttcccccattccttctggaggatccagaagaagaatatatttccttgcttttcttagcttctagaggctttctgcatttcttgacatgtggcccttttctccaccttccatgtgcatcactc

SEQ ID NO: 595498 - DNA, 600 bp, Homo sapiens
catgccttaaaagctcatttcttttcaccgattgaataaaattccattgtgaggatgttccacagtttatgtgtctattcrtctattaaaggaaatcttggctgctttcaagttttggtaattacaaataaaagtgctataagcatgcaagttttcgggtgaaagttttcagctcatttgagtaaataccaaggaacacaatggctggattattggtaaaagtttagttttgtcaacacctgaaaactgtcctccaaagtggctgtaccattttggattctcaccagcaatgaatgagacttcctgttgctgtacatcctcattagcatttggttttgtcagtgtttgaattttcaccactctaatgatatgtagtagtatctcttggttactttaatctgcactaccctaatgacagatgatattgagcatcttttcatatgcttatttgctatctatatattttctttggtaaggtgtctgtttggattctttttccatttttaaagcaggttgtttgtttcatactgttgagttttaagagttctttgtatattttaaatgagaatcctttatcagatattatttctgcaaatattt

SEQ ID NO: 595499 - DNA, 600 bp, Homo sapiens
catgccttaaaagctcatttcttttcaccgattgaataaaattccattgtgaggatgttccacagtttatgtgtctattcatctattaaaggaaatcttggctgctttcaagttttggtaattacaaataaaagtgctataagcatgcaagttttcgggtgaaagttttcagctcatttgagtaaataccaaggaacacaatggctggattattggtaaaagtttagttttgtcaacacctgaaaactgtcctccaaagtggctgtaccattttggattctcaccagcaatgaatgagacttcctgttgctgtacatcctcattagcatttggttttgtcagtgtttgaattttcaccactctaatgatatgtagtagtatctcttggttactttaatctgcacyaccctaatgacagatgatattgagcatcttttcatatgcttatttgctatctatatattttctttggtaaggtgtctgtttggattctttttccatttttaaagcaggttgtttgtttcatactgttgagttttaagagttctttgtatattttaaatgagaatcctttatcagatattatttctgcaaatattt

SEQ ID NO: 595500 - DNA, 600 bp, Homo sapiens
catgccttaaaagctcatttcttttcaccgattgaataaaattccattgtgaggatgttccacagtttatgtgtctattcatctattaaaggaaatcttggctgctttcaagttttggtaattacaaataaaagtgctataagcatgcaagttttcgggtgaaagttttcagctcatttgagtaaataccaaggaacacaatggctggattattggtaaaagtttagttttgtcaacacctgaaaactgtcctccaaagtggctgtaccattttggattctcaccagcaatgaatgagacttcctgttgctgtacatcctcattagcatttggttttgtcagtgtttgaattttcaccactctaatgatatgtagtagtatctcttggttactttaatctgcactmccctaatgacagatgatattgagcatcttttcatatgcttatttgctatctatatattttctttggtaaggtgtctgtttggattctttttccatttttaaagcaggttgtttgtttcatactgttgagttttaagagttctttgtatattttaaatgagaatcctttatcagatattatttctgcaaatattt

SEQ ID NO: 595501 - DNA, 631 bp, Homo sapiens
ttttaaattttttgtgcaatttcttctttaagccacatgttatttagaaaggtattgtttaacccctaagttttggaatttttccacctatcttcctgttattgatttccagtttaattccattgtggtctgagagcagacatatcatttctatttttaaaaatttgtgcaagayggctgactagacacaactaggaggaatagctcgcactgatcaagatcaaaccaggccattgggaagactggcacaccccaagcagatctttggagagaagacatttagagtggacggaaagaggacacagatcctaagctgaagagaggaaactgggaacacttcacagagctgccaagcaatgggacttgttcctggtccccagcagctcctgcagaagaggtgacttgaacagggaaggagtggcccactctcaccacagcctcccagaatcctagctacaggagaccccgtggtccccaagaagacttgagctgacaagaagagctgtttagatatgtagcaggtacaggactccagcttgtgcagaccccagagggtttggcctgggaattgcttcagtggaacatggtcagggacacccacctatcaccaaagctcaccatgctcctctaa

SEQ ID NO: 595502 - DNA, 561 bp, Homo sapiens
ttttggaatttttccacctatcttcctgttattgatttccagtttaattccattgtggtctgagagcagacatatcatttctatttttaaaaatttgtgcaagatggctgactagacacaactaggaggaatagctcgcactgatcaagatcaaaccaggccattgggaagactggcacaccccaagcagatctttggagagaagacatttagagtggacggaaagaggacacagatcctaagctgaagagaggaaactgggaacacttcacagagctgccaagcaatgggacttgttcctggtccccagmagctcctgcagaagaggtgacttgaacagggaaggagtggcccactctcaccacagcctcccagaatcctagctacaggagaccccgtggtccccaagaagacttgagctgacaagaagagctgtttagatatgtagcaggtacaggactccagcttgtgcagaccccagagggtttggcctgggaattgcttcagtggaacatggtcagggacacccacctatcaccaaagctcaccatgctcctctaa

SEQ ID NO: 595503 - DNA, 490 bp, Homo sapiens
tcaacgaaactagaattagttatttgaaaggataaataagattgatagattgctagctagactaataaaraaagaaagagaaaggatccaaataaatataatcagaaatgacaaagaggacattacaaccaaccccacagaaatacagaaactctcagagattattatgaacacatctatgcagacaaactagaaaaactaacaagaaagctataaattcctggaaacatacaaactctgatgattgaatcaggaagaaattgaaaccctgaacagaccaataacaaattctgaagttgaatcagtaataaaaagcctaccagccagaaaaacctctagaccagatagtttcacagccaatttctaccacatgtataaagaagagctggaacaaatcctgctgaaagtattacaaataactgaggagaagtgagtctctctaaatctttctgtaaggtcagcatcattctgatactaaaacttgccagac

SEQ ID NO: 595504 - DNA, 615 bp, Homo sapiens
ttgtcaactccaacttgccattattcaccaataaccatcctcttccagaaagagtggaagtggctctctgagagggtgccaggaaggatgacaataaagccatatagaatttagttacagataatgctctctattcagtaaatttcatgatttagtcattggatgtgtcctgagcaaatacttgttattgactacactaaaaatgtttacttcaaaaatcccaggtagaaaattttatcatatggccgttgaaataatgcccatacagagatgcamatccccactggttatgtggtaccaaactcccaagcctccctaatatgggagaaataagagtagttagattcagacaactgaagcacataacaaagttttttgttgttgttttttgtttgtttgtttgtttggagacagagtctcactctgtcgcccaggctggagtgcagtggcgcgatctgggctcactgcaagctccgcctccagggttcaccccattctcctccctcagcctccggagtagctgggaccacaggcgcccaccaccacgcccggctaattttttgtatttttagtagagatggggtttcaccacgttagccaggatggtctcgatct

SEQ ID NO: 595505 - DNA, 408 bp, Homo sapiens
cttgtctaaaaatttgtaataaatatgaacaaataaaaagttaattttttgatatataaaaatcccagcaatcccactactgagtatatacccaaaagaatataatttttcctagcataaagacatatggtcattgcagcattattcacaatagcaaagacatgaactcaacctaaatrcctatcaacagtaggcttgataaaatgtgatacatatacaccatggaatactatgcagccataaaaaagaatgagattgtgtcctttgcaggaacgttaatgaaactgaaggctattatccttagcaaactaacataggaacagaaaacaaaatactgcacattctcacttttaagtgagagttaaataatgaggacacgtggacagaaagaaaagaacaacagacact

SEQ ID NO: 595506 - DNA, 596 bp, Homo sapiens
actgaaatttttgtcaagatccctaatgacctctatgcaatggttttatctyatctcatcaacttcttagcagtatttgagaccatatttttctagaaacactcggtgtcatgtaactcttattgtcttcttatgtccctgaccactctttctaggtacctcactttcttgtcttgccttttactgttaatttttgaagtgtcccatggctatgaactgcatctccttcttttctcttgaaaaatattctcccttcttgtcttaatccagacctatggcttttaaaacatctgtatacttatgattctcaaatttacttcctaaacttgcccttgcactttcttctccacttctataaaatataccaaaatgtgtaatgttaaaatgtatgcattttcctggatatttatttttatttcactccccaaatgcaatcaatgaagaagttatctcaattctaattccaaattatatcccaaacacatccacttctctttatgtgttttctgaatattcttgttcgacttgtccattttatacttgaactacagtagacaactcataactggcctccttgctcttgctgtttttgtacc

SEQ ID NO: 595507 - DNA, 551 bp, Homo sapiens
aatatgaagattataattttttttcttttggacgatttctttcctagtgaatgaataacttaatatctcagtttatacataaaggttcttggggatgacatttgacttttggtcatccactatctattccttttttggaattagtaattaatttttcaataaatttttactttattgtaatgcctctactatgtaaagctctaactattgtacagctcctattatatgcttctagatgctgatggtatagatgaaaacaaggtctctattatctgagaacaggcattggcaactatggcctatgggccaaatttgacccacaatctttttctaataaaatgtagtrgaaacatagtcacactcatttatttatatattgtctatgtatggtttatactataatggcagagtttagttcttatgacagagcccatatggcccaaagcctaaaatacatattatctgttcccttactgaagaggatacaattaggttggggtacagatgtaccattccatggaggatatattggagacttgcctgagactgtt

SEQ ID NO: 595508 - DNA, 620 bp, Homo sapiens
gaaatatttgctaattaaaatttattggattttatcactaattggttatagtggtgaggctggaaaaattaggaactaagcacatatctcaagtttcttattttggtgattaggtggaaagtgattccaacaactraaaaggtgaaaacagcaaacatagtgaggtatactactactactaatatttatttggaggagctactacagcatcatttatacaagttttagtcttaaggacactgagcaaagctcatactaaaggcattgatggaatctctgagtatataagctttttcattgataaaaacttctagttactaagtatatcagtcatacttacttgcttgatcattttgtctttctgtatatgatagatttcaactaatcgtgtgtggttgatagaaatttactgcataattataatcatgacaagtaatgaggattcacaggggcagtatgtttgaggaaggaagatagacttgatataataatacctggagtactcttcaggctttgacactcactggaaactgggtcttggtcccctcacatgagaagaagaattatagcaataatatcagtggaggcaatgatcatatgaaatactatatggaaagtgc

SEQ ID NO: 595509 - DNA, 564 bp, Homo sapiens
aagattcagtgagtatgatgatttgttaatagacacactgaaattgaatggtaaagaggaaaaggaagaaaagagaacacacacacacaaacacacacacacacacacacacacacacccccaggacagaagattaacaaactatgagacaatttcaaaagatataatgtattcattatcgaataccagaaggaaaagagagaatggagtagaaatatttaaggcaatgacagccaagaacttttcaaaaaatgacaaaccaaaaacccaaattaagaaagggatcatcaggctggataaatatcaacaaacaaacaaaaaacaaaccacacaaacatatgcacaccccaaggcatagaaaattcaaactgtaggaatccaaagacaaagataaaatcttaaaggaagccagaggaaaagataaaaccatacctatagaggaaaagggataaaaattacagcagatttatccaaagaaaacatgtgagaaaaaaaacagttaagtaatttrtacaacttaattaaaaataagccaatgaaaaaacggtcaaaggatatgaatag

SEQ ID NO: 595510 - DNA, 620 bp, Homo sapiens
caagtaatttcacttctgttatatatcacaaaataaatataattactaactcaaagagttatctgcattatcatattcattgcagcatcatttataatagccaacatatgacatatggacacaaactaagtgctaaggaatgaatggataaagaaaatgtagtgtgtgtgtgtgtgtgtgtgtgtgtgtgatgtaatataatttttccttaaatagaagaaaatcctgataattgcaacaagatgaatcaacctgatggacattatgttaagtgaaataaaccaggcacataaaggcagatactgcatgatctcacttatatgtgaaatattcaaaagtcaaactcatagaatgagagagtagaaaatcattaacaggagtaagggggtgaagaaaatagtgagatgytggccatgtggtacaaacttacagttataagataaatacgttctgaagacctaatgtatagtatggtaactataattaatgataatgtatacttgaaatttgctaatagagtagatcttaagtattctcacaattataaaaaaggaaactctatgagatgataaatatgttaatcagcttgattttggtaattattccacaatgtatatgta

SEQ ID NO: 595511 - DNA, 620 bp, Homo sapiens
caagtaatttcacttctgttatatatcacaaaataaatataattactaactcaaagagttatctgcattatcatattcattgcagcatcatttataatagccaacatatgacatatggacacaaactaagtgctaaggaatgaatggataaagaaaatgtagtgtgtgtgtgtgtgtgtgtgtgtgtgtgatgtaatataatttttccttaaatagaagaaaatcctgataattgcaacaagatgaatcaacctgatggacattatgttaagtgaaataaaccaggcacataaaggcagatactgcatgatctcacttatatgtgaaatattcaaaagtcaaactcatagaatgagagagtagaaaatcattaacaggagtaagggggtgaagaaaatagtgagatgctggccatgtggtacaaacttacagttataagataaatacgttctgaagacctaatgtatagtatggtaactataattaatgataatgtatacttgaaatttgctaataragtagatcttaagtattctcacaattataaaaaaggaaactctatgagatgataaatatgttaatcagcttgattttggtaattattccacaatgtatatgta

SEQ ID NO: 595512 - DNA, 477 bp, Homo sapiens
gcacacattgttttgtttctgtgtcattttacatatgtaatgcctttcaataactcaacacaatgcaacattttgaattcactttaaacaccaattaagcttaacttgcataataccaatggatttacatgagaaaaatattaagcagtaatggcaaattttgcacaagttcaggtgatgtaaaatggataataattcgtcttgcatataatgactgcaagatgtcatctgttttaagaagaatctatttcagtaggtattaaaatacacaaatatgaccatttgaaaattaacaaaatgtagtatattaaacatttaacaacgtctggcttatcaaagtttaatacatgatagactttcctgtcattattattttgttattaatattattgtctaacgagatattttgacattctcatttttccaacagtgcacagsttactcctaagacaatgatattacggactaaatggacat

SEQ ID NO: 595513 - DNA, 598 bp, Homo sapiens
ttctgcatttttagcaaattatttttgcacttgaaactggtaaaaattccccaagaccattttaagttttcatatctgtaacactttggtgacttttttttctctctgtgtgtgtatatttgagctgttttttcttaacacattttttttttaatttggactaatgtatacattatgctttaattgtaaacgataaaagacattctctatctaaagcagagtgacagagggagagtaattattttttttgaaggagacatggcagaaacatgaggcactggcacaaattaatcataaaagctcagagtataacttgtgtcttctaatctgactctctaaggaaaccctcccatctttgtccctgtcatgaagtttatgaaatctgctatacttgtaattatgataaagtcgcctycttatgagccagatcttctatttttatttgtaagaatatctaattaccactgagctatatattttttactccttggttatttcctctagaaccacaaaaaaaaagtggtttagaacattttattagataattcactcattaaaatagttattgtttgtgtctgtatcatattttggggtcacc

SEQ ID NO: 595514 - DNA, 598 bp, Homo sapiens
ttctgcatttttagcaaattatttttgcacttgaaactggtaaaaattccccaagaccattttaagttttcatatctgtaacactttggtgacttttttttctctctgtgtgtgtatatttgagctgttttttcttaacacattttttttttaatttggactaatgtatacattatgctttaattgtaaacgataaaagacattctctatctaaagcagagtgacagagggagagtaattattttttttgaaggagacatggcagaaacatgaggcactggcacaaattaatcataaaagctcagagtataacttgtgtcttctaatctgactctctaaggaaaccctcccatctttgtccctgtcatgaagtttatgaaatctgctatacttgtaattatgataaagtcgccttcttaygagccagatcttctatttttatttgtaagaatatctaattaccactgagctatatattttttactccttggttatttcctctagaaccacaaaaaaaaagtggtttagaacattttattagataattcactcattaaaatagttattgtttgtgtctgtatcatattttggggtcacc

SEQ ID NO: 595515 - DNA, 640 bp, Homo sapiens
ttcttctacagccataactattaatttgctatttctgcatatgaatatatatctatactattaatatttatctctactttcttctgatactaggtataatagagtaaggtgattctgcttttttccttcaatacatatttccagattaataaagtatcttttccttcccttgctggtttaaataatattttattgtgtatcctattaataccaataatttaactgacctctaaaatttttgttgatttcatatttattcctgcgttctttataaaatattcaattttatatttaaatgtttgagaaaaatatctttcaattattttctcaaaatgtttaattcaatcaatttgttttttaatgaaatttggttattttatttattttaagaatgaattaagaaacaaattattttaaattattctcatacctcatcttgttaatttatgagtgaacatattaaggtagctgttttattttgtatattttaataaatkttataggtatatcatgttatttctgcacatttttgatgtttattactggatgtcttgtatttttgtattgtcaaaattcctgaataaaatgcatttctcctgtattttctaattggatattggtggtatatagacaaattatt

SEQ ID NO: 595516 - DNA, 640 bp, Homo sapiens
ttcttctacagccataactattaatttgctatttctgcatatgaatatatatctatactattaatatttatctctactttcttctgatactaggtataatagagtaaggtgattctgcttttttccttcaatacatatttccagattaataaagtatcttttccttcccttgctggtttaaataatattttattgtgtatcctattaataccaataatttaactgacctctaaaatttttgttgatttcatatttattcctgcgttctttataaaatattcaattttatatttaaatgtttgagaaaaatatctttcaattattttctcaaaatgtttaattcaatcaatttgttttttaatgaaatttggttattttatttattttaagaatgaattaagaaacaaattattttaaattattctcatacctcatcttgttaatttatgagtgaacatattaaggtagctgttttattttgtatattttaataaattttataggtatatcatgttatttctgcacatttttgatgtttattactggatgtcttgtatttttgtattgtcaaaattcmtgaataaaatgcatttctcctgtattttctaattggatattggtggtatatagacaaattatt

SEQ ID NO: 595517 - DNA, 640 bp, Homo sapiens
ttcttctacagccataactattaatttgctatttctgcatatgaatatatatctatactattaatatttatctctactttcttctgatactaggtataatagagtaaggtgattctgcttttttccttcaatacatatttccagattaataaagtatcttttccttcccttgctggtttaaataatattttattgtgtatcctattaataccaataatttaactgacctctaaaatttttgttgatttcatatttattcctgcgttctttataaaatattcaattttatatttaaatgtttgagaaaaatatctttcaattattttctcaaaatgtttaattcaatcaatttgttttttaatgaaatttggttattttatttattttaagaatgaattaagaaacaaattattttaaattattctcatacctcatcttgttaatttatgagtgaacatattaaggtagctgttttattttgtatattttaataaattttataggtatatcatgttatttctgcacatttttgatgtttattactggatgtcttgtatttttgtattgtcaaaattcctgaataaaatgcatttctcytgtattttctaattggatattggtggtatatagacaaattatt

SEQ ID NO: 595518 - DNA, 596 bp, Homo sapiens
aactatgttaatcccagggccatcccttcaaatcgtaaaatctgaggagttagcaccaggaccaattcctcaggttgtagaaccaataggagtagccctagaatcaggaattgaagcaataaattgtgtggatttacttccaaggccacatcttcaagaactgatagtacctgcagaattaactccaagtccatgtastcaagtgaagtctgcagaattaacctcaccgcaaacatctccatttgaggaacatacaatattgactcataaacaagggcttcaggctgtgaaatctacagtgataaaaacagagcctcctaaagttatggaaactgaggatttgaatctaggacacgtgtgtcagaatagggactgtcagaagttaacatcagaagagttacaagtagggactgacttctctaggttcctacaaagctcttcaaccacactcatttcaagctctgtcagaacagcatctgaattaggaggactttgggattctgggatacaggaagtatccagagctttggatataaaaaaccctgggacagatattttgcagcctgaagagacctatatagaccctactatgatac

SEQ ID NO: 595519 - DNA, 596 bp, Homo sapiens
aactatgttaatcccagggccatcccttcaaatcgtaaaatctgaggagttagcaccaggaccaattcctcaggttgtagaaccaataggagtagccctagaatcaggaattgaagcaataaattgtgtggatttacttccaaggccacatcttcaagaactgatagtacctgcagaattaactccaagtccatgtactcaagtgaagtctgmagaattaacctcaccgcaaacatctccatttgaggaacatacaatattgactcataaacaagggcttcaggctgtgaaatctacagtgataaaaacagagcctcctaaagttatggaaactgaggatttgaatctaggacacgtgtgtcagaatagggactgtcagaagttaacatcagaagagttacaagtagggactgacttctctaggttcctacaaagctcttcaaccacactcatttcaagctctgtcagaacagcatctgaattaggaggactttgggattctgggatacaggaagtatccagagctttggatataaaaaaccctgggacagatattttgcagcctgaagagacctatatagaccctactatgatac

SEQ ID NO: 595520 - DNA, 596 bp, Homo sapiens
aactatgttaatcccagggccatcccttcaaatcgtaaaatctgaggagttagcaccaggaccaattcctcaggttgtagaaccaataggagtagccctagaatcaggaattgaagcaataaattgtgtggatttacttccaaggccacatcttcaagaactgatagtacctgcagaattaactccaagtccatgtactcaagtgaagtctgcagaattaacctcaccgcaaacatctccatttgaggaacatacaatattgactcataaacaagggcttcaggctgygaaatctacagtgataaaaacagagcctcctaaagttatggaaactgaggatttgaatctaggacacgtgtgtcagaatagggactgtcagaagttaacatcagaagagttacaagtagggactgacttctctaggttcctacaaagctcttcaaccacactcatttcaagctctgtcagaacagcatctgaattaggaggactttgggattctgggatacaggaagtatccagagctttggatataaaaaaccctgggacagatattttgcagcctgaagagacctatatagaccctactatgatac

SEQ ID NO: 595521 - DNA, 596 bp, Homo sapiens
aactatgttaatcccagggccatcccttcaaatcgtaaaatctgaggagttagcaccaggaccaattcctcaggttgtagaaccaataggagtagccctagaatcaggaattgaagcaataaattgtgtggatttacttccaaggccacatcttcaagaactgatagtacctgcagaattaactccaagtccatgtactcaagtgaagtctgcagaattaacctcaccgcaaacatctccatttgaggaacatacaatattgactcataaacaagggcttcaggctgtgaaatctacagtgataaaaacagagcctcctaaagttatggaaactgaggatttgaatctaggacacgtgtgtcagaatagggactgtcagaagttaacatcagaagagttacaagtagggactgacttctctaggttcctacaaagctcttcaaccacactcatttcaagctctgtcagaacagcatctgaattaggaggactttgggattctgggatacaggaagtatccagagctttggatataaaaaaccctgggacagatrttttgcagcctgaagagacctatatagaccctactatgatac

SEQ ID NO: 595522 - DNA, 390 bp, Homo sapiens
ataggacccaaaatctacacaaaaagtattcacaatgatgaggataaattccaaaattatgcaacacataaagaaccaggaaaatgtgagcaattttcaaaggaacaaatgaccaaaacatgccagccacaaggtgatccagattttgggactatcaaatactstcaacaaaaaagaaatactttcttataaagaaaacacacaagaaatgaaggaaaaggtgggaatcatcagcagaaaaagaaaccataaaaaagaaccaaatgaaatcttagaactgaaaaatacaacatctgaaataaaaactcatcagataggttcagtaatagaatggagatgacagaggaaagagtctgtgaacttgaagaccgttcaatagaaatgacccag

SEQ ID NO: 595523 - DNA, 535 bp, Homo sapiens
atcttactgaaagtattccaaaagaatgagaaagaaggaatcctccctaactcattctatgaagctaatatcgccctgatacaaaaactaggaaaggacataacaaaaaaaaagaaaactagagcccaatatccctggtgaacacagacgcaaaaatcctcaatgaaagactagtaaactgaatccaacagcatatcagaaaaataatacaccctattcaatacaccatgatcaagtgggtttcatcccagggatgctgggatggtttaacatatgcaagtcaataaatatgatacatcacagcaacagaattaaaaacaaaaaccatatgatcatctcaatagatgcagaaaaagcattcaataaaagtcagcatcccaggatcatttgaagctaggagtttgagaccagcccggrcaacaaaacaagacttatttctacaaaaaaacccacaaaaattagctgggcattgtggtacacaactgtagtcccagctactcaggagtctgaggtgggaggatcacttgagcccaag

SEQ ID NO: 595524 - DNA, 576 bp, Homo sapiens
aggagaggtgagtggatcatcagataagccttctgagaactaagaagaaactaccagccccttctctggcctccactttgttcttgcactattggggcgcgtgggggttgtcacctggtatcaagcattctccactagggcacctataggcaggttgaggtcacgcttttgttttgagagtcttctgtggagttacttagaagatgtctaaaatacgtaacaaatctcagacctctctttgagcattgacagtaacatatttagaaagtttgaggaaagtgattttttaaaagttcatcaatactatgtaatactacgataaaaccaacagcccaataatagcaacaaaactccctgtcaccatttggtgtcgcctcttctttcctggctgtacratttatagaagggggaggaagactttagaattttacttttaggaatccagtacatttttaaaaagctggttgtgttagaggctggcttgtaagaactcgtatgtgtcttcctcatttctgtttttctttgagttgccaaatgttaaggttgggattattcaacccatatggggcatgattt

SEQ ID NO: 595525 - DNA, 406 bp, Homo sapiens
actttgctttgtatgcatgctgtcaccagaagttcaccacttgttagagactctggaggccaggatcaagtctacagatataaaaactgcacctcgtcccaccctgttgtgctatctgcttctcaaagtttctggattcttggctagataaatcaggcacataagataagcacatggtgggtttgaatctattttttctttgctcatccatccacgacccatcataactgctgcagcatacaaaacacttggcatagtacaaaacacttagcatagtacaaaacccaggaagagcactcagtcagtgttggcaccttcaaaccctccattccagggagataagakcatcatggttagattctctactttctcatcacttttagttattcaaacagcattatcaggg

SEQ ID NO: 595526 - DNA, 414 bp, Homo sapiens
cacaatgctggttcaacctccttgggagtggcattaggggaacaggtgtctcacaaccaacaaccacaagtctaggcagcctttaagctttccacttgttgctctcagagctgcataaaaagacctaaattaycatcgaccacagaagagatctccttttcactccctcagggtggagatcagataatttgaaaagaatgataaaatccacaggcctaaaatgaactccaaagtattaaaaacttgaagatgacttggtcccatggccaacctcacccagctctaacttctggggctcaggatactacactttatgtagaagtccacaggaaaccaccataatataggtgggacctttgaaagacattttattacccaggatattctccattgcatcatagctttgtagtaaca

SEQ ID NO: 595527 - DNA, 598 bp, Homo sapiens
tcaagaactatctgtaatcctcatctgcataacaagtgaaaaataagtatttattgaatgaacaggttacgcatttaaatttactttcctttgagaatatattttaattatccatattcttgtttaaaaggaaatatggtaagaaaccagtacatgttttttaaaacttcattctatataactgaatatattcttactgtgtgatctgtcttaacataactattgttgccttaattcttgttatagatgctgtagtcattattgcttaaatctccttaagtcaaagaaattgtcttttagtatttcaaatttacagactgatttgtcttgtaagagtaattttttttttgagacaggatctcgctctgtcgcccaggctggagtgaatcagcatgatcacagctcactgcagtctcaacctcctggactcaagtgttcatcccacctcagcctcctaagtagttgggaacacragcacatgccaccacacttggctagtttttaaaaattttttgtagagatggggactcattatgttgcccagtctggtcttgaacttctaggctcaagtgatcctcccgcctcagcctcccaaagt

SEQ ID NO: 595528 - DNA, 598 bp, Homo sapiens
tcaagaactatctgtaatcctcatctgcataacaagtgaaaaataagtatttattgaatgaacaggttacgcatttaaatttactttcctttgagaatatattttaattatccatattcttgtttaaaaggaaatatggtaagaaaccagtacatgttttttaaaacttcattctatataactgaatatattcttactgtgtgatctgtcttaacataactattgttgccttaattcttgttatagatgctgtagtcattattgcttaaatctccttaagtcaaagaaattgtcttttagtatttcaaatttacagactgatttgtcttgtaagagtaattttttttttgagacaggatctcgctctgtcgcccaggctggagtgaatcagcatgatcacagctcactgcagtctcaacctcctggactcaagtgttcatcccacctcagcctcctaagtagttgggaacacgrgcacatgccaccacacttggctagtttttaaaaattttttgtagagatggggactcattatgttgcccagtctggtcttgaacttctaggctcaagtgatcctcccgcctcagcctcccaaagt

SEQ ID NO: 595529 - DNA, 549 bp, Homo sapiens
ccacagttggaatttctttcttttgggctaggaactaatggccttcctgaaggagagctaaatacaggaatgtagaggtcaacactgtaaggaaaggcataaaaatgaaaaagtaaatgtccctatttcatcaataagtggaatgcaatcctcaggaagatttctgacaggccctaaggcagccaccctaacagagggaggaatgtctcaaaggaggcaggttgagaactcagactctatagatcagccagagattatagaaatgtaaagataatactggttatttcttaycccaaacaagggaaatctgcaatcctcatctccacccccatacctaagactacatttccgacgaccacagaaacttttccttagttatctgctaaggaagttaacaattgtagttggcctcagtagctgggctgagctaggttagtggattcaggaggtaagaacacggattgaggcaattggtccatagcacaatggaaaaaaaataacttttctataaaagtaattctattcttagaaaaaataatctcaaaactg

SEQ ID NO: 595530 - DNA, 422 bp, Homo sapiens
ccacatgaaacgagacactgaatagtacctggtaatcttcaaatttctttctagagcttctttctctgtgcagaggtttttaatgaactccctcctggacccatgcctatgaagatttcccaggtccctgaaccctgtgagcttttctttcagcttcastaatttccctgagctagaaacagacttctcagcaactaaatcttgttcatggtactcaactattagagctacaataatgcttgtcaccaagaggatctaaataaacagtctgcctaagcatttagaagttggctaccttgggaatagcgcctgggtcaatttctgaactagaagacagaacaccaagtctatttctggtttcactagttaaacgttttgtgataatggctgtattcatttcctagggctgccgcagcagaata

SEQ ID NO: 595531 - DNA, 598 bp, Homo sapiens
aaagagtttgataaaataaatattatacaaaattcgaagaaaaaagaaaagagtttctgtttcagtcacaaattagggttattgtgatgtgtatttatgatgaccrttgaacaaatgtgaagaatactgtgaattctatgactttatcaaaatcagccacatccaggagcttgcagttgttgaccaaatgaatgatgacatagagtagttcagatctatcatgtgctcttctatctaatcagtcaatatttccttggccctcaagccaacattcattttttatgtataaccttcttcatgattttgaaattttgatagggtaactgctaatgagttcacaaatgtagcactttaaaaggaaaataaatggagagtgaaaacaacttggctacgtataattgtgggttttaatttttctgtttttaaaataaaaaatggcattgatagtttcaatagcccaagtttttattccagaagatgttgcaataactgttgtcactagattatatacatgtcattttattaagtagattttttttcgtgaaagtaaatcagtgcatttgagggatctaaattttttatgaaatagtggtggtga

SEQ ID NO: 595532 - DNA, 562 bp, Homo sapiens
cattaagtaccaggctgtaaaataattctgataggaactactgaaataaggaaccacttgaattctgtctaccaacaccttctccagagtttcgagtctgtgtaccatccccaacagaaaacacggcggcaaagtcctgattctgctgcccttggaacggctgagaaagagcctgactccagggggaaacaaaatcagcccttctcactgcagcagtcggagcatctggcaccgaccatgagaggcgtcgctcgtsggagacttctcgcttgcctttgtgctgggactgcctctggcgaccctgtcagtctggttccttcctcttgctctctgaacacccgcgtccctcgggggctccagcggttcaagcccagcggttctgtgggaagctcacagaaacacctccacgaggccactccccgctgggcgcggctccacatcggggcctccccgcctaacagcaaacctgcttgttggcacttgcgcgttcctcctcgccagtttcacccggatttggctcggtccgccagcaacccagctccttgctaaattcccagcccta

SEQ ID NO: 595533 - DNA, 562 bp, Homo sapiens
cattaagtaccaggctgtaaaataattctgataggaactactgaaataaggaaccacttgaattctgtctaccaacaccttctccagagtttcgagtctgtgtaccatccccaacagaaaacacggcggcaaagtcctgattctgctgcccttggaacggctgagaaagagcctgactccagggggaaacaaaatcagcccttctcactgcagcagtcggagcatctggcaccgaccatgagaggcgtcgctcgtcsgagacttctcgcttgcctttgtgctgggactgcctctggcgaccctgtcagtctggttccttcctcttgctctctgaacacccgcgtccctcgggggctccagcggttcaagcccagcggttctgtgggaagctcacagaaacacctccacgaggccactccccgctgggcgcggctccacatcggggcctccccgcctaacagcaaacctgcttgttggcacttgcgcgttcctcctcgccagtttcacccggatttggctcggtccgccagcaacccagctccttgctaaattcccagcccta

SEQ ID NO: 595534 - DNA, 507 bp, Homo sapiens
aacgctagtgcgccattataacctttgttcacaggttactcaggatttaagttataatactgacttttaaataaatatgacagagtacaaggtttagacatctctttataggtttgccatcaaaatttttgcagtctcccctctcatcctgggtatggtgtcctagagatcatctgtattttttctttgttggttggttagttttgccagtcaaagtagtagcccatgsgccaaacgtatttgacaactactcttctacagaacatgttgagttaaatgctttaaaatctactctctgcctttgcccaagctaatgactctcttcaaggtatcctagccattgttttctgtttcctcactttgagttcaataatattaaagtagtggctactaagtttttttttaagtaagcttgatctaacaattactgctttttttaattaaagtaacactgacctcaaccaagttttcacattttttgttgttgttatttcaacagaaggggca

SEQ ID NO: 595535 - DNA, 507 bp, Homo sapiens
aacgctagtgcgccattataacctttgttcacaggttactcaggatttaagttataatactgacttttaaataaatatgacagagtacaaggtttagacatctctttataggtttgccatcaaaatttttgcagtctcccctctcatcctgggtatggtgtcctagagatcatctgtattttttctttgttggttggttagttttgccagtcaaagtagtagcccatgcsccaaacgtatttgacaactactcttctacagaacatgttgagttaaatgctttaaaatctactctctgcctttgcccaagctaatgactctcttcaaggtatcctagccattgttttctgtttcctcactttgagttcaataatattaaagtagtggctactaagtttttttttaagtaagcttgatctaacaattactgctttttttaattaaagtaacactgacctcaaccaagttttcacattttttgttgttgttatttcaacagaaggggca

SEQ ID NO: 595536 - DNA, 562 bp, Homo sapiens
gtagctttaggaccctgtgcctctgattcttcactcataaaatgaagatgctgacaacatacatacctgagattaagtaaacccaggcagggcctggcttttagtaagggatcaatacgtattaactatgggcattatggttgtattacygctgttaaaagctgagtggtagcaagaaccataaactgaactacttcttgggaaagagaccaaaactcaagatcaattctgacagcaggataggggtgaatgagggagagaggaagaggaagggttcaactatgcaaagagaaaccacatcagtgttacccatctccaagatgtaagtttacataggccattgacctttgagcttgcttattttaacttatcgccaaaccctatatagattttcttcctgttacaatcaagaatgtaataaatgtcgtataggatcatgtcgcttttttacagagtcccatctctgagagtgacactgaggcatgatctaaggatcttaacctgaattaagtccagggtaccctaaaggttcaaggcaccagccaattaatttaaccacaga

SEQ ID NO: 595537 - DNA, 407 bp, Homo sapiens
ttggacagaaatctgttttaccaaggtagtgaatatggctttgtcaaaatctctgtgtgtttgtgtgtgtgtatgttgaaataagtgcagaattgagataatgatgtggacaacttgggtttacaaaacataaaaaacatggaaaggtaagacaytttctttcttgaatttgaggcaaaaatctctgtccttcctctccacttggcaggctgagaaaaaatgttggtctgaacaactcagagaatccttagtttcatctgcacctcagtcttgtcaaaatgacatgggcgtgtgagcttagttggatttaactggatgtgaacccgagtacatattacaaatgcaaatcaagtcttcatttttttaaccataaaaggtatgaacataaattccaaagctgattttac

SEQ ID NO: 595538 - DNA, 601 bp, Homo sapiens
acaaggccagcctaagaatgaggctggagcaggacaatagagaaactcctttccacttctataataaggttagaaagtcccaattcgcaagctacaaatgtctatctctgtgacagcgataagaggattgagacacccactatgaggtgcaggcacaaagggaaggctgaaagccaagggtggagtagaaacattcagcaaaacgctctggcaacccagctcccaagataaacacaagataaccctccaggatttaaagtctgtgatacactcaaggaaacaataggaacaacaaaactcaaaccagctcagatatggagtagattgagtcaactgcatgcactgttggtctagcaaagagggatgcccattttcaggcacatatattatttctccctgtccttactggagctactcacaatgagtgacattcaatagaagaaatagaaggctcacaaacaagtaagaaraaagagcccactggaaagagataaagcaattaacagacaccgactcagaaatggcccaaatattggaactattggacaggaaattttaaatattattattaataaattataatttctcatggaaaacatgg

SEQ ID NO: 595539 - DNA, 569 bp, Homo sapiens
ggaatagttaaaatgaaagtaaattaaaaagacactttttwtttttaatcactctaaatcgcttttctttagacgttcaaaaatacgctaaagtatcattgaatgtctaaaaaacactggtagaaatgcattaggggtttatatcatatgtaaatataaaatggataacatcaatcaatagcacaaaagatgagggggaagaatcgtcagtatgccattttgtaaattgcagtctaaatgaagcagtatgatgctatttgaaagtacactgttattaatcaatgatgggcattgaaaatcctgtagcagccactacattttaaaaagttgtttataataagctaatcatgaaataaaatagaattatataaatttctcaatcataattagacaaaaaggagacaaaaaggaacaaagaacagatggaacaaatagaaaacaaatagcaagaaagcagattttaatttaactatataaatatttataatttataaaagtatttaaatgcatttatatcagtcagggttctccagagggacagaaccaatagcatatacaagaaagataat

SEQ ID NO: 595540 - DNA, 435 bp, Homo sapiens
tttaaaaattactgtcaactttttccatacaaagatattgaaatctatccaaatctaaagtttttcttatctctttaatattttctatttcatcttcatgttcttatttgcttaatttgttctatgccttaaagatctatgtgtttgtttttatttttaagttgagtgcagagttgacttaatatattcctcagcccattgcacattgtcatcattggtcaattcaaggcttccaccttatctattgttatttttcttcttcttctcaatgtctgcccccattcccctcttacacatgggcaccaccctatttgtgatacaggtcttaaatatgcacatattcctgtaatattattatgtgacrgtatttttaatcttgtgtataggatattttgctgcttaagcttctctgcttcttacttttcgtgcttaaca

SEQ ID NO: 595541 - DNA, 607 bp, Homo sapiens
ttgtcacaggatccttggagtgtcgtttcaccagccagaaacctctgtggctggtggcacctttgcccaagttttgctcaggcccactgggcttgttctgcccactcagcctggcaagcagcactcagtttgcactactggctgagatcccacacctgccaagggagagctaggtgcagggtggtgaggggtgtgtgagtgagcacagggtcctgccactgcacacagccaggcaagccagatgcagccgagcaggcagctccagatgttggcacaggtgccagctctgtgcaaggctgcagctggaccagatgcaccacaagcgccttctgctgtgggcacctccatctggacaaaggggatgcagtggtgcccagaagcttggagatgccrgaaaccgcagagccccaaataaggtgtcacagccctggctcagggaacccctaagtctgggcttctggaagggccgcagctcttctctccttcttatcaccctcaatgtggtgagttggggggaatgtttcagccctgtttgtgttaaagctctttcactcccaccattcagtgggtcccaagttcttgtcccatgtccagggagaatgaggta

SEQ ID NO: 595542 - DNA, 431 bp, Homo sapiens
  misc_feature 1, 2, 3, 4, 5, 6, 7: n = A,T,C or G
nnnnnnncattatcttttttaaatttatctgacagaagggggcctgccttctctgtgatattttgaatttctttgagtttcctcaaaacagctattttgcattatccttctgaaatgtcacatgtctctgtttctccaggattggtccctggtctcttctttagccatttggtgaggtcatgatgctcatctaatgaactaaataagacaccakggaccctccacttcctgaatggtctcgatgcttatggatatttgttgatgtctgggcattgaagagtatttattgtagtttttgcagtctgggcttgtttttgcctctctttcttgggacgaatttccagatattcaaagaacttatgctccaagcccaacaactctatggttcttgcagactcatagaggtgccaccttggtggtcttggatatga

SEQ ID NO: 595543 - DNA, 385 bp, Homo sapiens
gaagggggcctgccttctctgtgatattttgaatttctttgagtttcctcaaaacagctattttgcattatccttctgaaatgtcacatgtctctgtttctccaggattggtccctggtctcttctttagccatttggtgaggtcatgatgctcatctaatgaactaaataagacaccagggaccctccacttcctgaatggtctcgatgcttatggatatttgttgatgtctgggcattgaagagtatttattgtagtttttgcagtctgggcttgtttttgcctctctttcttgggaygaatttccagatattcaaagaacttatgctccaagcccaacaactctatggttcttgcagactcatagaggtgccaccttggtgg

SEQ ID NO: 595544 - DNA, 377 bp, Homo sapiens
agaagggggcctgccttctctgtgatattttgaatttctttgagtttcctcaaaacagctattttgcattatccttctgaaatgtcacatgtctctgtttctccaggattggtccctggtctcttctttagccatttggtgaggtcatgatgctcatctaatgaactaaataagacaccagggaccctccacttcctgaatggtctcgatgcttatggatatttgttgatgtctgggcattgaagagtatttattgtagtttttgcagtctgggcttgtttttgcctctctttcttgggacgaatttccagataytcaaagaacttatgctccaagcccaacaactctatggttcttgcagactcatagaggtgcca

SEQ ID NO: 595545 - DNA, 554 bp, Homo sapiens
agttttttgagaaacctccaaactgttcttcagagtggttgtactattatatattctcaccaacagtgcacaagggcatccttttctccatatgctcatcagcatttgctattgcttgacttttgggtgaaagccatttttgactgaggtgagatgatacctcattttagttttggtttacatttctttgatgatcaatgatgttaagcatgtgtttctatgcttgtttgccatttgtatgtcttcttttgagaaatgtctattcaggtctttcatccattttaatcagattattagactttttcctgtagaattgtttgagmtccttctatattctggttattcatcacttgccagatgaatagtttgcagacagtttctcctattctgtgggttgtctcttcactttattgatcgtttcctttgcaatgcagaagatttttaacttgatgagatctcatttgtccatttctacatgggttgcttgtgcttttgaggtattactcatgaagtttttgcccagactaatgtactggagaatttctctaatgttt

SEQ ID NO: 595546 - DNA, 554 bp, Homo sapiens
agtggtctaatttcattcttctctatatggatgtctagtttttccagcactctttattgaagagacaattttcccccccagtgtatgatctcagtacctttgttgaaaatgagttcattttaggtgtatagagttgtttctgggttctttattgtwttccactggtctatgtgtctgtttttatgccagtaacatgctgttctggttatgttacttctataatataatttgaagtcaggtattatgattcctccagttttgttccttttgttcaggatagctttgggtagcaattgtgagtttttttatggttccgtgtaaattttataattatcttttcaatttctgtgaagaatgttgtttcgatagggattgcattgaatctgtagattgctttggttagtgtggagatttcgataatgttgattcttccaatccatgaacatggaatatcttttcatatttttggtgctctctttgattacttttatcagtgctttatagttttcattatagagatcttgcatttctttggttaattcctaggtaattaa

SEQ ID NO: 595547 - DNA, 554 bp, Homo sapiens
agtggtctaatttcattcttctctatatggatgtctagtttttccagcactctttattgaagagacaattttcccccccagtgtatgatctcagtacctttgttgaaaatgagttcattttaggtgtatagagttgtttctgggttctttattgtattccactggtctatgtgtctgtttttatgccagtaacatgctgttctggttatgttacttctataatataatttgaagtcaggtattatgattcctccagttttgttccttttgttcaggatagctttgggtagcaattgtgagtttttttatggttccrtgtaaattttataattatcttttcaatttctgtgaagaatgttgtttcgatagggattgcattgaatctgtagattgctttggttagtgtggagatttcgataatgttgattcttccaatccatgaacatggaatatcttttcatatttttggtgctctctttgattacttttatcagtgctttatagttttcattatagagatcttgcatttctttggttaattcctaggtaattaa

SEQ ID NO: 595548 - DNA, 445 bp, Homo sapiens
ttttgtactttactctgctgatatatcatgttgattaatttgtatatattgaatcatccctccatacctgggataaatcccacttggtcactatgaatgatctttctaatgtactgttgaatttggtttgctggtattttgttgagaattttttgcatcatcaatgttcatgagtgatattggctcacatgtttctttttttttctatgtctttgactgacttctctttttttattattattttattttattattattatactttaagttttagggtacatgtcgacaatgtgcaggttagttacatatgcatacatgtgccatgctggtgtgctgcacccattaactcrtcatttagcattaggtatatctcctaaagctatccctcccccctcccccgaccccacaacagtccccagagtgtgatgttccccttcctgtgtcc

SEQ ID NO: 595549 - DNA, 553 bp, Homo sapiens
taaatgatgccaaaaagtataacaataaaatcataaagagtataatctgtaacatagttttatgtaaattatcatgttaatatatattagataatatagttcagctatttttaaggcaaaacttcagaaaccacaaagatacatagaaataccacgaaaattgaaagtttttacttattyagtctaagacaaagcaagcatacaaaaaaatttttagataatttattcggaatagggagacagaggatttcaggaatcgtcacaagttcctatcccaccgttttggggttacagtccatcctcccgaatgttatttgacacatgaacacgtaggaacatacttgtaagtgactattacatcaaagaaaaagcaaaaaaaaaaaaaaaaagagacatagctagaaaataaataaaacactgcttattgttgctcatgaaattttggctagagttgagctctaatgaaaatttaaagctctaagaaactgaaactgctaaatatttaaaattttatattataaagaaacacactacccattgtagacaagggtgt

SEQ ID NO: 595550 - DNA, 590 bp, Homo sapiens
agagagtattttttggtgaaaaattatgttagtaataaaatgccagactgttttcaaaagagaagctataaagtatacggccttaatatgcaatgattatatacagtcagtactattgactaaccatgcctggaggggtcctcattctttgtctggcatcagtcatggctctacatccatggggcacattgaggactttgcaaaaatccttcatgcctccattatctgctattaacaatctaactttttttctaagtttgggatatcattttarttcctgaatattatacatgtaattgatttttactttgtccattttttgtccatttgcaattatatatagagagagagacagcatacatttccataattgtaaactaacatttttatagcctttatttcaagcaactttacctgactgaatctgtgcctttccgtcaatcttatcatcatgatgtcatcatgatgttggtacacatacacagtggccatggagttggagttgatgtgtagggatatgggagagaatagattaacatgttaatgttgtttgtattttgtgtttaagtgataagactacaagtggtttt

SEQ ID NO: 595551 - DNA, 590 bp, Homo sapiens
agagagtattttttggtgaaaaattatgttagtaataaaatgccagactgttttcaaaagagaagctataaagtatacggccttaatatgcaatgattatatacagtcagtactattgactaaccatgcctggaggggtcctcattctttgtctggcatcagtcatggctctacatccatggggcacattgaggactttgcaaaaatccttcatgcctccattatctgctattaacaatctaactttttttctaagtttgggatatcattttaattcctgaatattatacatgtaattgatttttactttgtccattttttgtccatttgcaattatatatakagagagagacagcatacatttccataattgtaaactaacatttttatagcctttatttcaagcaactttacctgactgaatctgtgcctttccgtcaatcttatcatcatgatgtcatcatgatgttggtacacatacacagtggccatggagttggagttgatgtgtagggatatgggagagaatagattaacatgttaatgttgtttgtattttgtgtttaagtgataagactacaagtggtttt

SEQ ID NO: 595552 - DNA, 590 bp, Homo sapiens
agagagtattttttggtgaaaaattatgttagtaataaaatgccagactgttttcaaaagagaagctataaagtatacggccttaatatgcaatgattatatacagtcagtactattgactaaccatgcctggaggggtcctcattctttgtctggcatcagtcatggctctacatccatggggcacattgaggactttgcaaaaatccttcatgcctccattatctgctattaacaatctaactttttttctaagtttgggatatcattttaattcctgaatattatacatgtaattgatttttactttgtccattttttgtccatttgcaattatatatagagagaragacagcatacatttccataattgtaaactaacatttttatagcctttatttcaagcaactttacctgactgaatctgtgcctttccgtcaatcttatcatcatgatgtcatcatgatgttggtacacatacacagtggccatggagttggagttgatgtgtagggatatgggagagaatagattaacatgttaatgttgtttgtattttgtgtttaagtgataagactacaagtggtttt

SEQ ID NO: 595553 - DNA, 465 bp, Homo sapiens
gactagttctgagcaatggaatacagtacagagtaataaagtatgaagcctttatgtactttcttctcttgaaagaagaccacatatctcagggagtacaagcctggttggtggagccaccataaccctaggatcctgagtgtccaaatgaaccagcctaaagctgacaaaaaatgaacacatttcactggagaagaaaaaataagcttcagttstgttaagacttcaagacttcagagtgatttttaaaattgtgccatagcacaatttaccctgcttaataaaaaaagatgctgagaggcaaggagattgctttgtttctggagcttggggaaagaaattaaaagtggggaagcagctagctagtggtaaatttttctgtcttccttctgtcctcctgcttttctttaattcttgttctacacgcgaaaaatgcacccattctgtcaattttcaattctatat

SEQ ID NO: 595554 - DNA, 522 bp, Homo sapiens
tccactggggaacctgaaaatccagatcacaggagaaggacttaaccttacctagaggtgaaatggatttagggagccaagcaaaacacaaaagtagaaaagccagcagaaagacccataggcactcccaagtccccagcttgagcccagggaagcaatcccaggcaatatctcacaggggtccttggagaaggcagccagaagaactggggaggggtcacagggtgaaggaagcttctagctaaactttgtaataattttgactgagcatgaattttcctgagcagaatctatgggtggggtgcgaaggagaagtgcaagtatgagtacagaagcaacasgcaaaggcacgaacaggaaggaaggggcagggtctgagacccctgcttgcttcctcagcagagaggcttgtacctggggcgaagatctcagccctacactccagctgcctggatataaatttggtgctgttggcagggcacagtgggagtgagactagcctagctggctacatgagagctg

SEQ ID NO: 595555 - DNA, 522 bp, Homo sapiens
tccactggggaacctgaaaatccagatcacaggagaaggacttaaccttacctagaggtgaaatggatttagggagccaagcaaaacacaaaagtagaaaagccagcagaaagacccataggcactcccaagtccccagcttgagcccagggaagcaatcccaggcaatatctcacaggggtccttggagaaggcagccagaagaactggggaggggtcacagggtgaaggaagcttctagctaaactttgtaataattttgactgagcatgaattttcctgagcagaatctatgggtggggtgcgaaggagaagtgcaagtatgagtacagaagcaacacscaaaggcacgaacaggaaggaaggggcagggtctgagacccctgcttgcttcctcagcagagaggcttgtacctggggcgaagatctcagccctacactccagctgcctggatataaatttggtgctgttggcagggcacagtgggagtgagactagcctagctggctacatgagagctg

SEQ ID NO: 595556 - DNA, 573 bp, Homo sapiens
agtaaaacaattttggacgtcaagaaaactgaacaatattcacaagtctgtaaatgaaaccacacaatatcttcwtgtgggacatacacctgtaatgttggtcatcagtctgtattaaaatgttatataacatggaaaatttaatcttatatgttttaaattaatgatgagatttgcaggctgatatgactgcaaaagtgtggtctagtaattgtttcctaaattcttcacttttttttaattatactttaagttctagggtacatgtgcacaacgtgcagttcttgttacatatgtatacatgtcccatgttggtgtgctgtgctgcacccattaactcgtcatttacattaggtatatctcctaatgctatccctccccactcccccaaccccacaacaggccctggtgtgtgatgttccccaccctgtgtccaagtgttctcattgttcaattcccacctatgagtgagaatgtgcggtgtttgcttttctgtccttaggatagtttgctcagaatgatggacttttttatccaggcaaacttgacaaatagtattctgtttggtttggt

SEQ ID NO: 595557 - DNA, 603 bp, Homo sapiens
taaaaagagctaaacccacatgattacacagaactactagtacgtatgttccacaagggcagggactttagttttgttcataactatatacccaacaccagcacataatgggagagcaaaaatagtcattgaataaatgaaggaatccttctatttccctacaagatcgagagaggctttgtaaggaaagaaaaagagatcaygactacaagttaagtttattttatgtagatatgcaaaggttgtaataatgaagaaaaataagagaaaaagaaaaagcagccaccaatgtttgtagtgtacctacttgtaccaagttcttttaatcctcacaaaactttctaaggtgatatatttacttgcccccattctaagataaggacacttacgcacagagatagtgacttctctaaaagataataccgtttgtcgtaactttaaaaaaaaaaatttttttttgagatggagttttgctcttgtcacccaggctggattgcaatggcacgatctcggctcaccgcaacctccacctcctgggttcaagtgattctcctgcctcagcctcccaagtagctgagagtacaggcacccgccaccacacct

SEQ ID NO: 595558 - DNA, 530 bp, Homo sapiens
agatgttaagtgacttctgcaaagtcttcagctaatgtgtggtaaaatcaggactagatacacatcacctaatgactggctgagcacacatatcctcaaatctctggtttccaacatctgtgctaagaagcaataggacagaatgacacagaccttggactccctgggctcaaaagcctgttttgttactcagtagcttcttacattaggcatccatgttaatttcccagtcccctgttttcttcatcagttcaaygtgggtggtaatcataacagcgtataaacctcatgggttactggtaaaattaaaatagtttatatatatataaaatacttaggatagcatttggtacatctcttgaggaaactgatgcaataaaagctgagtcaagagtcatatgcaaaaatgaaacaatgaaagtcttcttcattgaaaacaaatcatataatattattctcttcattttaagtttttgactgatacatcattttaagatttttatcatcactgtgtaatagggggagtatgg

SEQ ID NO: 595559 - DNA, 548 bp, Homo sapiens
taaaatatggcttcattctccatgttgaaaacaaaggaagagatttttcttcccctcctttttctcagagcatttaccatagaaagtttggaattgtgagttccttctcacctttttgaaatgtatataaatctttttgaagactacattggccttttgtcagctagccttttcttcccttaatgactgaggaatgtctttctcacaaatttggaggacgacaggagatagmattcctataccccaatttctattggagggtgggaccctaactttagtaggctccttgttccaagaggcaaaactacctcttgtcacaaagagataagtttgttttttctccagataaagttaattagctaacacagatggtcactctaattaccaggtaaagtttggataaattatctgtgacaaatggtgttgtcaacccctcttacttgaggactagttattgtttatcttgaaaatatgtatgcaacatctatataaaaaagggagatttctgtttttgcaatctcttagtggattgcttgtgatgtgcatca

SEQ ID NO: 595560 - DNA, 608 bp, Homo sapiens
tgtgcaggggaactgccctttgtaaaaccaccagatcttgtgagacttattcactatcataagaatagcattggaaaaacccacccccatrattcaattatctctcccagggtccctcccatgacacgtggggattatgggagctacgattggagatgagatttgggtagggacacagccaaaccatatcacctatcctaatcctggggcaatcaatatgaagagatatcttgcctgtgaatattttatatcacatggcaaaggatttcacaaatgtaattagggttgataatcagttaatcttaagatggagagattcacttgatcaccattagcataaagatggtattcagaaacgatataacttggaagattgccaaaggaatgaataacgatggaatagagactttcaccaaagactgagcattggtcccccgcccccatactaatagttcaggaagaaaatgagaagctagggaaagatattgagaaggagggagcagtgaggtgggaggagaatcaagagatgatgatagcctggaaatcgtttgaagaaggtatcaaggaagaaagagtgataaactgtgtcaaatgctgatgagtcaagt

SEQ ID NO: 595561 - DNA, 608 bp, Homo sapiens
tgtgcaggggaactgccctttgtaaaaccaccagatcttgtgagacttattcactatcataagaatagcattggaaaaacccacccccataattcaattatctctcccagggtccstcccatgacacgtggggattatgggagctacgattggagatgagatttgggtagggacacagccaaaccatatcacctatcctaatcctggggcaatcaatatgaagagatatcttgcctgtgaatattttatatcacatggcaaaggatttcacaaatgtaattagggttgataatcagttaatcttaagatggagagattcacttgatcaccattagcataaagatggtattcagaaacgatataacttggaagattgccaaaggaatgaataacgatggaatagagactttcaccaaagactgagcattggtcccccgcccccatactaatagttcaggaagaaaatgagaagctagggaaagatattgagaaggagggagcagtgaggtgggaggagaatcaagagatgatgatagcctggaaatcgtttgaagaaggtatcaaggaagaaagagtgataaactgtgtcaaatgctgatgagtcaagt

SEQ ID NO: 595562 - DNA, 608 bp, Homo sapiens
tgtgcaggggaactgccctttgtaaaaccaccagatcttgtgagacttattcactatcataagaatagcattggaaaaacccacccccataattcaattatctctcccagggtccctccyatgacacgtggggattatgggagctacgattggagatgagatttgggtagggacacagccaaaccatatcacctatcctaatcctggggcaatcaatatgaagagatatcttgcctgtgaatattttatatcacatggcaaaggatttcacaaatgtaattagggttgataatcagttaatcttaagatggagagattcacttgatcaccattagcataaagatggtattcagaaacgatataacttggaagattgccaaaggaatgaataacgatggaatagagactttcaccaaagactgagcattggtcccccgcccccatactaatagttcaggaagaaaatgagaagctagggaaagatattgagaaggagggagcagtgaggtgggaggagaatcaagagatgatgatagcctggaaatcgtttgaagaaggtatcaaggaagaaagagtgataaactgtgtcaaatgctgatgagtcaagt

SEQ ID NO: 595563 - DNA, 608 bp, Homo sapiens
tgtgcaggggaactgccctttgtaaaaccaccagatcttgtgagacttattcactatcataagaatagcattggaaaaacccacccccataattcaattatctctcccagggtccctcccatgacacgtggggattatgggagctacgattggagatgagatttgggtagggacacagccaaaccatatcacctatcctaatcctggggcaatcaatatgaagagatatcttgcctgtgaatattttatatcacatggcaaaggatttcacaaatgtaattagggttgataatcagttaatcttaagatggagagattcacttgatcaccattagcataaagatggtattcagaaacgatataacttggaagattgccaaaggaatgaataacgatggaatagagactttcaccaaagactgagcattggtcccccgcccccatactaatagttcaggaagaaaatgagaagctagggaaagatattgagaaggagggagcagtgaggtgggaggagaatcaagagatgatgatagcctggaaatcgtktgaagaaggtatcaaggaagaaagagtgataaactgtgtcaaatgctgatgagtcaagt

SEQ ID NO: 595564 - DNA, 554 bp, Homo sapiens
cctctcttcactcttcacacacacaccttcccagtcactggtaaytatctacactctacttacacgagatcagctattttagctcccacatctgtatgagaatatgtgatttttgtctttgtatgcctagcttatttcacttaacattatgacctccagttctatccctgtttctgcaaatgacaagattttattctctctctctttttttttttttttggccaaatagtattttattgtgtatatgtaacacattttattttccatttatccattgatggacacttaggctaattccatacctgtatgtcttcttttgatacttagctcttttgctcagtttttaagaagattttttgtttctgttattgagttgtttgagctccttatatattctggttattaatcccttgtcaaaaggatagtttgcaaatattttctcccattctatgggttgtctctttgttttgttgattgttttctttgttgtgtaggagcttcttagcttgacatagtcccatttgtctatttctgtgttgattgcttgtgtttta

SEQ ID NO: 595565 - DNA, 554 bp, Homo sapiens
cctctcttcactcttcacacacacaccttcccagtcactggtaactatctacactctacttacacgagatcagctattttagctcccacatctgtatgagaatatgtgatttttgtctttgtatgcctagcttatttcacttaacattatgacctccagttctatccctgtttctgcaaatgacaagattttattctctctctctttttttttttttttsgccaaatagtattttattgtgtatatgtaacacattttattttccatttatccattgatggacacttaggctaattccatacctgtatgtcttcttttgatacttagctcttttgctcagtttttaagaagattttttgtttctgttattgagttgtttgagctccttatatattctggttattaatcccttgtcaaaaggatagtttgcaaatattttctcccattctatgggttgtctctttgttttgttgattgttttctttgttgtgtaggagcttcttagcttgacatagtcccatttgtctatttctgtgttgattgcttgtgtttta

SEQ ID NO: 595566 - DNA, 554 bp, Homo sapiens
cctctcttcactcttcacacacacaccttcccagtcactggtaactatctacactctacttacacgagatcagctattttagctcccacatctgtatgagaatatgtgatttttgtctttgtatgcctagcttatttcacttaacattatgacctccagttctatccctgtttctgcaaatgacaagattttattctctctctctttttttttttttttggccaaatagtattttattgtgtatatgtaacacattttattttccattyatccattgatggacacttaggctaattccatacctgtatgtcttcttttgatacttagctcttttgctcagtttttaagaagattttttgtttctgttattgagttgtttgagctccttatatattctggttattaatcccttgtcaaaaggatagtttgcaaatattttctcccattctatgggttgtctctttgttttgttgattgttttctttgttgtgtaggagcttcttagcttgacatagtcccatttgtctatttctgtgttgattgcttgtgtttta

SEQ ID NO: 595567 - DNA, 522 bp, Homo sapiens
agggtctcactgtgttgccctggctagtcttaaactccttagctgaagtgatcctgccacctcagcctcccaaagttttgggattataggcrtgagccacttcatctggcctcttcattcttttttttttctttctttctttctttctttccttttatttgactgggttgtttcaaaagacctttcttcaaattctaaatttaatttttgcttgttctagtctattgttgatgttctcaattatattcgttatttcattcttgaattcctcagttccaggatttctgtttggttctttcttatgatacttatttctgtgttgaatttctcattcatatcctgaatggtttctgatttctttgtaatatttatcagtgttctcttgtatctcactgagcttctttaatatcatgattttgatttttcatgcattttttagatttctttttaattggaatcttttgctggagaattactgtgttcctttggaggtgtaatgttttctagctttttcacttttct

SEQ ID NO: 595568 - DNA, 512 bp, Homo sapiens
gatttttcatgcattttttagatttctttttaattggaatcttttgctggagaattactgtgttcctttggaggtgtaatgttttctagctttttcacttttcttctatcttacattgatatttgcacaactggtgtaacagttgttttttacaattttttrgatttgcttttgtaggggagaactttttcctgtagatgcatctatagcattgggtgggtgaggcacttgagcttgattataggtatgtggagtagtgtagtcttcatatgatttttcagacttttcattattctccaatgctgtctgtgaaattctcagtggcttaggctgcagttgttagtgaagggtgtggtaaagctttgctggggacaggtacgccaaatgcaccagttcttgggccctactgatggcaagagcaggctgagtatgcctgtcctctggcccctgggaggcatacatgagcaccagtggtattgagttcaggccagccaattcatgggcctccaggc

SEQ ID NO: 595569 - DNA, 561 bp, Homo sapiens
tgcactggtgttaatggtggtagtgaagagctgggtgggcctgtccccaggtggcacatgcaggtgggtaccagtggtggtggtggtggcagtggcaggctgggtgggcccatcctcaggcacccaagaggagtatgcagatgccagcagtggtggacagaacagggtaatctctaggcctccagacaatgcacagaagtactgataggagagccatcaggcagtgcagacattgatgttgcagataggtgcaggctgtggtgggcatggcagggcaatcccgaggaccgcaggtcctgtggcaggcaggctggatattttctcaggcctcctgatgacatgtgcacatgccccaggtgaaagctggaatggggctctctttgtcccaggggctgcctccctggtgtgctacactgcctgttcctcaggttatggaataccatgtgggctagaatgctgagaacycagctacactgctgagtccaatcagtgttgtgctgctgcagccctctgagtaaacacaagggttatgagtggggttccagggatgtggagatccag

SEQ ID NO: 595570 - DNA, 565 bp, Homo sapiens
tggttgctcaggccaaaaactttgaatttatcctttattcttaactttctctcatatcccacacctaatctgtcagcaaattctattggctctaccttcaagacaattccagaatgagctgacttctcaccacctcccttctacttctgtggtgtgagccactgtgatctcttgcttggaggcagtcacmtcctaactgggtttgctgcttccaccactgaccacctaaggtgagctctgagggcagaaaccagaatgatgcttttaaagtctacagtcaagtgactcctcactgaaaacctcctagtggctcctcatctcattcagtattgagggaagcaatgaaaaattatatttctaagtcctgtgctatttaaatcgtaagcttttacattctgctggttgcttctctttttttcctcagctttttattttgaaaaatgttacacctacagaaaagtgccaaaaatataatgaacatccacatttccttaatctagattcacccattcttaacattttgccacatttcctttatctttctcgatatatatctgtatatata

SEQ ID NO: 595571 - DNA, 565 bp, Homo sapiens
tggttgctcaggccaaaaactttgaatttatcctttattcttaactttctctcatatcccacacctaatctgtcagcaaattctattggctctaccttcaagacaattccagaatgagctgacttctcaccacctcccttctacttctgtggtgtgagccactgtgatctcttgcttggaggcagtcacctcctaactgggtttgctgcttccaccactgaccacctaaggtgagctctgagggcagaaaccagaatgatgcttttaaagtctacagtcaagtgactcctcactgaaaacctcctagtggctcctcatctcattcagtattgagggaagsaatgaaaaattatatttctaagtcctgtgctatttaaatcgtaagcttttacattctgctggttgcttctctttttttcctcagctttttattttgaaaaatgttacacctacagaaaagtgccaaaaatataatgaacatccacatttccttaatctagattcacccattcttaacattttgccacatttcctttatctttctcgatatatatctgtatatata

SEQ ID NO: 595572 - DNA, 584 bp, Homo sapiens
aagtagaatcacacagcatttgtctttctgtgactggtatatttcacttaatatcttcaaggttcagccatgttgtaccaggtctcagaatttcttttctttgtaaggctgaataatattctattgcatgtatataccatattttgtatatctattcatccatcaacagtcatttgggttgcttccactttttaatttttatgaataatgctgctatgaacgtaggtgtacaaatatctctgagttcctgttttcagttcttttgggtatactcccagaagtggaattgctggatagtatgataattctattttaagttttttaggacctgccatagtcttttctatggtgactgcactattttatatgcccactaacagtaaacaagtattccaatttctccacatcttttccaacgcttcttattgtctgttttgttttgttggtttggtttgtaatagtattagtattagtagtagtagtagtagtagtagtagtagtagtagtagtagtagyagcagcagcagcggcaacaactatcctacaaggtatgaaaaggtatcttgttttggtttctatttaga

SEQ ID NO: 595573 - DNA, 592 bp, Homo sapiens
cctcccactcttcccctcaagtctcccaaagtccattgtatcattcttatgcctttgcgtcctcatagcttacctcccacatatcggtgagaacatacgatgtttggttttccattcctgagttacttgacatagaataatagtctctaatctcatccaggtcactgcaaatgctgttaattcattcctttttatggctgtgatgtatatacatatatatatatataacagtttctttacccacttgttgattgatgggcatttgggttggttscacaattttgcaattgtgaattgtgctgctataaacatgcatgtacaaatatcttttttgaataatgacttcttttcctctgagtagatacccagtagtgggattgctgtatcaaacggtagttctacttttagttctttgaggaatctccacactgttttccagagtggctgtactagtttacattcccaccagcagtgtagaggtgttccatgttcactgcatccatgccacatctacctttttgtgatttttttgagtatggccattcttgcaggagtaagatggtatcacattgtggttttgatttgcatttcc

SEQ ID NO: 595574 - DNA, 592 bp, Homo sapiens
cctcccactcttcccctcaagtctcccaaagtccattgtatcattcttatgcctttgcgtcctcatagcttacctcccacatatcggtgagaacatacgatgtttggttttccattcctgagttacttgacatagaataatagtctctaatctcatccaggtcactgcaaatgctgttaattcattcctttttatggctgtgatgtatatacatatatatatatataacagtttctttacccacttgttgattgatgggcatttgggttggttgcacaattttgcaattgtgaattgtgctgctataaacatgcawgtacaaatatcttttttgaataatgacttcttttcctctgagtagatacccagtagtgggattgctgtatcaaacggtagttctacttttagttctttgaggaatctccacactgttttccagagtggctgtactagtttacattcccaccagcagtgtagaggtgttccatgttcactgcatccatgccacatctacctttttgtgatttttttgagtatggccattcttgcaggagtaagatggtatcacattgtggttttgatttgcatttcc

SEQ ID NO: 595575 - DNA, 501 bp, Homo sapiens
actgcttaaagaaatccagaatttttctccaaacacatattggattttttattagttgacctccgcagctagaccaaagagctgagatcagactaaagaccaaaaacgtcttttttccctatgagtagtacccctctggttttttatcaaaacgcattcctcttgagttacatattgaataactatctcacatttctcctgaagaattgaattcaccttgttttcacatgttgctatgctgagggcacaaaggattcaacacactctcacaatgcatttacatcactggaatttttgtggcctattccaaagtttttccactaaacagctattgtctgtgtcctccttagattcaaattatgyactagaactccctcatctagattcaacaacaagcttcttcacttttaattccactttcttggtttcctgaagctttttttccctctctagtttgttttcttatcataatctgtatttaactatctctgtattcttcaa

SEQ ID NO: 595576 - DNA, 501 bp, Homo sapiens
actgcttaaagaaatccagaatttttctccaaacacatattggattttttattagttgacctccgcagctagaccaaagagctgagatcagactaaagaccaaaaacgtcttttttccctatgagtagtacccctctggttttttatcaaaacgcattcctcttgagttacatattgaataactatctcacatttctcctgaagaattgaattcaccttgttttcacatgttgctatgctgagggcacaaaggattcaacacactctcacaatgcatttacatcactggaatttttgtggcctattccaaagtttttccactaaacagctattgtctgtgtcctccttagattcaaattatgtactagaactccctcatctwgattcaacaacaagcttcttcacttttaattccactttcttggtttcctgaagctttttttccctctctagtttgttttcttatcataatctgtatttaactatctctgtattcttcaa

SEQ ID NO: 595577 - DNA, 485 bp, Homo sapiens
cttgtcaaagactgatgatcagaagcaagtggatttccagagatgtgacacaagcagaatagcctgggggttctggagacagtgtgggctgtgagtgaggggtggctattcacttgacttctgtaaagaamctgacaacaatctggtaccctgagcactggtattttagggggtatgaggagacagataacacccttggaatggacaaaggtgggtccacaatgagcactggcaggatggagagtggcaaggctttctcaagcacctttgcatgtgtgatcagtagacggggctggttccatcagctggttacagcatttgatgggctagcttttatgcataagtgagacttatctaggattcacagaaatatctgtaggaacactttaagagactaaattaaagtcaggaaaggtttcaaaaattattttggtttgggcacggtggctcacatctgtaatcccaaagctttgggaggcagaggc

SEQ ID NO: 595578 - DNA, 601 bp, Homo sapiens
aaccagggcctcctgactggcttagcaacacccaatttgttccggacccccacaccgtcccattccccacacacattaagaacatgctgaaaattaccttctcccttactaaaatgggtttgaagacttcccagaaaaactccgtgwcttttaaacatcgttgagcctaatttaaatattatctaaaattcaaaatagatcaaatatcatgtctaaaaccagatcacgacatgggacaaagtactgcttggttttcaaactatacactgcttccactcacacacaacatgcacatgccctcattgaaatcattaaacaaccaaagaagagtagtctacctggatcctactagataatgacttggtgaaagttttctcgttgctacaactggttgaaaagaaaaaaatacttctctggactttctttacgcagttgcaaaacactgaagctaagctatggtatcaaatattttgtttctatagtatattatttacgctaaaaccatatgtttcacttatatttacctttatcccaatctaagacaaatggttatattcatttcataaaaagaataggtatccatttctgtgtattcacagat

SEQ ID NO: 595579 - DNA, 601 bp, Homo sapiens
aaccagggcctcctgactggcttagcaacacccaatttgttccggacccccacaccgtcccattccccacacacattaagaacatgctgaaaattaccttctcccttactaaaatgggtttgaagacttcccagaaaaactccgtgacttttaaacatcgttgagcctaatttaaatattatctaaaattcaaaatagatcaaatatcatgtctaaaaccagatcacgacatgggacaaagtactgcttggttttcaaactatacactgcttccactcacacacaacatgcacatgccctcattgaaatcattaaacaaccaaagaagagtagtctacctggatcctactagataatgacttggtgaaagttttctcrttgctacaactggttgaaaagaaaaaaatacttctctggactttctttacgcagttgcaaaacactgaagctaagctatggtatcaaatattttgtttctatagtatattatttacgctaaaaccatatgtttcacttatatttacctttatcccaatctaagacaaatggttatattcatttcataaaaagaataggtatccatttctgtgtattcacagat

SEQ ID NO: 595580 - DNA, 616 bp, Homo sapiens
agtgttgaatcagtttccccctgcaaaacaacgtaacagagctcacctctcccattgaaacttgttctttgaaatagtcctcttgggaggccatttatttattccaaataatttagaaactcacccctttggactcatataaaatgtcataggtcagggttttctggaagcagatgcttcgacagcagtcttcggggtaacagatgaattattagggctcaacacctatgaagggaagaggaagcaggattgggcagaaggagaggttaaactgtgatgccagcctgacaaagcttcggccaacccggggcaggcagctgtgggcaagtattgcttgttagggtgccttgctttggaccaaatggctgtgcctgtatagcctccttgcctagtcactggaagctggctgtcctggaatggcatgacctcgggtgagacagctccctacarctaaactagaccctgaagcagctgacagctggaagctgtcttgctgatcacagtctccatgctggacaccaagtccttccatgaagggggatttgagttaggggacatatgttcatgcctagcacatagaaccagttataaattcaatgaaaaactcgaccttact

SEQ ID NO: 595581 - DNA, 387 bp, Homo sapiens
aaatcagtagagtggagatatgccaaaagtaacagctgtaatcattagaaaccttcatgccactagacctagagagyacctggctataggaatgctttcttcaatatactctcagacaggcatttttaaaaaactttacatgctctaagtgttgtcctttatccatgtaattttggtctgtctttgaaaaatctatctccatgctttctcccattctgattagagggtatgctatttttcccttgaaatgtctcaggctcctggggcctgctgtctaagaagaggccttgtattcactcagttttccacacagcctatttcaaatatcccagttcataactaccttcattgttacacatcaaactcttattcaaaccatgtggctcc

SEQ ID NO: 595582 - DNA, 372 bp, Homo sapiens
ccaaaagtaacagctgtaatcattagaaaccttcatgccactagacctagagagtacctggctataggaatgctttcttcaatatactctcagacaggcatttttaaaaaactttacrtgctctaagtgttgtcctttatccatgtaattttggtctgtctttgaaaaatctatctccatgctttctcccattctgattagagggtatgctatttttcccttgaaatgtctcaggctcctggggcctgctgtctaagaagaggccttgtattcactcagttttccacacagcctatttcaaatatcccagttcataactaccttcattgttacacatcaaactcttattcaaaccatgtggctcctgttcta

SEQ ID NO: 595583 - DNA, 405 bp, Homo sapiens
ctatgctaggagttaagtggatacagtgaaaaaaagttattaccatcagaaagtgaaggtggccacttccacttcccaaaagatgcagtagatgcacattttcctattccttgcactaagtacaacaaaataccaaggatattatataaaaaagaagtataagyagaccgaaaattagggaagatagataagataaggaccttggaaggcaaggaatgatagagtggtggattccctgggtttttttggatcatatatatcccagaattggagctaaagaatctagccacccagaaatgtcaatgagtacagaccaaaaaaaaaagaaaaagaaaaagaaaaaaaactccaaaaatagcctgctctctgtagccaaaggaacaggagtcagtttagtgacacaga

SEQ ID NO: 595584 - DNA, 307 bp, Homo sapiens
gaagtcagcagcaattttctgcaggttcctgacccttaggtgacagcactctgactctggaccaccagagtgcggcaaaattgaaaattgatggctgatcccctgactttcactcttacaggctttgcaatggcttgtaagcaccaaaatccctgaatcaaattatataaaatttctgttttcctgactgaaccatgactgatacaamttatcccctttaatcatttacttctaattataatggtaatagatgaagtataagaaataaatttaaatcaactatgacacccactcagatattacccag

SEQ ID NO: 595585 - DNA, 496 bp, Homo sapiens
gaaagccttgagttctgtgctatttagaatgcctctcaactaaatgctttgtaattaactaattaatgttcacaacacacctgtggcattgctgctactattccatcatttttcctgagtaataaacacattaagactttatatgaagtaatcaataaatgatgacacggaaaacaaatccaggaagtgtctaaattacctggaattcactggtagccaatcgtaacccagccccattcttcacaggcatttaaagttcatgccacagaatttaaagaggctgttacactctgatctrgaacttgtataataaggtcatgaagagacaaaggaggataaatatttaaaaaaaaacacataggatcggagtgccagataaaatacatggtgtctagtcatatttgaattccagataagtccaggacctacataggaaattggcaacttttcacaggcatgttccagaaggaccaaacctttttcctatggcaagatg

SEQ ID NO: 595586 - DNA, 614 bp, Homo sapiens
ttcaaaatgttcctgaacataatacattccattaccaatttcatgtccaaaaattctctctcaagtaattcccagscaggattggcagaagcccaggatagtatattttcaagtgaaaaaataaaatacaattacacagataattacaaagttgtaatctgtcacttatctggaagtcccattgttacttgtgtgcatatacatgaaatagttgaatatgtgcatgccatgcgcaaaagtcagaattgactgctgtaataaaaaaaaaactaaaataacagtggcttaaatgaaacagaagcttatttctctcaaacatatcattctgggtataagcagtccagggctacaaaatacaaaggaattaggatattttcaatcttgttgatttttctacctctagtggacaagccccacttgcatgaatgaagacggattaacaacacttttacattccaggcagtggaaaaatagaatagaggaaaccagaagcattaattaatacgttcttgagttcatatcttgttggccagaacttaaccccaaagacaaaactggttgcaaggaaagatgagtaatgtcatattcattttggtgcctatttcaagagctaa

SEQ ID NO: 595587 - DNA, 498 bp, Homo sapiens
ccatttacatgaaggcattgcagtggatgacatttatagatagcaaaatacaacattttagattgccaaacacagcactgactagctttttatttcataataatttcctaagacagatcagaaaattaaaagatttaaaaaattrtaagtataacattacaaatataaaatatccattgatttaacctcattgatcaaaagtacatgaacaaaatttaaggaaacaaatgagaaattaaattaatagaaaagtattatctacagaaaatattgtgtggatgtaacaatcaagaatatttacagattaatagagagttcaaacattcaatgagaaataatttcttgacctagagtctatttgtctttaaaagtatttttaataagccctgttatcacagtgagcaacctatttaggattggttaaatattttaccactgaagtacctgttatttattgtagtgcattcagcagtcaggaataggtattataaagtacat

SEQ ID NO: 595588 - DNA, 564 bp, Homo sapiens
tttgtctcttttttttttttttttctttgagagagtgtcacactttgtcaccagactggagagcagtggaatgatctcggctcactgcaacctccgcctcctaggttcaagggattctcctgcctcagcttcccaagtagctgggactacaggtatgcgacactccacccagctaatttttgtattttcagtacagatggggtttcaccatgttggctaggacggtcttgatctcttgacctcatgatctgcccacctcggcctcccaaagtgctgggattacaggcatgagccactgcaactggcctgtctctttaaatgagyctagtgttgtatgttgcgggaagtcagggaccctgaacagagggactggctggagccacggcagaggaacataaattgcgaagatttcattttaacatggacatttgtcagttcccaaattaatacttttatactttcttatgactgtcttactttgatctcttaatcctgttatcttcgtaagctgaggatgtacgtcacctcaggaccactgtgataattgtgttaactgtacaaatt

SEQ ID NO: 595589 - DNA, 610 bp, Homo sapiens
ctaacatatgtcaaattaaattgtgtcctatactgacacaccaagaaaagaaagaagcagaagtttaaagacctggaaacttcaaaagaattctctaaggatgcaagggctaaactaccttttcttttgatcctacaaaaaaaaaattagtaaattactaatgtactataaaagcactatcttcctttactaatgaaaggaaattaacgccgggctgggcgtggtgctcatgcctgcaatcccaaggccraggtaggcagatcacctgaggtcaggagttccagaccagcctgaccaacatggtgaaaccccatctctactaaaaatacaaaaattagccaggcgtggtggcccatgcctgtaatcccagctacctgggaggctgaggcagaagaatcgcttgaacctgggaggaggaggttgcagtgagtccagatcacaccattgcactccagcctgggcaacaagagtgaaactccatctcaaaaacaacaacaacaaaacttgtttatccttagttttctgtcctagggctaaggcacggtaaaccctcagtaaatgctcaatgaattactggcaatctaaataaatgaagagatattccatgtac

SEQ ID NO: 595590 - DNA, 610 bp, Homo sapiens
ctaacatatgtcaaattaaattgtgtcctatactgacacaccaagaaaagaaagaagcagaagtttaaagacctggaaacttcaaaagaattctctaaggatgcaagggctaaactaccttttcttttgatcctacaaaaaaaaaattagtaaattactaatgtactataaaagcactatcttcctttactaatgaaaggaaattaacgccgggctgggcgtggtgctcatgcctgcaatcccaaggccaaggtaggcagatcacctgaggtcaggagttccagaccagcctgaccaacrtggtgaaaccccatctctactaaaaatacaaaaattagccaggcgtggtggcccatgcctgtaatcccagctacctgggaggctgaggcagaagaatcgcttgaacctgggaggaggaggttgcagtgagtccagatcacaccattgcactccagcctgggcaacaagagtgaaactccatctcaaaaacaacaacaacaaaacttgtttatccttagttttctgtcctagggctaaggcacggtaaaccctcagtaaatgctcaatgaattactggcaatctaaataaatgaagagatattccatgtac

SEQ ID NO: 595591 - DNA, 538 bp, Homo sapiens
gaattcctgtgacactgctgtttgaacattaggagacagcaatcaaatatatgactgatggatgtttactgaaacatattctgggagacccaartcttaccaaattcagtgtcattattttggatgaagcccatgaaagaactctaactacagtgagtattttaatttattattatttttttattagcaagtagtttgtttgggtagctttttattgtgtagagaattgcctcctcttactttttaatttaatttaattttttagagatggagtcttgctccatcacccaggctggagagcagtggcacgatcatagctcactgcacccttgaactcctgggctcaagtgatcctcccatctcaacctcctgagttgctggtactgcagacgtgcatcaccatgtctggctaatttttaagaatattttttgtagagacagtgtctcgttttgtttccctggcaggtctcgacctcctggcctccgaccttggcctcccaaagtgctgggattacaggtgtgagccactgcacctggc

SEQ ID NO: 595592 - DNA, 538 bp, Homo sapiens
gaattcctgtgacactgctgtttgaacattaggagacagcaatcaaatatatgactgatggatgtttactgaaacatattctgggagacccaaatcttaccaaattcagwgtcattattttggatgaagcccatgaaagaactctaactacagtgagtattttaatttattattatttttttattagcaagtagtttgtttgggtagctttttattgtgtagagaattgcctcctcttactttttaatttaatttaattttttagagatggagtcttgctccatcacccaggctggagagcagtggcacgatcatagctcactgcacccttgaactcctgggctcaagtgatcctcccatctcaacctcctgagttgctggtactgcagacgtgcatcaccatgtctggctaatttttaagaatattttttgtagagacagtgtctcgttttgtttccctggcaggtctcgacctcctggcctccgaccttggcctcccaaagtgctgggattacaggtgtgagccactgcacctggc

SEQ ID NO: 595593 - DNA, 538 bp, Homo sapiens
gaattcctgtgacactgctgtttgaacattaggagacagcaatcaaatatatgactgatggatgtttactgaaacatattctgggagacccaaatcttaccaaattcagtgtcattattttggatgaagcccatgaaagaactctaactacagtgagtattttaatttattattatttttttattagcaagtagtttgtttgggtagctttttattgtgtagagaattgcctcctcttactttttaatttaatttaattttttagagatggagtcttgctccatcacccaggctggagagcagtggcacgatcatagctcactgcacccttgaactcctgggctcaagtgatcctcccayctcaacctcctgagttgctggtactgcagacgtgcatcaccatgtctggctaatttttaagaatattttttgtagagacagtgtctcgttttgtttccctggcaggtctcgacctcctggcctccgaccttggcctcccaaagtgctgggattacaggtgtgagccactgcacctggc

SEQ ID NO: 595594 - DNA, 538 bp, Homo sapiens
gaattcctgtgacactgctgtttgaacattaggagacagcaatcaaatatatgactgatggatgtttactgaaacatattctgggagacccaaatcttaccaaattcagtgtcattattttggatgaagcccatgaaagaactctaactacagtgagtattttaatttattattatttttttattagcaagtagtttgtttgggtagctttttattgtgtagagaattgcctcctcttactttttaatttaatttaattttttagagatggagtcttgctccatcacccaggctggagagcagtggcacgatcatagctcactgcacccttgaactcctgggctcaagtgatcctcccatctcaacctcctgagttgctggtactgcagacgtgcatcaccatgtctggctaatttttaagaatattttttgtagagacagtgtctcgttttgtttccctggcaggtctcracctcctggcctccgaccttggcctcccaaagtgctgggattacaggtgtgagccactgcacctggc

SEQ ID NO: 595595 - DNA, 406 bp, Homo sapiens
ctaagagcaaaagggggttgatctctggctcccctaaacatgcactctggtatagagacaaatttgatcctgagacccccacatagatctgaggcccttcctctccttgccaccctaggtcacaaatccctctgtacagctagacattattttgaacagaagcagagggaagcaggaagaaatgtgaaagattctggatttaaccaaaagaaaatktgttattcaaaagtgactatttatttatttatttatttatattttttgagacagggtctcagtcactcaggctggagtgcagtggcacaatcatagctcactacagcctcaaactcctggactcaagaaatcctcctgctttggcctcctgaatagctgggactacaggtatgcactgccacacccagct

SEQ ID NO: 595596 - DNA, 321 bp, Homo sapiens
gaatttgagtatccgaacattaaaggattggacctaaattctagcaggaggatttttagccacatcaaataatttacgtctcaaagatttagataattagggtaaggatgcttagtaaaacycgaaggttccatcgcgccactgcactccaacctgggcgacagagcgagactccgtctcaaaaaaaaaacaaacaaaaaaaaacctgaaggttcctggaggaaagagatgaactattagccgtgtatttcggtgggaccactcaacataggttcctgtaggttagcaatgtagaaatgtagcgcttcagagccggagcat

SEQ ID NO: 595597 - DNA, 321 bp, Homo sapiens
gaatttgagtatccgaacattaaaggattggacctaaattctagcaggaggatttttagccacatcaaataatttacgtctcaaagatttagataattagggtaaggatgcttagtaaaacccgaaggttccatcgcgccactgcactccaacctgggcgacagagcgagactccgtctcaaaaaaaaaacaaacaaaaaaaaacytgaaggttcctggaggaaagagatgaactattagccgtgtatttcggtgggaccactcaacataggttcctgtaggttagcaatgtagaaatgtagcgcttcagagccggagcat

SEQ ID NO: 595598 - DNA, 327 bp, Homo sapiens
tctctcagccttcacagaattgaagagaattaggatcttgctctgggttgggctttggcttaaggaaatgttgtggctggtttgatcttctatccagtccacgaaaactgtctccatatcagcaagaaggctgtttcactttctcatcattcatgtgttcactggagtagcacctttaatttccttcaggaacttttcgttcgtattcacaacgtggctgtttcrcgcaagagacctagcttttggcctgtctcagttttggacgggccttcctcacgaagcttaatcatttctcacttttgatttaaagtgagagacatgagatgc

SEQ ID NO: 595599 - DNA, 512 bp, Homo sapiens
cacatggacacagggaggggaacatcacacaccagggcctgtcaggggatggtgggctaggggcggaatagcattaggagaaatacctaatgtagatgacaggttgatgggtgtagcaraccaccatggcatgtgtatacctatgtaacaaacctgcactttctgcacgtgtatcccagaacttaaaaaaaaagaaagaagaggaaaaataggtctgcggtgctgctccacagagagcggccaggaccccatttcatctgccaaaagaaaatgtatacgcagactcgtattgctggagtccattatgccttttaagaactatgcctcttaaacagtacggtgcttgtgggtaaatcatccctgccatttttcctattcaaacatgttctggtatctactaacacaactgtattaggtgtgtaaaaggcatctcttccctgagtctaagcagaagtgctacctcgcccccctacctcccatcaaatctgtggctgcataaattgactttataa

SEQ ID NO: 595600 - DNA, 512 bp, Homo sapiens
cacatggacacagggaggggaacatcacacaccagggcctgtcaggggatggtgggctaggggcggaatagcattaggagaaatacctaatgtagatgacaggttgatgggtgtagcaaaccaccatggcatgtgtatacctatgtaacaaacctgcactttctgcacgtgtatcccagarcttaaaaaaaaagaaagaagaggaaaaataggtctgcggtgctgctccacagagagcggccaggaccccatttcatctgccaaaagaaaatgtatacgcagactcgtattgctggagtccattatgccttttaagaactatgcctcttaaacagtacggtgcttgtgggtaaatcatccctgccatttttcctattcaaacatgttctggtatctactaacacaactgtattaggtgtgtaaaaggcatctcttccctgagtctaagcagaagtgctacctcgcccccctacctcccatcaaatctgtggctgcataaattgactttataa

SEQ ID NO: 595601 - DNA, 512 bp, Homo sapiens
cacatggacacagggaggggaacatcacacaccagggcctgtcaggggatggtgggctaggggcggaatagcattaggagaaatacctaatgtagatgacaggttgatgggtgtagcaaaccaccatggcatgtgtatacctatgtaacaaacctgcactttctgcacgtgtatcccagaacttaaaaaaaaagaaagaagaggaaaaataggtctgcggtgctgctccacagagagcggccaggaccccatttcatctgccaaaagaaaatgtatacgcagactcgtattgctggagtccattatgccttttaagamctatgcctcttaaacagtacggtgcttgtgggtaaatcatccctgccatttttcctattcaaacatgttctggtatctactaacacaactgtattaggtgtgtaaaaggcatctcttccctgagtctaagcagaagtgctacctcgcccccctacctcccatcaaatctgtggctgcataaattgactttataa

SEQ ID NO: 595602 - DNA, 512 bp, Homo sapiens
cacatggacacagggaggggaacatcacacaccagggcctgtcaggggatggtgggctaggggcggaatagcattaggagaaatacctaatgtagatgacaggttgatgggtgtagcaaaccaccatggcatgtgtatacctatgtaacaaacctgcactttctgcacgtgtatcccagaacttaaaaaaaaagaaagaagaggaaaaataggtctgcggtgctgctccacagagagcggccaggaccccatttcatctgccaaaagaaaatgtatacgcagactcgtattgctggagtccattatgccttttaagaactatgcctcttaaacagtacggtgcttgtgggtaaatcatccctgccatttttcctattcaaayatgttctggtatctactaacacaactgtattaggtgtgtaaaaggcatctcttccctgagtctaagcagaagtgctacctcgcccccctacctcccatcaaatctgtggctgcataaattgactttataa

SEQ ID NO: 595603 - DNA, 543 bp, Homo sapiens
tcagcatcagttgaaatgattatacggttttggccttcattctgttgatatgatgtatcacattgatttgcatatgttgaatcatccctgcatctcagggataaatcccccttagtcatggtgaattattttttttttggtttgctattattcaggatttttgcatcaatttttatgagtgatattggcctgtagttttatttttttcatgtgtctttgtctggtttkggaatcagggtaatactggcatgatacagtgattttggaactatttctctcttcctctattttttagaatagtttgagtaggactgctactagttcttcattacatatttggtagaattcagcagtgaagccatcaagtcccgggctttttttactgggagactttttattatgcttcagtttcattacttgttactagtctgttcaggttttgaatttatttgtggttcaatctcagtaggttgtatgtgtctgggaatttgtccatttttttccctagatttttccaatttattgacatatagttgctcatag

SEQ ID NO: 595604 - DNA, 626 bp, Homo sapiens
acttacacagcactcaataagtacaagactctctaaatgttcattcctcacaaaactctatgagatacattatagtgctattccccttctacagataatggaactgggacactaaaggttaagtgatgtgctgatacttccaaagctcataaacagaagagtcatccagagccaaactattttggcttcaaagtccaggcacttaracagtgacgctgcccactcactagtaccttctggagaagccactaggatagtctgagaatattactggactactaaacaaattgagattcttgaaagctgaattgtgttgcgtttttaccccatcatcacaaacctttacatttgttcagaccaggaaaataaatgtcagatgccaatgtagtgacactatcaactcccaggtgtaatcaagtagagactgagatccctacaccaagtcaaaaacttttatttctttgcatactatggaccatggtgtcaggaataatcacaacccaaagaatcagggaatacagaattttagagctggaagcatttttaggaattgttcattctttctttgttattacagaaatgaggatactgacttctactgagaggatcgtatttcaagaccatgt

SEQ ID NO: 595605 - DNA, 626 bp, Homo sapiens
acttacacagcactcaataagtacaagactctctaaatgttcattcctcacaaaactctatgagatacattatagtgctattccccttctacagataatggaactgggacactaaaggttaagtgatgtgctgatacttccaaagctcataaacagaagagtcatccagagccaaactattttggcttcaaagtccaggcacttaaacagtgacgctrcccactcactagtaccttctggagaagccactaggatagtctgagaatattactggactactaaacaaattgagattcttgaaagctgaattgtgttgcgtttttaccccatcatcacaaacctttacatttgttcagaccaggaaaataaatgtcagatgccaatgtagtgacactatcaactcccaggtgtaatcaagtagagactgagatccctacaccaagtcaaaaacttttatttctttgcatactatggaccatggtgtcaggaataatcacaacccaaagaatcagggaatacagaattttagagctggaagcatttttaggaattgttcattctttctttgttattacagaaatgaggatactgacttctactgagaggatcgtatttcaagaccatgt

SEQ ID NO: 595606 - DNA, 626 bp, Homo sapiens
acttacacagcactcaataagtacaagactctctaaatgttcattcctcacaaaactctatgagatacattatagtgctattccccttctacagataatggaactgggacactaaaggttaagtgatgtgctgatacttccaaagctcataaacagaagagtcatccagagccaaactattttggcttcaaagtccaggcacttaaacagtgacgctgcccactcactagtaccttctggagaagccactaggatagtctgagaatattactggactactaaacaaattgagattcttgaaagctgaattgtgttgygtttttaccccatcatcacaaacctttacatttgttcagaccaggaaaataaatgtcagatgccaatgtagtgacactatcaactcccaggtgtaatcaagtagagactgagatccctacaccaagtcaaaaacttttatttctttgcatactatggaccatggtgtcaggaataatcacaacccaaagaatcagggaatacagaattttagagctggaagcatttttaggaattgttcattctttctttgttattacagaaatgaggatactgacttctactgagaggatcgtatttcaagaccatgt

SEQ ID NO: 595607 - DNA, 608 bp, Homo sapiens
gtgtgaagtgggaaatcaggggtctcacagccttcagagctgagagccccgaacagggatttacccacatatttattaacagcaaaccagtcattagcattgtttctatagatattaaattaactaaaagtatccctcatgggaaacaaagggatgggttgaattaaaggaataggatgggctagttaactgcagcaggaacttatccttaaggcacagatagctcatgctattgtttgtracttaagaatgcctttaagcggttttctgccctgggcgggctaagtgttccttgccttcattctggtaaacccacaaccttccagcatgggtgttagggccattatgaacatgttacagtgctgcagagattttatttatggccagttttggggccagtttatggccagattttgaggggcctgctcccaaaaatgatacctaccttatactatttctatgaagattaatgtggaagttttttcctactttcctttgtttgttctgttttgcattctcattcttattctgaacaactctataataaggacatgaagattatctaattcagagtttttatgttttattcccaagcacttctaccccct

SEQ ID NO: 595608 - DNA, 608 bp, Homo sapiens
gtgtgaagtgggaaatcaggggtctcacagccttcagagctgagagccccgaacagggatttacccacatatttattaacagcaaaccagtcattagcattgtttctatagatattaaattaactaaaagtatccctcatgggaaacaaagggatgggttgaattaaaggaataggatgggctagttaactgcagcaggaacttatccttaaggcacagatagctcatgctattgtttgtaacttaagaatgcctttaagcggttttctgccctgggcgggctaagtgttccttgccttcattctggtaaacccacaaccttccagcatgggtgttagggccattatgaacatgttacagtgctgcagagattttatttatggccagttttggggccagtttatggccagattttgaggggcctgctcccaaaaatgayacctaccttatactatttctatgaagattaatgtggaagttttttcctactttcctttgtttgttctgttttgcattctcattcttattctgaacaactctataataaggacatgaagattatctaattcagagtttttatgttttattcccaagcacttctaccccct

SEQ ID NO: 595609 - DNA, 509 bp, Homo sapiens
tgaacatgttacagtgctgcagagattttatttatggccagttttggggccagtttatggccagattttgaggggcctgctcccaaaaatgatacctaccttatactatttctatgaagattaatgtgraagttttttcctactttcctttgtttgttctgttttgcattctcattcttattctgaacaactctataataaggacatgaagattatctaattcagagtttttatgttttattcccaagcacttctaccccctcaaataaaaccataggcgtgatcttgatgcatgtaataagccagtaattgacagaatttatatgaagcttaaccctcactgtttgggtatatccatctctcatttctgtaaatctccaaagaaccatggcgagcctcaggattccatacgctccatttgaaaacccatgatttaactcaattccctctttttataatggaaactaatttcagagaggctaagtaacctcttgtcttcccattctatg

SEQ ID NO: 595610 - DNA, 509 bp, Homo sapiens
tgaacatgttacagtgctgcagagattttatttatggccagttttggggccagtttatggccagattttgaggggcctgctcccaaaaatgatacctaccttatactatttctatgaagattaatgtggaagttttttcctactttcctttgtttgttctgttttgcattctcattcttattctgaacaactctataataaggacatgaagattatctaattcagagtttttatgttttattcccaagcacttctaccccctcaaataaaaccataggcgtgatcttgatgcatgtaataagscagtaattgacagaatttatatgaagcttaaccctcactgtttgggtatatccatctctcatttctgtaaatctccaaagaaccatggcgagcctcaggattccatacgctccatttgaaaacccatgatttaactcaattccctctttttataatggaaactaatttcagagaggctaagtaacctcttgtcttcccattctatg

SEQ ID NO: 595611 - DNA, 550 bp, Homo sapiens
gaactttagtgatgtttactttcagcattttggtagtagcaaaaactagacacaaagtgaaaaccttcagtgggcaataattgagtaaatttggttagtatgataccattttagaaaaaaaatgtaagccaacacaactgtgtgtatgtgagttgtctgtgttagttatctattgcaatctaacaagcctccctaaaaattaagtgcttaaaacaacaatcactttatttacccatgattcgaataggttatcartctgagataggctcttctgaataattctttgctagtcttccatagggtaattcatgcagctgtagtcaaatgacagcttgcctggggctgggcagtctgtgatgtccatgtccttccacacaagtctgatggttagtctgttcctcagctgggccatatgctgccagcaagccagcccagctttcttcacataggtttgaaaagcaacttttaaaacctaaggttgcatcactgatatgatttgactgtgtccccacccaaatctcaccttaaattgtagctcccataattccca

SEQ ID NO: 595612 - DNA, 619 bp, Homo sapiens
ccaaacaaatggccttaaacgctgtagttcccaacaggatgaagtatttcacaacctgtagagctgtaggttataatacacataaaactggcactcggtaaaagctttttcctgtcagaatcattgccatttcttccctgtagtgccttttggagaaagtctgagttaacaaatggatcttttccaggtgcagaaagatcagagtcaaatgggtttggatcagatcttgtaacgagaatgtgtcactctttccctccccttgtcaagaaggagtctcttaagaaccggctcaagcatcacttatcattacagcagactggggtgaacagttgtaaaagataatgatagaccaaaccagttcttagctaaggagatgtcatgagccttctgatgaaacctttctctctttgtgatagaaatagtcaaaatgattaaggactactagcaacagaggaaggcatggccaggcactaggaccattctaagacccatcaatatgaggaaatggagccatcgttggccaaaggctcgggtccttcaagtttctaaaattttttgtttgtttgttctgtttrttttttgttcgagatggagttttgctcttgttgctcaggttaca

SEQ ID NO: 595613 - DNA, 592 bp, Homo sapiens
cccacctaatgcactttatatcctaaaatagggagctctccacactctcaccatcgccgtgcccacacatctcatacgtgcatgcactcatgtattactaattctgtggtgtcacagtgtccacactcccatttgcagacttgtccttttgagacagttttttggaaccagggagcacttttcttgatagagagaattctaaatttttttgcacaatcaaaatcttcagtactaaatattcacattagcaacataagaaaagtgtccatataaagactaattgtccatacaacagttcctaatgttacattttagttagatgatctacagtttaggtcacagatactcagacctattccagaatctagccatattcaactttcatacrtcattttttgtcataactaaagatcaaagtagtaggaaaattttcatgatattacaaagagatttttaaaaatacattagcttaaagttatttatcattaggaacctaagttttattcttatttaaagaaccataaatagaatttaaatcaacatctatcaagatctgtctatcatatcaccttccagaagtcaacactgtaaa

SEQ ID NO: 595614 - DNA, 592 bp, Homo sapiens
cccacctaatgcactttatatcctaaaatagggagctctccacactctcaccatcgccgtgcccacacatctcatacgtgcatgcactcatgtattactaattctgtggtgtcacagtgtccacactcccatttgcagacttgtccttttgagacagttttttggaaccagggagcacttttcttgatagagagaattctaaatttttttgcacaatcaaaatcttcagtactaaatattcacattagcaacataagaaaagtgtccatataaagactaattgtccatacaacagttcctaatgttacattttagttagatgatctacagtttaggtcacagatactcagacctattccagaatctagccatattcaactttcatacgtcattttttstcataactaaagatcaaagtagtaggaaaattttcatgatattacaaagagatttttaaaaatacattagcttaaagttatttatcattaggaacctaagttttattcttatttaaagaaccataaatagaatttaaatcaacatctatcaagatctgtctatcatatcaccttccagaagtcaacactgtaaa

SEQ ID NO: 595615 - DNA, 489 bp, Homo sapiens
attccttggataataaccacatgtggcagaatttactagctgatattcatttatttcatcttaaggtaggtagtgcatgagaagcatagggtgatgacaaatgggaaaaaaaactaccactttgaatgkgaactgaaatcctaattcaaatcctttagaatttttaaatagcaaagagattatttgggctttagactaacatgcttctgctatgttcaacttctttcaatatctcatctatatgtataaaggaaaaggagaaatgttacttattaataaacatttttcttgattactaatagcaatccaaatgcttctcaataaatttctcctctatactatttttgccctatgcatcattctgtattattatttttacttctaaaatacgtgttagctcaaaaacctagtttagactgtagaaaggaagcttagcgcaaatgacctctgttcagtggaactgtggcaatcacactgcaggaaagcaaa

SEQ ID NO: 595616 - DNA, 489 bp, Homo sapiens
attccttggataataaccacatgtggcagaatttactagctgatattcatttatttcatcttaaggtaggtagtgcatgagaagcatagggtgatgacaaatgggaaaaaaaactaccactttgaatgggaactgaaatcctaattcaaatcctttagaatttttaaatagcaaagagattayttgggctttagactaacatgcttctgctatgttcaacttctttcaatatctcatctatatgtataaaggaaaaggagaaatgttacttattaataaacatttttcttgattactaatagcaatccaaatgcttctcaataaatttctcctctatactatttttgccctatgcatcattctgtattattatttttacttctaaaatacgtgttagctcaaaaacctagtttagactgtagaaaggaagcttagcgcaaatgacctctgttcagtggaactgtggcaatcacactgcaggaaagcaaa

SEQ ID NO: 595617 - DNA, 489 bp, Homo sapiens
attccttggataataaccacatgtggcagaatttactagctgatattcatttatttcatcttaaggtaggtagtgcatgagaagcatagggtgatgacaaatgggaaaaaaaactaccactttgaatgggaactgaaatcctaattcaaatcctttagaatttttaaatagcaaagagattatttgggctttagactaacatgcttctgctatgttcaacttctttcaatatctcatctatatgtataaaggaaraggagaaatgttacttattaataaacatttttcttgattactaatagcaatccaaatgcttctcaataaatttctcctctatactatttttgccctatgcatcattctgtattattatttttacttctaaaatacgtgttagctcaaaaacctagtttagactgtagaaaggaagcttagcgcaaatgacctctgttcagtggaactgtggcaatcacactgcaggaaagcaaa

SEQ ID NO: 595618 - DNA, 489 bp, Homo sapiens
attccttggataataaccacatgtggcagaatttactagctgatattcatttatttcatcttaaggtaggtagtgcatgagaagcatagggtgatgacaaatgggaaaaaaaactaccactttgaatgggaactgaaatcctaattcaaatcctttagaatttttaaatagcaaagagattatttgggctttagactaacatgcttctgctatgttcaacttctttcaatatctcatctatatgtataaaggaaaaggagaaatgttacttattaataaacatttttcttgattactaatagcaatccaaatgcttctcaataaatttctcctctatactatttttgccctatgcatcattctgtaktattatttttacttctaaaatacgtgttagctcaaaaacctagtttagactgtagaaaggaagcttagcgcaaatgacctctgttcagtggaactgtggcaatcacactgcaggaaagcaaa

SEQ ID NO: 595619 - DNA, 544 bp, Homo sapiens
acaacatgtagctaatgtgggaagtagtgatattgataaataatacttaatgtcatacactttgggcatacaactgaactaataatttccttggtagaaaacttcagcatgatttctattttttaaaaaacacagctttgtctcttatcttccttctaaagctgcgattctcagtaagggctgatttggcctccttatccctcccaagagctatttggcaatgtctggacacaatttgcttgtcacaactggagggggtgctatgccatctagtgggtataggccaggaatgctcaccaaacatctcacaatgcacagagacccccacagcaggaaattatgtagctcaaaatgtcaatagggctgaggttaagaaactcggttctaaagtgttttaamaatttaaagagttttccatggtctcttgacctaatgcacaagatagatatttgtgaattttcctacacagaaaacaaggggcgcaggtcagatttcaggatataagaaatgggaaatgcatttgagatgcatgttaaacaaaccc

SEQ ID NO: 595620 - DNA, 593 bp, Homo sapiens
ttatcattgatcatttatatgaatctgtgtgtaaatatgagtacttgtgtgtaaatatgagtactttgagctttcaaaacactctccctggtccccttgagactcagactcttggggttgaggggagggagaaactttaaatagatcaatcatcacttttaaacaggtactttgaaaccggcttggattctaaaagttacataatttaatagtagtcaggtatgaatgattacagcagtcatgcaattctgctttcttcttctcacatattaaatttttcttgctgttattttttaaactgtggattgttagagcaaggaaccataagtatttgtaattgamagattttttcattgatgatccccaataatttttgcttcgtattttagcacatgaaactgttttgtatttccttatacaatgaggagatatagtccctaagagcattaaaaaaaagtagtgatgtatgaatcattttaattttataatcttaatacacttgacaccatgtttttcagcattttttatttcatttctacttatgtttaggtaagagcagaaaatttgaagaaggaaaaggaaatgcttaaatt

SEQ ID NO: 595621 - DNA, 652 bp, Homo sapiens
tggaaatcgagtccaccatcagcggcagcgtttcagcaacaggacctcaccgcacgcgaccgaagtgcgcgcgcaggcgttggaagctacgaaccctgggaacccgagctcagaggctatccctgatcctcttgcgcacccaattttccggcttccagctccacccacttcaggccttgtagggctctgggaaatgtagtgtttttctcattcttttccgggagcccaatgctgcaccgccctctcagcttccgtttttctccccgctcccctggctctcctatctcggccccgtaaccgctgtccgcacggtggcgccacatacgtactcgtcaccccttggccctccctgaagagctggtgaccttaccgtcaaagccccgggatgccatggatcgtcctcgttggcggcttctggacactgagccactagagggcatcggtcccggtagggccggacggcaggctccgggatascgccacgctctctatggcgcccagaagggggcggggtgcgaccgcagtcgctttggctgaggctctgcggggaagggagggggggcttttacgtcatcaatctgcgccacctgactcccaagtccctggctttggagtgggaagtgaggtgtgggaagtaggtcgctttctgatg

SEQ ID NO: 595622 - DNA, 622 bp, Homo sapiens
ggctaaaatagaatcagaaatagcaattatatgttatattgaaaatactatctaaaaaatgagtatgggttaattttattgtttaattattttactttgaatttaaaatattagtaatattttatccttaatttatctttgtcatgaagactgatttgaatttgagtgttttagatttagctcttactttacaaaaatggaatttttcatcttgtcatttgataagcattctaaatttagttcaaagtagactgctataattgggctatttttttcaggccaaggaacaacaggccagtatggaagagaaattccacaatgaattaaatgcccacataaaactttctaatttgtacaaggtaaatatcccaccacacatgttagtatctaaatgttgcattgttgactgttaggtaactttttaagattaacttttagagtgccgctgatgactcagaagcaaagagcaatgaactaacccgggcagtagaggaactacacaaacttttgaaagaagctggtgaaggtaagtgttttcagttatgggaacattatttttgttattgtactcttttttttyttttacccttgttttgtatagatgattggatttaggtgttag

SEQ ID NO: 595623 - DNA, 600 bp, Homo sapiens
aaagtatacttaactaatggaatattattgtataatgatataaatatctgaaaatcctttcttttatagaaataaaaaaatttcaaaaaccattaaaaaaaaaagaacccaaaamaccttttttttttttttttttttttttgatacggagtctagctctgtcgcccaggctggagtgcagtgacgcaatcttggctcactacaacctccggctcctgggtttaagcaattctctgcctcagcctacaaagtagctgggattacaggtgcgtgccaccatgactggctaatttctgttatttttagtagagacggggtttcaccatcttggccaggctgctcttggactcctgacctcatgatccacccacctcagcctcccaaagtgctgggattacaggcgtcagccaccgtgcctgggcaccaaaggaaacttcttaccattaactgcttcagagtcaagttcacctgactacatcagctgtattatatactacagtctatgtttatgtattttatgtctctgcctccttcagtctgtttataaatataggctgagtatatgttcttatattgaatgcttattatatagcaaggatg

SEQ ID NO: 595624 - DNA, 600 bp, Homo sapiens
aaagtatacttaactaatggaatattattgtataatgatataaatatctgaaaatcctttcttttatagaaataaaaaaatttcaaaaaccattaaaaaaaaaagaacccaaaacaccttttttttttttttttttttttttgatacggagtctrgctctgtcgcccaggctggagtgcagtgacgcaatcttggctcactacaacctccggctcctgggtttaagcaattctctgcctcagcctacaaagtagctgggattacaggtgcgtgccaccatgactggctaatttctgttatttttagtagagacggggtttcaccatcttggccaggctgctcttggactcctgacctcatgatccacccacctcagcctcccaaagtgctgggattacaggcgtcagccaccgtgcctgggcaccaaaggaaacttcttaccattaactgcttcagagtcaagttcacctgactacatcagctgtattatatactacagtctatgtttatgtattttatgtctctgcctccttcagtctgtttataaatataggctgagtatatgttcttatattgaatgcttattatatagcaaggatg

SEQ ID NO: 595625 - DNA, 634 bp, Homo sapiens
gtcaataacgtggctgagggtgacttgatttgttctgcataagattaagtctaatggccaaatattttctataaaattaaagctgatttaaagtcttgtttcaagaatgggatggttttattattgttacatttttaaagttactgaaatgtgtataatgcaagcctaagttagtggtgagatgaaagagcwgttttctgatacttttattttattttcagcaagggtacctacggtacctgaaaacaacgatggcatggaaaacacttcccatttacctgttgttgctgctgtctgttttcgtgattcagcaagtttcatctcaaggtagcttaaccatcgaacatacttttatttaacaactattgctaatcattcagtcttgatttttataacaacggaaatatatttctaaaaatttatatttgcttgagtttaatatactgtacaaccttaaaataatatataacatgtagcctgtttgtaagtgctttggaattctcatctttttctccttttgagagttttgagcttgtgtaaagaataattttggtacttgttatttctatggttctctcgaaagtttaaaaagtgcagacagttcatcataaaattatgctggagctatatagta

SEQ ID NO: 595626 - DNA, 583 bp, Homo sapiens
agcgcattgtacctaaggatggtgtcaaagcttgtgattattggggagggtaaggggagcctggaagtctgtcacttgcacaaggttattgtctagttccaagtaaatgtcttattttaaatagagaagatactgtgagtcaggagtcattaagtaaatagtaaggagtaattatttacaatcagagatgtcctcgactagtaatgaggactttcaatagtttcatcaaaagaatacatgagcatggaataatcttgtctaccattggactttctgatgttaacacgtttgtaaattacctggaaaagacactttaaagataaagtgctagtgtttaatgatgaatttcagttaaaatytgaaggtctgaattttaaattatgagtggtgtttcacttgaatatattttgggccattttattattaacacagaaacatttcctattcaatttaagaaaattgtaattaaagttatttgaaaggtgtatttgctttagaatttgaatgtgaagttgaggaatatattgtgcaatttatgtattggataggtaattatttcaaataagccttggtaagtccctgt

SEQ ID NO: 595627 - DNA, 583 bp, Homo sapiens
agcgcattgtacctaaggatggtgtcaaagcttgtgattattggggagggtaaggggagcctggaagtctgtcacttgcacaaggttattgtctagttccaagtaaatgtcttattttaaatagagaagatactgtgagtcaggagtcattaagtaaatagtaaggagtaattatttacaatcagagatgtcctcgactagtaatgaggactttcaatagtttcatcaaaagaatacatgagcatggaataatcttgtctaccattggactttctgatgttaacacgtttgtaaattacctggaaaagacactttaaagataaagtgctagtgtttaatgatgaatttcagttaaaatctgaaggtctgaattttaaattatgagtggtgtttcacttgaatatattttgggccattttattattaacacagaaacatttcctattcaatttaakaaaattgtaattaaagttatttgaaaggtgtatttgctttagaatttgaatgtgaagttgaggaatatattgtgcaatttatgtattggataggtaattatttcaaataagccttggtaagtccctgt

SEQ ID NO: 595628 - DNA, 659 bp, Homo sapiens
atcttgggccttgtctatctccataactgcatgagccaattccttttaataaatctctttatatacatgtacacacatatacctacagtcatgcattgtctaatgatcagtatgttctgagaaatgtgtccttaggggatttcatcattatgtaagcatcatagcacaaacctagatggtatagtctactatacacctaggtagaggttgcgtagagcttattgctcctaggccacaaacctgtacagcacatttctgtactgactacctataggcaaccataacacaatggtaagcatttgtgtattgaaacctatttaaggccaggcgtgggatcacctcaagggatcacccacctcagcttcccaaagtgctagaattataggcgtgcagccatgcccacccatgtggtctactgttgaccaaaacgttgttatatggcatatgactgtatatatcctgttggtttctccaatacagtatgtcttattatttgtgacacatactggcctggcttaatttgctggaacsttcttttcaggaaatgttgggtgggggaggtggagcccatgcttttttcatgttccctgtctggccagttcctgtgcctggagttgcccttccagctcctgtccaagtcttccctccttcttcacaga

SEQ ID NO: 595629 - DNA, 575 bp, Homo sapiens
gacataactttgcatttctcctgggcaatatctagagtgggattgctggattacatggcaagtgtatatttaactccataagaaactgtcaaactgttttccaaagtggctgtaccattttgcattctcaccagcaatgtaggacaattccagttcttcccttcttcaccagctcttgatattgtcagctgtttgtttagccatcacagtaagcgtaaagtgtcatcttttgtgcttaaagcttgcatttcactaatgactaaagttattgagtcttaatgttcttctctgccatctgtataatttctttggtaaagccttgggtaatctgtgtcaatccagtcttctagctttagttttacaccctttyccaacgcacacaccccacacacaccatacctgactgctgcttaccatagtacttaaatttctgcatttttctggtttgccgaaccagttactgctttttctgtttcagtttccaaaaatgtgttgacatctcctatccagaaagagttactgatacacatgtgtgttcaatctgctgagtttaactgaaatctctagtttttctc

SEQ ID NO: 595630 - DNA, 503 bp, Homo sapiens
attcataatttacaaactcatccagccaaatgtgtatatctagtcttagtatyacattatttccttagcagagccctgactttgacagaatagacctcttgaaggtcctgcacatttagttcagagcagggctgcaaaaaccatagtgcaggcctggtgcctgtgtctgcacatgttggcctggtgccagaggccaagggtgctgctgacttggtgcctggtgggcctgaaacctggggatgtgttgtccagcctggctcttgattggtctggaacctggggtaggactggaggctgggtctgtggattttggcctaataagtaaagccgtgggggcaagactagtacccagtgcagtccagagcctgagactgttggggctggcctggtgctagggcaggcctacagctcagggccactgggctgacccagttctggggctttcctactgtcttgtccactggggttgagctggcagtgggacaagcctgaaagctgaattc

SEQ ID NO: 595631 - DNA, 590 bp, Homo sapiens
acacatataggagtcctgtttacatgcagagcaacctgaaacaatgacaaatgttgtggcaatcaacaatttccatgaatctattcaataaaacagcaaaaaatgagtcatttcagaatgagtttaaattacagaaaactaacaaaaatgtatttaaaggttttttctgaagatgatcacgaagtgctcaaacatttaagtaaaatgtattctgttttaaagccaacctcctgaamtaagttccattagttctaaatttgaaatgacacaagtaggatttttaattatgggagttatttgctattatagggttactattggtgatgtttcagagttactctcatgataggaagaaaatcaaagtgaattaaataagccaaattaaataagatgtttcctctcttcactttatttatattttcagtcatacatttgtctacaaatcatggttttgtttacagtaggttaacaaaggagttcgattttagccatttaatttacaggtcttctaaaagaatgtgatgaagaacttgactttggtatctgaataattcaatgcttatgccctagaaaaggttaccattcccaca

SEQ ID NO: 595632 - DNA, 586 bp, Homo sapiens
tctttcagctgatacccaactttagcaaagtctcagaatataaactcaatgtacaaaaatcactagcattcctatacactaacgacagtgaaacagacagccacaccaggaactcaattccattcacaattgccacaaaaagaataamattcctaggaatacagctagtcagggagatgaaagatctctacaaggagaactacaaaccactgctcaaagaaattagagatgacacaaacaaatgaaaaaacagtccatgctcatggataggaagaatcaataccattaaatgaccttactacccaaagcaatgtatagattcaacgttatttctttccaaatagcaatgaagttcctaacaattagaaaaaacttaaaagtcatatggaactgaaataaaggagcccaaatagccaaggcaatcctaagcgtatttttttgttattttttatttttaattgttgcaggttttgttttgaggacatctgttctggtcctgaattggtcagtaattgacagttattatatatctaaatacatttgtctctttagactttaattatgtgagcgaacaggttggagtgag

SEQ ID NO: 595633 - DNA, 645 bp, Homo sapiens
gccatcaagctacagatggtcttacaaatggaaccccaaatgagctcaactaacaacttctactgaggacacctggactgacccactggccctttcactggcctaaagagttcccttctggaggacactacaactgcagggccccgtcttcacccctatccagcaggaagtagctagatcagtcattgcccaattcccaacagcagttggggtgtcctgtttagaggggggattgagaggtgaagccagctgagcttctgggttgggtggggacttggagaacttttgtgtctagctaaaggattgtaaatgcaccaatcatcactctgtaaaaatgcaccaatcagcactctgtaaaatggaccaatcagtaggacgtgggcagggccaaataagacaataaaagctgtccaccygagccagcagcagcaacctgctcaggtccccttccatgctgtggaagctttgttcttttgctcttcacaataaatcttgatgctgatcactctttgggtctgcactacctttatgagctgtaacactcaccacgagggtctgtggcttcattcctgaagtcagtgagaccacgaatccaccaggaggaacaaacaactccagacacaccacctttaagagctgtaacac

SEQ ID NO: 595634 - DNA, 645 bp, Homo sapiens
gccatcaagctacagatggtcttacaaatggaaccccaaatgagctcaactaacaacttctactgaggacacctggactgacccactggccctttcactggcctaaagagttcccttctggaggacactacaactgcagggccccgtcttcacccctatccagcaggaagtagctagatcagtcattgcccaattcccaacagcagttggggtgtcctgtttagaggggggattgagaggtgaagccagctgagcttctgggttgggtggggacttggagaacttttgtgtctagctaaaggattgtaaatgcaccaatcatcactctgtaaaaatgcaccaatcagcactctgtaaaatggaccaatcagtaggacgtgggcagggccaaataagacaataaaagctgtccacccgagccagcagcagcaacctgctcaggtccccttccatgctgtggaagctttgttcttttgctcttcacaataaatcttgatgctgatcactctttgggtctgcactacctttatgagctgtaacactcaccacgagggtctgtggcttcattcctgaagtcagtgagaccacgaatccaccaggaggaacaaamaactccagacacaccacctttaagagctgtaacac

SEQ ID NO: 595635 - DNA, 482 bp, Homo sapiens
gaagaaaacctaagaaataccattctggatattggccctggcaaagactttataataaagattcaaaaagcaattccacagtaacagaaacgatcaacagagtaaacagacaacctacagaattgcacagaaaaagaaactatcaacaaagtaaacagawaacctacagaatgggagaaaatacttgcaaactatgcaactgacaagggtctagcaaccacaatctataaggactttaaacacatgaacaagcaaaaaacaaacaactacattaaaaagggggcaaaaacatgaacagatacttctcaaaagaagacatacacatggcaacaaggccatgcgaaaatgctcaccattgctaatcgttagagaaatgcaaatcaaaattacagtaagatgccatctcacatcagtcagaatggtcattattaaaagtcaaaaagtaacaaatgctggcaaggttttagagtaaaagtaacgct

SEQ ID NO: 595636 - DNA, 482 bp, Homo sapiens
gaagaaaacctaagaaataccattctggatattggccctggcaaagactttataataaagattcaaaaagcaattccacagtaacagaaacgatcaacagagtaaacagacaacctacagaattgcacagaaaaagaaactatcaacaaagtaaacagaaaacctacagaatgggagaaaatacttgcaaactatgcaactgacaagggtctagcaaccacaatctataaggactttaaacacatgaacaagcaaaaaacaaacaactacattaaaaagggggcaaaaacatgaacagatacttctcaaaagaagacatacacatggcaacaaggccatgcgaaaatgctcaccattgctaatcgttagagaaatgcaaatcaaaattacagtaagatgccatctcacatcartcagaatggtcattattaaaagtcaaaaagtaacaaatgctggcaaggttttagagtaaaagtaacgct

SEQ ID NO: 595637 - DNA, 618 bp, Homo sapiens
cccagttatatggaagaggcaacttggaaatgtgacagcccaygtctcctgtgtcaggggacagtacaggtggcaaaaaaaaaagcacaagctctcatcgcatcccattatgccctagaggagaagccagtgagtctctcattcaccaagatgattagtcaatgatccaggtagttcaatccaaaatcctagctctgcatcagctggaaggacatataaggggaaaacccaagttatcaggatcactgactcaagtttcaccttcatgacctcaagaatttgtctgaaatagaggaaaaaaatgaccaaaatatgcaggatttatgataccataaagaactaaagacacttagttacagccatctagatagttccagaatgcccagatttaacagatgttgacaaagggtatctatcctccccaccccacccaggtgttaggcctaacaccaccacagctatccatcagaaactcaacttcccagtacaaaatactaataggagacactttgattttgcaaagaaaatagtgaatgtaactgggtaaagaaaaaagggaaaattaacaacaaacaatagaagcgaattcatggtctggtatccacgataagaactgcg

SEQ ID NO: 595638 - DNA, 551 bp, Homo sapiens
gaattcatggtctggtatccacgataagaactgcgtgccactcattacaatgaaaagaacactgtgaacatttgttagatctttttttccttttaagttattttgagaatgcacttatgtaggcagaatattacagagaacaaaaaatatatgttacaatgtaagattattttaatgattctgaaagaagggaaaacaatcaaaataaattatgaggaaaacagtataataattgctaatacctattgactattccaagcagtttacacatattaactcctcaaatcctcaggattccgagatagacgttatcttaatactactattaataatattaatactactaaacgtgccattttgcagatgaaggggagacttaactgcaaggtgggcaagtaacgtctaaggtcacaagcttgggaacatagctgggtaaaaatccagacacactyaaagtctaaactccttaacagcagactttctgccctcccaccacaagggtaccagaatgcccaagttaggatgaatctttcaatactctctcactctga

SEQ ID NO: 595639 - DNA, 531 bp, Homo sapiens
gtggctcatgcctgtcatcccagcactttgggaggcagaggtggcaggatcgcttaaggccaggagttcaagaccagccgaggtaaaacagcaagacacccattctctacaaaaagacttaaaaattcgccaggcacagtggtacatgcctatagtcctagctactcagaagactgaggcaggaggatcgtttgagcccaggagctcaaggttacaattagctatgatcgtgccactgcactttagcctgggtgacagtgagacctcatctctttaaaaaaaaaacaaactagttaggactccatgaaggcaaaccatgacaaaagtttgctgttgaatgaggtgtgacrgagacaactgcataacactggaaaaattctggaaaaacctcccgacttagattactttgcaagtattgctgagttctaggtccaccttaaaaaaatgtaaatggaagttgtggctgacaaattatggctgaagtttacacaaggaagatacttcagtcagaggacacttagacaagaaaaa

SEQ ID NO: 595640 - DNA, 531 bp, Homo sapiens
gtggctcatgcctgtcatcccagcactttgggaggcagaggtggcaggatcgcttaaggccaggagttcaagaccagccgaggtaaaacagcaagacacccattctctacaaaaagacttaaaaattcgccaggcacagtggtacatgcctatagtcctagctactcagaagactgaggcaggaggatcgtttgagcccaggagctcaaggttacaattagctatgatcgtgccactgcactttagcctgggtgacagtgagacctcatctctttaaaaaaaaaacaaactagttaggactccatgaaggcaaaccatgacaaaagtttgctgttgaatgaggtgtgacggagacaactgcataacactggaaaaattctggaaaaacctcccracttagattactttgcaagtattgctgagttctaggtccaccttaaaaaaatgtaaatggaagttgtggctgacaaattatggctgaagtttacacaaggaagatacttcagtcagaggacacttagacaagaaaaa

SEQ ID NO: 595641 - DNA, 402 bp, Homo sapiens
tccatatgaattttaggattgggttttttaattctgtgaaaaataatgttggtaagtttgataaggattatattgaatctgtagatttctctggggagatggtcattttaacaatgttgattcttctaacccatgagcatgggatatttttccatttgtytgtgttgtctatgattactttcatcggtgttttgtagttcacctccttgtttaaatatattcccagctgggtttttttttttttttttctggtagctattataaatggggttgactttttgatttggtcctcggctagatcattactgtactagtgtacagaaaagctactgatttctatatgttaatttagtatcctgaaaccttactgaattgatttatcaaatctaagagttttttggt

SEQ ID NO: 595642 - DNA, 404 bp, Homo sapiens
tccatatgaattttaggattgggttttttaattctgtgaaaaataatgttggtaagtttgataaggattatattgaatctgtagatttctctggggagatggtcattttaacaatgttgattcttctaacccatgagcatgggatatttttccatttgtctgkgttgtctatgattactttcatcggtgttttgtagttcacctccttgtttaaatatattcccagctgggtttttttttttttttttctggtagctattataaatggggttgactttttgatttggtcctcggctagatcattactgtactagtgtacagaaaagctactgatttctatatgttaatttagtatcctgaaaccttactgaattgatttatcaaatctaagagttttttggtgg

SEQ ID NO: 595643 - DNA, 403 bp, Homo sapiens
tccatatgaattttaggattgggttttttaattctgtgaaaaataatgttggtaagtttgataaggattatattgaatctgtagatttctctggggagatggtcattttaacaatgttgattcttctaacccatgagcatgggatatttttccatttgtctgtgttgtctatgattacyttcatcggtgttttgtagttcacctccttgtttaaatatattcccagctgggtttttttttttttttttctggtagctattataaatggggttgactttttgatttggtcctcggctagatcattactgtactagtgtacagaaaagctactgatttctatatgttaatttagtatcctgaaaccttactgaattgatttatcaaatctaagagttttttggtg

SEQ ID NO: 595644 - DNA, 616 bp, Homo sapiens
gctgaccttttttactcttatacacactgtggaaagatgagggtaaaattactcttggctcagacttccagggcaggcaggaagccccatctacaccagcttcaatcttccttcacagggaggtgggtgatagtggaacaagccgacctggaaaaggtttcccagagagaagtcagcaagagaagagcagacaccagaataccaagatgatggccttgaagtccaagatgaggaacaggggagaacaaacaattaaaaggaaactagggagggtgtctaatgcattcataaagagagttatttatttgattttaaagccaaaccacagaatgtttaataatttagcatgaaarcctgtttttttattcaaaaatgagaaacctgccactgagactatttataatgtcagccaattggagacccgtacaggaagaagacagtttcctctttgctgcctgggtaggggctacaaaggacaaggctgacagagtctgattcctatagtcttttccctctctaatttctgtggaaaacaaaagattctggctagatctccactttctcctctctactgcctcttctcaaaccactcctgttttggtcaaagttaataact

SEQ ID NO: 595645 - DNA, 568 bp, Homo sapiens
gtcacttcttcagcctcctgaacctggtgccatccccactggagctgacggcacaacagggacccagaggacagcagctcagacgctgaccaggatgctgagccttaaccactcaaactgaggttctgtctaggattaagttcacacaaaackgcaaggaaaagaaacgcccatgacatgtgcactaataaagaaaatgacatagaaaatcacgcaaagagatttgctttccgttttgacagtcaaaacaggcatttgccacacgttgacttgccacagatgtgagcacaaatctcatctccaaaaagctcactgtgatctaaacactagacttcaagtcacaaatctcgtggcaaataagtctgcagaacaattgtttgaggagttcaagctgcttgaaaaatgaagtccaagatatctttctaacagcttattttccacatcactgaagttcggagatggattcatacactaagttcttcctcaatgcctccccagcactgaccccactatattgtaaacatgtgcccccctcattaaactgcaagctccctggaggcaaggatta

SEQ ID NO: 595646 - DNA, 568 bp, Homo sapiens
gtcacttcttcagcctcctgaacctggtgccatccccactggagctgacggcacaacagggacccagaggacagcagctcagacgctgaccaggatgctgagccttaaccactcaaactgaggttctgtctaggattaagttcacacaaaactscaaggaaaagaaacgcccatgacatgtgcactaataaagaaaatgacatagaaaatcacgcaaagagatttgctttccgttttgacagtcaaaacaggcatttgccacacgttgacttgccacagatgtgagcacaaatctcatctccaaaaagctcactgtgatctaaacactagacttcaagtcacaaatctcgtggcaaataagtctgcagaacaattgtttgaggagttcaagctgcttgaaaaatgaagtccaagatatctttctaacagcttattttccacatcactgaagttcggagatggattcatacactaagttcttcctcaatgcctccccagcactgaccccactatattgtaaacatgtgcccccctcattaaactgcaagctccctggaggcaaggatta

SEQ ID NO: 595647 - DNA, 478 bp, Homo sapiens
ggagtcagtttcatgtccttctagtgttctttctattcttttccctttcataaatattttatttgtctaactctgctyacaaagtgttttcatgtttcatctgtctttaagtatatactagctattataaagcctactggcattgtatacaatcatgatttgtattctcaccacatgatttgcctacctattgccaatttcttaatcaaagaagaaaacatgtttacaaagtaaaggatagagatgggaaagacacgggatgagggaaagtatacaaacagtagtattatcagatcatcaagcattttctcttttcttcacattgaaattagaaaatatgagacagctctcttgaatattttggaaaccaactaactcatttatataaagttctcttattataaaatttgtatctgcataattgtaaaaatacgaactgtcaagactgaagccactcacgttttctcaaaatacaaat

SEQ ID NO: 595648 - DNA, 478 bp, Homo sapiens
ggagtcagtttcatgtccttctagtgttctttctattcttttccctttcataaatattttatttgtctaactctgcttacaaagtgttttcatgtttcatctgtctttaagtatayactagctattataaagcctactggcattgtatacaatcatgatttgtattctcaccacatgatttgcctacctattgccaatttcttaatcaaagaagaaaacatgtttacaaagtaaaggatagagatgggaaagacacgggatgagggaaagtatacaaacagtagtattatcagatcatcaagcattttctcttttcttcacattgaaattagaaaatatgagacagctctcttgaatattttggaaaccaactaactcatttatataaagttctcttattataaaatttgtatctgcataattgtaaaaatacgaactgtcaagactgaagccactcacgttttctcaaaatacaaat

SEQ ID NO: 595649 - DNA, 551 bp, Homo sapiens
aggtagacaccaaaggaaagaaacatgttaaaatatcattcttgcacaggtgaaatgggctatcacccagactttcctggacagctaacttttaaatgttaagcattttcaaaacaatgattccagatatttgttaggtaatctcggccacccagcatctcagtgcattcacgtctttctatcaactcgctcagtctcagtacagagagcatagtctagatatccagtgacatagcgcttcattaatctctygataacaggcagcaagacagtacactagtacaccagacctagttatcagaagacctgagttcagtttttatgtctgacatgatctgtgtgaccttgacaagagtctctcagactacaggtttctaatggtaaaacagggaagctagcaaaaataatatctatgttttgccttattctaaagcaaaaattaaagaaaattaatcgttctgttcaatcataaactgacttcctctgaaaatatttattgtgtcctgttactttcaattttattccagcacactttgattcccagtgttttt

SEQ ID NO: 595650 - DNA, 629 bp, Homo sapiens
aaatagtggatttttgtttttcattaggaatggggactacactttcacattcaagattttagtaaggtacaatgaaraagaaacaatatgagttcttatgatgtttttgcatggcagaaacatctggataatataatatcattacatattatatataatttatactgctccaacttcaaataatggctagtagcataagggtgatacattatcataaaatactttaaacacagtaaatgtttctgtccacatgctgcggatattccattgattttgaaaattaccttcagaatcttatttacagaatttcatgggtcagagcagtttatgaaacatagaataaactatctaccttcaaaaaacaatcttcaattcatgttccatttctgatatctttgtttaccagtaaatgatgactccaacaacacaagtgttgtgaaacatcaataacctttaacttctactcctttatgaagtaatgtggcagttgcttttatacacagaggtaatcccagagactgagctgctatttccagctattcagatgagtcatttaacctctttttatcctttaaagataagaatatattgttctttggcctacttcactgggatgaaatgaatattgg

SEQ ID NO: 595651 - DNA, 556 bp, Homo sapiens
aatccctggtatctgggaataagatttttctggagtgtttgcatacgcccgatgtaatcacacatacccttaaaagcagagaacttttgagttaaatccattgaagtagagagtagaatggcggttaccaggggtgtgcggggagggagaggggactggggagatgttggtaaaaggaaccaaaagttcagttagatagaaggaatgaattcaattaatctrttgcacaatatggtgactatagttaataacaatgtattatattcttgaaagcttctaagagtagattttaagtgttctcatcaccaaaaaaataagtatgtgaggttaatgcatgtgactaaatagcacatgcttttttttttttttagatggagttttgctcttgtcgcctaggctggagtgcaatggcgtgatctcagctcactgcaacctctgcctcccaggttcaagagattctcctgcctcagcctcccgagtagcttagattacaagtatgtgccaccacgtctggctaatttttgtacttttagtagagatgaggtttcaccatgtt

SEQ ID NO: 595652 - DNA, 572 bp, Homo sapiens
gccactcctgtactgtggccaaatgactggcctgtttaatgtcttcatctccagtaaaactttaccacagtctgcacaaacaaacacactctcagccagtgtggaaatcatagacactactgacactgtttacagccaataaatcatatagagactatactacggcacatgaccagaattaaagccaaagcaccttatccaacgaacaccacagatacatcttcaggaaaaaagtcctttcttattaaaaaatattcaaaaaatagaaagaagtgactagtacaccaggtgtgcaaatatcaatataaggrcacaagagacatgaaaaagcaaggaaagaagacacctcccaaaaaacacaatcattctcaagcaacaattccaatgaagaaatttgtgaaattccagaaaaataattcaaagtagtgttatttaagaagctcacttagaaacaagataattcagaaaatcaatacaaagaaatcagaaaagcaattcaggatatgaatgagcaatttaccaaagagatagatatcacaaaaaagaaccaaatagaaactgttaaactgatg

SEQ ID NO: 595653 - DNA, 634 bp, Homo sapiens
aaaaaaaaataataatgtgttctaaatttcataagaaaaagcaaaagactcataatatttaacacaatattgaagaagtaaaaaagttggaagactgatactaccgaaacttcaagatacactataaatktacagtaatcaagacagtgtgaggttgatgaagtaaaagacaaatagattaatggaacaaagtagcaaatatagtcaagtgatgtttgacaaaggaacaaagtcaaataaatggaaatataatagtcttttcacaagtggtgctgaaactcaaaatccacatgcaaaaaataaatctacacccagacgttatacctttcacaaaattaactcaaaatgaaccatacatctaaatgtaaacacaaagatataaaacttctaaatgataccacaggagaaaatcttggtgaccttgagtttggtgatgaatttttagatacaacactaaagcctgatgcataaaacaaacaaacaaaaaaaaactcataagttgaagctcattaaaactaaaacttttgctctgcaaaagacactgtgaagagaaagaaaggagaaactatagactaggaaaatatattttcaaagcacatatctgataatggactggtacccaaaatatacaaaa

SEQ ID NO: 595654 - DNA, 570 bp, Homo sapiens
agtgttcgaggcaagtttaggtaatggtgcatttctaataaacagtctttaaaagatattagcatttctgttatttatgagaggctttcagtgtatttttcacatatgtattattagggcagtgtagaaatattattgtgatgtattaatgggctgacctgaggtaaacaataactacatccatgcgtgcatcatacatgcatacaaacttactcattttstttttaagcagactagtagttaagttccaagagagaaaggattctatatcatgaaatgccctgtacgtttttgattctctatctggaatgccaacttgaaatattactttcaataacacattacattttgtattttttagagcataatgtgcaaagtagatgatattatattttaaattaaacaaaattagagaggatctagagaaaccaatgaagtaattagtgtgttttgtttcagtggtacagaatcagactctttatagctgaactcataatgtgtacatttattaaacaaattgccaatttagtaatttataaaggaatattaatttgataaaatattttttaa

SEQ ID NO: 595655 - DNA, 570 bp, Homo sapiens
agtgttcgaggcaagtttaggtaatggtgcatttctaataaacagtctttaaaagatattagcatttctgttatttatgagaggctttcagtgtatttttcacatatgtattattagggcagtgtagaaatattattgtgatgtattaatgggctgacctgaggtaaacaataactacatccatgcgtgcatcatacatgcatacaaacttactcattttctttttaagcagactagtagttaagttccaagagagaaaggattctatatcatgaaatgccctgtacgtttttgattctctatctggaatgccaacttgaaatattactttcaataacacattacattttgtattttttagagcataatgtgcaaagtagrtgatattatattttaaattaaacaaaattagagaggatctagagaaaccaatgaagtaattagtgtgttttgtttcagtggtacagaatcagactctttatagctgaactcataatgtgtacatttattaaacaaattgccaatttagtaatttataaaggaatattaatttgataaaatattttttaa

SEQ ID NO: 595656 - DNA, 541 bp, Homo sapiens
gtcttcaggccagagcaggagaaagagagtaaaaggggaagtgctacacgaactttatacaaccagatcttgtgagaactcattcactatcactagaacagtaagggggaaatctgccttcatgatccaatcacctcccaccaggccctaccttcaacactgggggataacaattcatcatgtgatttgcgtgggaacacagaaccaaatcatattattctgcccttggcccctcccaaattccatgtccttctcttatttcaaaacacaatcatgcctttccagcagttccccagagtcctaactcattccatcattaagtcaaaagtccatatccaaagtctcatctgacatacagcaagtcccttctgcctatgagcctgtaaaacaaaaaacaagctagttacttccaagatacaatgggggtactggcattggttaaatgctcccattccaaaataaaggaattggccaaaaccaagggtctrcaggccccacccaagtccaaaacccagcagtgcctccattaaatcttaaagct

SEQ ID NO: 595657 - DNA, 651 bp, Homo sapiens
ccttccaagctcccttcgatcatttaaatttatattttactctcttatcacaccaagaatttccatagtaaaagttttccttttacaagtacaatatttgtgttattatttgattaacatcagtctttgtcacaaaaatggaattcactaaggataggaaatgttgatttttaccaactgttttatccttaacattttaggataaatcaaggaggattcaaaagaggcactgaatgaatatcggatgaatgaatgaattatttaaaatgccactgaaaacagaaacatttataggaaaaacaatgctttctccaaattgtttgtctttagcagggttaaaaatccactgaattatattgatatgaacaaagcaaaatatacttcactttttatttttaataaatatttttatattctttaagaatctctcccctcactgatctgtcccttgacagagagaggtgagtggctcaatttaattttttcttgtaaattcatcccaattcaataatgtaaacaattgtaactatctgagtctctgtagattttagctcttccccatatcctctttaagttgatgtccaagtgtttaagtcaatatgattktgaaagagaatatatgaaaatttgtgaagaaattgttaataaaac

SEQ ID NO: 595658 - DNA, 611 bp, Homo sapiens
tccaatgatttatcatagctgtgttgcacaaataagtatcttagaaattcaaatgtaataaacaccaataaatatattcttccaaattaactgatctacctttccatatgttttatcaaatctctttctgaatcaccatcatttgctgccttgcatttttccttgaccacttctttaatatatctttcattgtcttcttttagtccttttctctgagtcattaattttaggaatttaattctgcttaggagatatacctaatgttaaatgacgagttaatgggtgcagcacaccaacatcgcacttgtatacatatgtaactaacctgcacattgtgtacatgtaccctaaaacttaaagtataatttwaaaaaaaggaatttaattctgctaatgtttttgtctgtcaacttacaaattatttctacttcccttattcagaccatatgttacctcccttttgtggcatgcttgcaatagcagtctgagctcaggtttagttactcagattctaccataagaatcacctctgctcctaacccattctaaccccttttaaaggttttttctgagtatgcaatgtaagacaatttacccaatgtcgcacagat

SEQ ID NO: 595659 - DNA, 600 bp, Homo sapiens
gaaaagactttctggaaaagatgaaaactgatttttaaagaaaagaagagatttctagacttaaggagtaacttaagtaaaggcctagaacagaaaacctacaataagctgattggtctgctaacagtgataagtgtgaggtagaataaagcygttatccctttagagacagaaagtgaggcaatattgaaagtcaggtgatccaaaaaagtgaaccttctaggaatggtcatcgaaagtgaatcctagagctctagggttcctccaacttttgttcttgaaactttctaagattaaactgaaaacgtattttcttttgtagtcacatctctcgtagcccttcttagtaagtaaacttaaactattgggaaaagaaaaaggactttttcctcccccttggttaaaataatagtactgtcacagtctttcaaaacatgtgacaactaaaaacatagaaatggcttaaaatgtgaaccaaatcaagccttcaaattttagaaaaaatataaaactacaccccgaattttcagatgttttattttagaatagtttctgattcacagaaaaattttagcaataatttctacttgatttatgtga

SEQ ID NO: 595660 - DNA, 600 bp, Homo sapiens
gaaaagactttctggaaaagatgaaaactgatttttaaagaaaagaagagatttctagacttaaggagtaacttaagtaaaggcctagaacagaaaacctacaataagctgattggtctgctaacagtgataagtgtgaggtagaataaagctgttatccctttagagacagaaagtgaggcaatattgaaagtcaggtgatccaaaaaagtgaaccttctaggaatggtcatcgaaagtgaatcctagagctctagggttcctccaacttttgttcttgaaactttctaagattaaactgaaaacgtattttcttttgtagtcacatctctcgtagcccttcttagtaagtaaacttaaactattgggaaaagaaaaaggactttttcctcccccttggttaaaataatagtactgtcacagtctttcaaaacatgtgacaactaaaaacrtagaaatggcttaaaatgtgaaccaaatcaagccttcaaattttagaaaaaatataaaactacaccccgaattttcagatgttttattttagaatagtttctgattcacagaaaaattttagcaataatttctacttgatttatgtga

SEQ ID NO: 595661 - DNA, 565 bp, Homo sapiens
ggggaactgtgaatttattatatgtgctatgaagccataagcgraaatataaagggtatggaattattatccttaatttgaattaaacttaccttttgctttcacgaaatcaaagtgtatttatatgtaaataaaaatactggatatttgagattttcgatcactggttccagttaagtgagttaatcctactaaaaatagaaagaaaaacaaaaagatgtatgatttctgtaagtctgagggtcttaagttgcaatatttaccaatatgtaccacgataaaatggatattaccttcctaaatatgctgacttggcacagataagcatgtaagattcatgaatttggaatgcttattatcacattttcttttagtcaaatgcaaattttaggatctctgcattacacattagaagaatctccttgagtatttgtaattgtggtgcttatcaaagttgttatgtagaaggaatgaatgctttttttctatacacaaatgttagaatattaatagtaaacatttttgtttctcccctacttcctgtgaatacctatctagaaatttt

SEQ ID NO: 595662 - DNA, 603 bp, Homo sapiens
gatgccggcaagttggtgactttttcaaaacatccaccatacctaagggcacagacctatcaggaaactggagtcctccaatgttacacccctatacctcaagtgcagcccagtgtggacttccaaggatgcatacctcctcttcttcattaagcttttgcagcgagcctcaaggaagtaattgtggcgcaatgcaggtatttctcttttacctgcagtatggaacaaacacatttgagcagaatatgaatgccagaaacaaactgaaaagcatctgtgtttgttttcttttatayacttttttgacatggagtctcactctgttgcccaggctggagtgcagtggcatgatcttggctcactgcaacctccacctcctgattttgagcgattctcctgtcacagcctcctgagtagctaggactataggggcgggccaccacacctggctaatttttgtatttttagtagagacagggtttcaccatgctggccaggatggtctccaactcctgacctcaagtgatccacaccccttggcctcccaaattgctgggattacagggcgtgagccattgcgcccagccgtttgttttaataagc

SEQ ID NO: 595663 - DNA, 571 bp, Homo sapiens
gaattcatagcttcaattagattctctgaggagtctatgattcccaaaaggctaagaaatactgcttaggacctttgaatggtagatttgaaagtgrcttgggggctcctctgtcccgtggtctgctttcccagagaaaactagtgatctggcccagctcatacagctggtaaatggggaagctcatttggagacaggtcagtctgacacctgcctgatttcattttatgatgaatgggtattaaacttttgtgcagtcttacacgcatttcctttttagtcctttttaattttgaaatgaaaaattttatcctttcataaacggttaaataaatcttaagcacatcctagcagattgggggatatatttggccagagagagttctggaacctctcaggccttctccacatgactgaaccctgcctcattcttcctcaactctcttaaccttcagctgtctctgtataaagctctcagatgcgtcttttccaagtatcttagccggttctggctgctgtaacaaaataccataaattgggtagcttataaataaaaaaaatttatttttca

SEQ ID NO: 595664 - DNA, 571 bp, Homo sapiens
gaattcatagcttcaattagattctctgaggagtctatgattcccaaaaggctaagaaatactgcttaggacctttgaatggtagatttgaaagtgacttgggggctcmtctgtcccgtggtctgctttcccagagaaaactagtgatctggcccagctcatacagctggtaaatggggaagctcatttggagacaggtcagtctgacacctgcctgatttcattttatgatgaatgggtattaaacttttgtgcagtcttacacgcatttcctttttagtcctttttaattttgaaatgaaaaattttatcctttcataaacggttaaataaatcttaagcacatcctagcagattgggggatatatttggccagagagagttctggaacctctcaggccttctccacatgactgaaccctgcctcattcttcctcaactctcttaaccttcagctgtctctgtataaagctctcagatgcgtcttttccaagtatcttagccggttctggctgctgtaacaaaataccataaattgggtagcttataaataaaaaaaatttatttttca

SEQ ID NO: 595665 - DNA, 400 bp, Homo sapiens
ggtaattaagtttcaactttttccattctgcaagtgtctgcaggggagaaagcctcaaaaacaaggtgattcaggctgggtgtggtggtgcatatctgtaatcctagctactcgggaggctgaggtgggaggatcgcttgagcccaggagttcaaggctttagtgagctatgatcatgccactgcmctccagcctgggcaacagaatgagaccctgtctcaaaaacacaaatgaaaaaggcaaggtaattcctatcacagaattagcaaaagcaggggaactagatattcccctcatctcctcctcctctagcccatatggccagctgacagttcctcccctcgaccctggcaggaaagtggatcttttaaagttggactggagagaccacggactggtg

SEQ ID NO: 595666 - DNA, 400 bp, Homo sapiens
ggtaattaagtttcaactttttccattctgcaagtgtctgcaggggagaaagcctcaaaaacaaggtgattcaggctgggtgtggtggtgcatatctgtaatcctagctactcgggaggctgaggtgggaggatcgcttgagcccaggagttcaaggctttagtgagctatgatcatgccactgccctccagcctgggcaacagaatgagaccctgtctcaaaaacacaaatgaaaaaggcaaggtaattcctaycacagaattagcaaaagcaggggaactagatattcccctcatctcctcctcctctagcccatatggccagctgacagttcctcccctcgaccctggcaggaaagtggatcttttaaagttggactggagagaccacggactggtg

SEQ ID NO: 595667 - DNA, 450 bp, Homo sapiens
cataatgctgccgtgaggattacattatatatatatatatatatatatatatagcacttactacagtgaacataatcccaaataactgttgacactttattttaattattacctttggaatatcataaggcacaaaaatctctccttcattgaggggcctaacctaagtaatcaagacatgagggacccagaaaaaaggaggccagtggtatttttcaacaaaaattataatttttttctccatgttaatggataattaatagcacctaatataataccttgaacatattaggtgctcaagaaattgytgaactagtgaatattaagaaattatattgtctttctgtctatgcagggctcaggatttcatatgcagtgaataaaaacctcactaataatattccttaagaatataattaataaaatagtattaaaatttttgttcatggt

SEQ ID NO: 595668 - DNA, 557 bp, Homo sapiens
ccttgatatctttaaaggctttggtcaacattctttttctgttcaaatggttctttctttattagttcctacttcttatcttacacacaaactcaggtctctaactcctaaaaagacagaaaatcttatctcaaccgtctkggattagcatcttacgcctgcctttcctggtagaaatcttgaaggtcaagctacacgtttacctctacccagaggtttcttagtaaccatggtgatccatgacgtatggattcaacaaggttttaaatgaggctgaatgaagttttaggggcttataatatttttattttcctagaactaaatttcttcagcaccagtcacacatcaattaggtacttgcatatgctgtcatatttaataatcacaactgtactgaggtgggtactatgctttcatttaacagttgaggaaaaaaatgtgaagaacatgtacgacctggtcacagtcacccactgagtgtggagcttggattcaacagtcagggctcctagttacaagcagcagagattaaggctggctgatttcggcagagaatg

SEQ ID NO: 595669 - DNA, 557 bp, Homo sapiens
ccttgatatctttaaaggctttggtcaacattctttttctgttcaaatggttctttctttattagttcctacttcttatcttacacacaaactcaggtctctaactcctaaaaagacagaaaatcttatctcaaccgtctgggattagcatcttacgcctgcctttcctggtagaaatcttgaaggtcaagctacacgtttacctctacccagaggtttcttagtaaccatkgtgatccatgacgtatggattcaacaaggttttaaatgaggctgaatgaagttttaggggcttataatatttttattttcctagaactaaatttcttcagcaccagtcacacatcaattaggtacttgcatatgctgtcatatttaataatcacaactgtactgaggtgggtactatgctttcatttaacagttgaggaaaaaaatgtgaagaacatgtacgacctggtcacagtcacccactgagtgtggagcttggattcaacagtcagggctcctagttacaagcagcagagattaaggctggctgatttcggcagagaatg

SEQ ID NO: 595670 - DNA, 560 bp, Homo sapiens
tggttctttggcctgtccagtctcagctcagccacttactaggtatagaaccttgggcaagttacctgatctctctgcctcagttgcttcatttgtaaagtgggaataataatagctatgtcctcataatgctgccgtgaggattacattatatatatatatatatatatatatatagcacttactacagtgaacataatcccaaataactgttgacactttattttaattattacctttggaatatcataaggcacaaaatctctccttcattgaggggcctaacctaagtaatcaagacatgagggacccagaraaaaggaggccagtggtatttttcaacaaaaattataatttttttctccagttaatggataattaatagcacctaatataataccttgaacatattaggtgctcaagaaatgctgaactagtgaatattaagaaattatatgtctttctgtctatgcagggctcaggatttcatatgcaggaataaaaacctcactaataatattccttaagaatataattaataaaatagtattaaaattttg

SEQ ID NO: 595671 - DNA, 560 bp, Homo sapiens
tggttctttggcctgtccagtctcagctcagccacttactaggtatagaaccttgggcaagttacctgatctctctgcctcagttgcttcatttgtaaagtgggaataataatagctatgtcctcataatgctgccgtgaggattacattatatatatatatatatatatatatatagcacttactacagtgaacataatcccaaataactgttgacactttattttaattattacctttggaatatcataaggcacaaaatctctccttcattgaggggcctaacctaagtaatcaagacatgagggacccagaaaaaaggaggccagtggtatttttcaacaaaaattataatttttttctccagttaatggataattaatagcacctaatataataccttgaacatattaggtgctcaagaaatgctgaactagtgaatattaagaaattatatgtctttctgtctatgcagggctsaggatttcatatgcaggaataaaaacctcactaataatattccttaagaatataattaataaaatagtattaaaattttg

SEQ ID NO: 595672 - DNA, 560 bp, Homo sapiens
tggttctttggcctgtccagtctcagctcagccacttactaggtatagaaccttgggcaagttacctgatctctctgcctcagttgcttcatttgtaaagtgggaataataatagctatgtcctcataatgctgccgtgaggattacattatatatatatatatatatatatatatagcacttactacagtgaacataatcccaaataactgttgacactttattttaattattacctttggaatatcataaggcacaaaatctctccttcattgaggggcctaacctaagtaatcaagacatgagggacccagaaaaaaggaggccagtggtatttttcaacaaaaattataatttttttctccagttaatggataattaatagcacctaatataataccttgaacatattaggtgctcaagaaatgctgaactagtgaatattaagaaattatatgtctttctgtctatgcagggctcaggatttcatatgcaggaataaaaacctcactaataatattccttaagaatataattaataaartagtattaaaattttg

SEQ ID NO: 595673 - DNA, 552 bp, Homo sapiens
aagcaaagtaggaaaaaaaacaaacaagcactgtaaggtagattgtttgagtgtgcctttggttgtgatgtttctaaagatatcagagcttcttaaattttattctgcatggtaaatctggtcttataaagtggattagatatcaatcagtcattaatcaaattactaattgtttttagaatttatttatctggaacgtcatagagctggtcaaaatrgcccagaaatttaacatgctacatattaacactaaattcttatgtttttcatgttaaatgtcatacagcataaaagtgggactaacatataagacataggtgcagaaaaatgtaattcatatacatatatggcaagctttcaaaacatattttcttcctttgtttttatctccttgtctatgttgtggtcatattacatgaaaaacaagactaatactctattaaggtttcagcttaataataatataatttactacaaagaacagtttgagtgctgtctagttcatttattcacaaatatttaccatgcgccaactattgccaggcattatga

SEQ ID NO: 595674 - DNA, 587 bp, Homo sapiens
tcaaattctatactcaactatatgggtgttttctaagattttaactcatgaatgaacacctttcacagaagcatgcacttttgcaaagcacttttattattttctaaaatttctttatcattcatgtgtatatatgaaatgtaataaaagtattattttgaataatattttttaaagttatattggcatgttagaaaagattgaattataaaattgattttcatattctgataagttttatagcatgtaaagatagatttcaacctttcctacatagcaagtgattcataacattttccrtaacttagctgtgttatgaaaatatcttcatctttaataattttaaaatgatatatctgagttggagactgaaagtctatcagcatgtagactgaaatataactatttctaatagaaagtaaacaaaacttcttaactgaactactaatttgagttttcacatttttcattaaaaactttctaaaatagaacaggtgcagtagctcacacccataatcccagcactgtgggaggcagcgagatgagcgagatgagagaaccacttgaggccagaagtctgaaaccag

SEQ ID NO: 595675 - DNA, 587 bp, Homo sapiens
tcaaattctatactcaactatatgggtgttttctaagattttaactcatgaatgaacacctttcacagaagcatgcacttttgcaaagcacttttattattttctaaaatttctttatcattcatgtgtatatatgaaatgtaataaaagtattattttgaataatattttttaaagttatattggcatgttagaaaagattgaattataaaattgattttcatattctgataagttttatagcatgtaaagatagatttcaacctttcctacatagcaagtgattcataacattttccgtaacttagctgtgttatgaaaatatcttcatctttaataattttaaaatgatatatctgagttggagactgaaagtctatcagcatgtagactgaaatataactatttctaatagaaagtaaacaaaacttcttaactgaactactaatttgagttttcacatttttcattaaaaactttctaaaatagaacaggtgcagtagctcacacccataatcccagcactgtgggaggcagcgagatgagcgagrtgagagaaccacttgaggccagaagtctgaaaccag

SEQ ID NO: 595676 - DNA, 609 bp, Homo sapiens
ggttaaacagttaaagtattagaaccagaggtacttttttcgtagcttaatagagttacagaactccgaatgtgtttaaatgctcagccaaggcaacaggactcttgtgataaattcttattaggaaaacctgggatcttaaaacaacatttaaggacttctgcatatatgtgtcctccacggattctgactgtgcaactccctaccccctgaaatctcagagcttacagaggtataccattcctccctactataagctaaattttctcccataaggaaakatcttgcttagtgtattagtctgtactcatgctgcttataaagacattttggaaacttggtaatttataaggaaaaagagatttactggactcacagtttcacatggctggggaggcctcacaatcatggcagaaagtagaggaggagcaaaggcacagcttacatggcggcaggcaagtgtgtgtgcagggaaactgccctttataaaaccaccagatctaatgagatttactcactatcacgagaatagcatgggaaaaacccattgccatgattcaagtacctcccactggtctctcccacgacacatgggggttatgggagcta

SEQ ID NO: 595677 - DNA, 622 bp, Homo sapiens
cagagccatttttgagtaggaaaagcagaaaggatgcctttgaaagcaataattctttttttgttctttttactcttatacaatttaaaaatagtcaactggattttaaaattttaaattgataaataaaactgcatttgatccttgccaagttgactcatatattttatggatgaaattagattaattaagatactataaattccatgaagttatttattktactcttcagttgaatagcaaatattaacttcggttacacatgaacatgagagagaattatcttgagaggttttacatatttattatgataatttgttttgttgcatttacataatattttaaaatactgtgtagtcttacagcccatccttccatgcatactcacaattagggcttgtttcttgatgccggtatgtaatcatttgtcccttatactccaataaaaatacagtggaagaagcacagctctttggctttgctatgtttcttttggttgctattgaggtggccctcatttttccttccttctttgcgttagtcttttctaaaataatcacagagtccatgtgaaggacaataacaacaataataatagctaatatttgctgaattcacacta

SEQ ID NO: 595678 - DNA, 511 bp, Homo sapiens
ctaataaaatattcttacataatcccttgctatttttatatttatttatttatttgagatggaatttcactcttgtcacccaggctggagtgcaacagcatggtcttggctcactgcaacctccacctcccgggttcaagcgattctcttgcctcaaactcccaagtagctgggattacaggtgtgcaacaccaktcttggctaattttgtatttttagtagagatggggttccaccatgttggccagactggtcttgaactcctgacctcaggtgatgcacctgccttggcctcccaaagtgctgagaatacaggcaatagttaccatgcccagcaccttactatttttaaatattgtatatttaaaaataatgttctaagttaacaacactttgtatagtttttcagtttgtgccaacttaagaagattcctaaaatcttcatttttcttcccttaagtaccttaaacaattagaggttgttatccagagtctgaattgcaaggtgttt

SEQ ID NO: 595679 - DNA, 492 bp, Homo sapiens
ttctctcctacaaacagatgctcatattgacacctagaggcattaagagatatctaaagagacacaaaaagatatttttaaaatagcaatcatgtgtatttcagaaaaactatcagccagaaagtgaatatttatttgatctcttagtaaagaaagccttttcttaaaaaaataagagtgtttctgattttaawcaaagagccatgtgcattagtgaaagttagggctagaattcagcccttaaattttttggaaaaagtattttttcaccagtaatccattctctgttaaaaatgttttcaaaaagagataagcagccaagcacgaacttctactcatatatgaatagattgaggtaaacatgtatttacaacacatatgtttttaaaacataggtgagcttctatttcaaaagcattcctttttatcaatatgcaggactaaatgtgtcaatagaaatatatattcagctttctcatccttgtgactgca

SEQ ID NO: 595680 - DNA, 458 bp, Homo sapiens
ttcagaaggcactcaataaatatgattatttcttaacaaaaataataaaaacaacattataactaatgcgcgtgttctaaaacgtttcttaaaagtaacccataaacaaacttctaggagaaaagtgaaagccagaataaatgcccgatgcctatatttaattataaaggtagaaaaaatggctaaaagatagatkggaagatcataccaggcttttcagtaaatgaatcatcctgaaatcaaagcatggaaggttcaatatcactggtatgggactattaaaagttactagtaagtttcaggatgtttaaacttttaaccaatcttaatccaacaaaggtgtaggcaatctaagttaaaaaccacactcatccctggaattacgttaggaccaaagccggtttccgatcagcatttaaggttctcctgacaagtattggttagaagaataaaaatat

SEQ ID NO: 595681 - DNA, 540 bp, Homo sapiens
acttatatggccttgggttggagagcaaaggcagtcgggagtttttctcaagctactagccactcccaatactgggtgtgctttcagacaatgagcattatttaatagtaataaaataataatagtattgtgtcaaggatttttctgtgtaccttacacagatcatctcgaaacaactatgaagtaggcattttaagatatacattttaccataggaaaactgagaggataaatgacttgaccaaggtcacacagccattaagtagctgaggcataaattacctgatgcagtttgactctgctgtctatctatgttggcactacaacattgtgggagcccaagcttgaggcccctttttcctaccatactgacacagtggtgttttactcccagtgcagagattcggtaaggtaggagtgatttgagaactggcccttagtatcatagtggtataaggaaaaatttcggaaataaacttcctgccctttagatcctgagaaagtattgccaggrtggtagtggcatcatcagagcagcag

SEQ ID NO: 595682 - DNA, 578 bp, Homo sapiens
ccaggccccaagcaggcccagagatgttgtttgggagccaggaattggagtcaaaaaccttagaaattggctaagcatggtggctcacacttgtaatcccaacactttgggaggccaaggtcagaggctcacttgagaccaagagttcaaaaccagcccaggcaaaatagagacacatcgtgtctactgaaaatgaaaaaattcaccagggcatggtgacatgtacctgtagtcccagctasttgggaggctgaggtgggaagattgcttgagcccagaatgttgagactgcagtcagccctgattgttctgttgtactccagcctgtgcaacagagcaagaccctgtctcaaaatttaaaaaaaaaaaaaaaaatcttagaaatctacctggtattctacttcagctaagctggcactcaggccacttcccactcttccctcccttttccacagataaagtagcctctctccaaggccaccaccaccactggcccatggggagttctgccaggccactactgatgttcacttaaagcccaaaggctcatcagtcagcttgtggtgaatactaccaag

SEQ ID NO: 595683 - DNA, 613 bp, Homo sapiens
gttttgtgttttgcttttttaatatgttagcttagaagaagtttcgttttttcatgtttcctgtaagtaaaattatattaattccagaattactcagtgcaaataactggatgcactggggtaatgtcctttaaaataaagttacttggacatagattttatgtggagaaactatattatatccacagttcattcagtctagtaatctgcaaataagatgctatgagaaaaggttaccatttttcttaacagtattattcacatcatacacatgaggaaactgwtatggagagatgtgaagtaactagcccaaggtcatggagtttatgaacagcagaactgggccttaaccaccattgttagctaaaatcaccacctgggcctttccacagattgagaccaccaaattgcctgtttttccccacacggaacttccaattttaatgtactctgtaaataaatgaaaacacagaatacattcgataaaccactctgctcagtcttgtaaaatcactatcagaaatatttatgttttctcgggctagaaaaatattccataattcatttaattttgattttaataaacaatgttataaataagttttttttttca

SEQ ID NO: 595684 - DNA, 613 bp, Homo sapiens
gttttgtgttttgcttttttaatatgttagcttagaagaagtttcgttttttcatgtttcctgtaagtaaaattatattaattccagaattactcagtgcaaataactggatgcactggggtaatgtcctttaaaataaagttacttggacatagattttatgtggagaaactatattatatccacagttcattcagtctagtaatctgcaaataagatgctatgagaaaaggttaccatttttcttaacagtattattcacatcatacacatgaggaaactgttatggagagatgtgaagtaactagcccaaggtcatggagtttatgaacagcagaactgggccttaaccaccattgttagctaaaatcaccacctgggcctttccacagattgagaccaccaaattgcctgtttttccccacacggaacttccaattttaatgtactctgtaaataaatgaaaayacagaatacattcgataaaccactctgctcagtcttgtaaaatcactatcagaaatatttatgttttctcgggctagaaaaatattccataattcatttaattttgattttaataaacaatgttataaataagttttttttttca

SEQ ID NO: 595685 - DNA, 346 bp, Homo sapiens
gtttgggaatctccacctagatttcatagcatgtatgaaaaagcctgaatgcccaggcagaagtttgctgcaggggcagaggcctcatggagaacttctgctagggcagtgtagaagggaaatgtggggccagagcccccacacagagtccatagtggggcattgcctagtggagctgtgagaagagggccactgtcctccagattccggaatggtagatccaccaatagcttgcactatgcacctggaaaagccacagacactcaatgccagcctatgaaagcagccaggagtggggctataacctgcaaagccacaggggmagagcttcccaaggccatggaag

SEQ ID NO: 595686 - DNA, 457 bp, Homo sapiens
tagctaatctggtggggacatggagaacctttgtgtctagctsagggattgtaaatgcaccaatcagcaccctgtcaaaagagaccacttggctctaccaatcagcaggatgtgggtggggccagataagagaataaaagcaggctgccagagtcagcagtggcaacccgctggggtccccttccacactgtggaagctttgttcttttgctctttgcaataaatcttgctactgctcactctttgtgtccacactgcctttatgagctgtaacactcaccgtgaaggtctgcagcttcactcctgagccagcgagaccatgaacccaccaaaaggaagaaactccgaacacatctgaacatcagaaggaacaaactccggacacgctgcctttagtaactgtaacactcaccgcgagggtccatggcttcattctaaaagtcagtgagaccaagaa

SEQ ID NO: 595687 - DNA, 457 bp, Homo sapiens
tagctaatctggtggggacatggagaacctttgtgtctagctcagggattgtaaatgcaccaatcagcaccctgtcaaaagagaccacttggctctaccaatyagcaggatgtgggtggggccagataagagaataaaagcaggctgccagagtcagcagtggcaacccgctggggtccccttccacactgtggaagctttgttcttttgctctttgcaataaatcttgctactgctcactctttgtgtccacactgcctttatgagctgtaacactcaccgtgaaggtctgcagcttcactcctgagccagcgagaccatgaacccaccaaaaggaagaaactccgaacacatctgaacatcagaaggaacaaactccggacacgctgcctttagtaactgtaacactcaccgcgagggtccatggcttcattctaaaagtcagtgagaccaagaa

SEQ ID NO: 595688 - DNA, 457 bp, Homo sapiens
tagctaatctggtggggacatggagaacctttgtgtctagctcagggattgtaaatgcaccaatcagcaccctgtcaaaagagaccacttggctctaccaatcagcaggatgtgggtggggccagataagagaataaaagcaggctgccagagtcagcagtggcaacccgctggggtccccttccacactgtggaagctttgttcttttgctctttgcaataaatcttgctactgctcactctttgkgtccacactgcctttatgagctgtaacactcaccgtgaaggtctgcagcttcactcctgagccagcgagaccatgaacccaccaaaaggaagaaactccgaacacatctgaacatcagaaggaacaaactccggacacgctgcctttagtaactgtaacactcaccgcgagggtccatggcttcattctaaaagtcagtgagaccaagaa

SEQ ID NO: 595689 - DNA, 437 bp, Homo sapiens
gtctgagtcaaggactggacgcagctgatttatttgaacaactaatcccaagaagcacaaggcaacagacaacagaagatagggaaagaaaaaaactgtaggcaagaccataaaaagtgaaataactttaggggttcatattcatttagcccattgatataggcacaaatagctataaatcatttaatttcatatttatatcattggtaatttatccaycaagttacccacaatgcaatgttcaaattaagaaattcaattacataatttgaaatattaactgaaataaaaaagacatgatcatttcaactgatttttaaaaataattttaggtaagtaaatggttgtttgatagaaattttaaaaaataatgatagatagctatttgttcaacataaaaagaagaaataatcaaaaacttactgttaatagtacac

SEQ ID NO: 595690 - DNA, 437 bp, Homo sapiens
gtctgagtcaaggactggacgcagctgatttatttgaacaactaatcccaagaagcacaaggcaacagacaacagaagatagggaaagaaaaaaactgtaggcaagaccataaaaagtgaaataactttaggggttcatattcatttagcccattgatataggcacaaatagctataaatcatttaatttcatatttatatcattggtaatttatccaccaagttacccacaatgcaatgttcaaattaagaaattcaattacataatttgaaatattaactgaaataaaaaagacatgatcatttcaactgatttttaaaaataattttaggtaagtaaatggttgtttgatagaaattttaaaaaataatgatagatagctatttgttcaacataaaaagmagaaataatcaaaaacttactgttaatagtacac

SEQ ID NO: 595691 - DNA, 540 bp, Homo sapiens
gacaaaacttctctttatatgtcacagagacagcagggatagctcttggagttgttagactcgtgggacgaccccacaaccagtggcatacctaagtaagtaaattgatgtagtagcaaaaggctggcctcactgtttaagggtagttgtggtggycatcttagtgtcagaggctatcaaaataatacaaggaaaagatctcactgtctggactactcatgatgtaaatggcatactaggtgccaaaggaagtttatggctattggacaaccacctacttagataccaggcgctactccttcagggaccaatgcttcaaatacttatgtgcatggccctcaaccctgccacttttctcccagaggatggggaaccaattgagcatgactgccaacaaattatagtccagacttatgctgcccgagatgatctcctagaagtccccttagctaatcttgaccttaacctatataccgatggaagttcatttgtggagaatgggatatgaagggcaggttatgccatagttagtgatgtaac

SEQ ID NO: 595692 - DNA, 540 bp, Homo sapiens
gacaaaacttctctttatatgtcacagagacagcagggatagctcttggagttgttagactcgtgggacgaccccacaaccagtggcatacctaagtaagtaaattgatgtagtagcaaaaggctggcctcactgtttaagggtagttgtggtggtcatcttagtgtcagaggctatcaaaataatacaaggaaaagatctcactgtctggactactcatgatgtaaatggcatactaggtgccaaaggaagtttatggctattggacaaccacctacttagataccaggcgctactccttcagggaccartgcttcaaatacttatgtgcatggccctcaaccctgccacttttctcccagaggatggggaaccaattgagcatgactgccaacaaattatagtccagacttatgctgcccgagatgatctcctagaagtccccttagctaatcttgaccttaacctatataccgatggaagttcatttgtggagaatgggatatgaagggcaggttatgccatagttagtgatgtaac

SEQ ID NO: 595693 - DNA, 365 bp, Homo sapiens
gggcatggaaggacaattggaagggtaaaaaatgcccacccagtccaaatcaggctaaaaggccccaccacttttccttatcaaaggcagtatcccttaaggcctgaagctcataaaggwttacaggatattgttaaacatttaaaagctcaaggcttagtaaggaaacacagcagtccctgcaacaccccaattctaggagtacaaaaaccaaacggttagtggagactagtgcaagatcttagactcatcaatgaggcagaaattcctctatatccagttgtacccaacccctataccctgctctctcaaataccagaggaagcaaaatggttctctgttctggacctcaaggatgccttctt

SEQ ID NO: 595694 - DNA, 365 bp, Homo sapiens
gggcatggaaggacaattggaagggtaaaaaatgcccacccagtccaaatcaggctaaaaggccccaccacttttccttatcaaaggcagtatcccttaaggcctgaagctcataaaggtttacaggatattgttaaacatttaaaagctcaaggcttagtaaggaaacacagcagtccctgcaacaccccaattctaggagtacaaaaaccraacggttagtggagactagtgcaagatcttagactcatcaatgaggcagaaattcctctatatccagttgtacccaacccctataccctgctctctcaaataccagaggaagcaaaatggttctctgttctggacctcaaggatgccttctt

SEQ ID NO: 595695 - DNA, 365 bp, Homo sapiens
gggcatggaaggacaattggaagggtaaaaaatgcccacccagtccaaatcaggctaaaaggccccaccacttttccttatcaaaggcagtatcccttaaggcctgaagctcataaaggtttacaggatattgttaaacatttaaaagctcaaggcttagtaaggaaacacagcagtccctgcaacaccccaattctaggagtacaaaaaccaaacggtyagtggagactagtgcaagatcttagactcatcaatgaggcagaaattcctctatatccagttgtacccaacccctataccctgctctctcaaataccagaggaagcaaaatggttctctgttctggacctcaaggatgccttctt

SEQ ID NO: 595696 - DNA, 365 bp, Homo sapiens
gggcatggaaggacaattggaagggtaaaaaatgcccacccagtccaaatcaggctaaaaggccccaccacttttccttatcaaaggcagtatcccttaaggcctgaagctcataaaggtttacaggatattgttaaacatttaaaagctcaaggcttagtaaggaaacacagcagtccctgcaacaccccaattctaggagtacaaaaaccaaacggttagtggagacwagtgcaagatcttagactcatcaatgaggcagaaattcctctatatccagttgtacccaacccctataccctgctctctcaaataccagaggaagcaaaatggttctctgttctggacctcaaggatgccttctt

SEQ ID NO: 595697 - DNA, 491 bp, Homo sapiens
caactgcagcaaacttagaacaattattaaggtattatcaacgtaatgagatttcaggtgatttaattttctttcttatacctttctaacttgttttaatgaacattgttttaaattattttgaaggcaattttcacaaacagaaatgatcttcctgtcttctctaatgcataactatacccacatcactaaatctagcacaagctaaaattatattccaygagccttgtttatacatcctcgaaattcattcttagaaacatcatcagggcttttgaaaatgtaaataagcaacaggttacagatatgtagcaatagtgttctcattgttgtggttgtgttctgggtgaatggaacccctgggctgcccactcccagctctaagcaatctcatatttaacccagcatgctgcacaaatgatcattttctattatcatatccttggtcatttcacatcctgctcaatcccaccctgctccaccccaggcca

SEQ ID NO: 595698 - DNA, 516 bp, Homo sapiens
aacactgtcaaaaaaaaaaaaaaaaaaaaccaaaaaaaaaaaaaccctgaggtcaaaataagtgaacaakgcatttaatcatgtcaaggtacggatatgtctgactcatgtgtcaagtcaggccatccaattacttgagagattctcccaccccatccggttcacttaagtgctcaataatcattctctcaggagactctgaactatgccccagagtgccccaggtatattttactttgcaagttttgcaccatctcactggggtcagtgtttttgtcttggagtgctattttatttcacaaaccttttaccatttttatttcactatttttctgtcccctaagagaatgcaggggcaaaaattattttggtttccccttcaataccagcatctgatgtctgaacagcaatgtgtctccaagaaatggaagctgggttgggtaaagacaatattaatatctcaagggagtagctttccaaaaaaacagcacaccagaagatgactcagccacagtg

SEQ ID NO: 595699 - DNA, 516 bp, Homo sapiens
aacactgtcaaaaaaaaaaaaaaaaaaaaccaaaaaaaaaaaaaccctgaggtcaaaataagtgaacaaggcatttaatcatgtcaaggtacggatatgtctgactcatgtgtcaagtcaggccatccaattacttgagagattctcccaccccatcckgttcacttaagtgctcaataatcattctctcaggagactctgaactatgccccagagtgccccaggtatattttactttgcaagttttgcaccatctcactggggtcagtgtttttgtcttggagtgctattttatttcacaaaccttttaccatttttatttcactatttttctgtcccctaagagaatgcaggggcaaaaattattttggtttccccttcaataccagcatctgatgtctgaacagcaatgtgtctccaagaaatggaagctgggttgggtaaagacaatattaatatctcaagggagtagctttccaaaaaaacagcacaccagaagatgactcagccacagtg

SEQ ID NO: 595700 - DNA, 489 bp, Homo sapiens
gtgggatcttggctcactgcaacctccgactcccaggttcaaatgattctactgcctcagcctcccgagtagctcggattacaggtgcctactaccacgcctgactaatttttgtagttttagtggagacagggtttggccatgttggtcaggctggtctcagactcctgacctcaggtgatcctctcatctctgcctcccaaarcgctggaattataggcgtgagcctacatgcccggcctgttgaagaattttaactctgcataaggtatgttgttgtgttaggtggtttcaaggggcaggaaagacaaggagagtgaggttcctcttagaagcagatggtgaaatgaggggtcccaggcttacttgaggagagttgggggtgagtggatgagaccatgaggacagctgtactcacattcaccttttcaaaacaggggactcggagttattaactgatggacagaaaagagcagagaggcccgagac

SEQ ID NO: 595701 - DNA, 584 bp, Homo sapiens
aggttgaggttgcagtgagccatgtttgcaccactgcactccaacatgagtgacagagtaagacccctgtttcaaaaaaaaaaaaaaaaaatctaaaacagaaatctccaggcccagatagttgttagtgcatatcaaaaaatcagtgtaatacatcatattaatagcataaaagaaaaacatagtaatatcaagagacatagaaaaacaaaaaccaacaaaaatgctttcatgattataaaaccacctaacaactaggactagaaggggatttttctcaacctggtaagtggcatctatgaaaaatccccaacaaacagtgaaaggctgaacattttccccctaaatcacaagataaaaatttcttttcttgccacttctaatcagtctkgtattgaagttctagtcaagcacattagataaggaaaagtaataaaaggcatcctgattaacaaggaaaaagtgaaactctatttgcaagagacataattttatatagagaaacaaagaatccaaaaataacttaatagagctaacaaataagttcagcaatgttgcagtataaaagattaacatgcaaaaat

SEQ ID NO: 595702 - DNA, 611 bp, Homo sapiens
tttctgagttatttcacttcggctaatggtctccagttccatctatgctgttgcaaaagacatgatttcattcttttttatggctgaatagtattcctatatatctatatatcctatatatctatatcccatatatccatatcctatatatcctatatatatatcacataggaaagtggaatcttgagctcctcaaactgttggcagaatgagctaatgtggggagctttgttggcactagtgactgatttttgcttcagcttcagaggactgggcctttgtctaatatttcagcgatcccaccatcccaagcttagtgccttaaaacaacaatcatttayaatctctccaagattctgtgggttgattgaacactgtgggggtggttcttctgttccaggtgttgttgattagagctggaatcctctggggactcaattctgctggagcaaccaagagggctgtctcacatggttgcagttgatactggctgtgggcttgaagtccattcggggctgttgagcagagcaccttgatttacctctatgtggcctctcctttgacttggacatctcacagtgtaaccattggcctccaagggaagaaagctt

SEQ ID NO: 595703 - DNA, 611 bp, Homo sapiens
tttctgagttatttcacttcggctaatggtctccagttccatctatgctgttgcaaaagacatgatttcattcttttttatggctgaatagtattcctatatatctatatatcctatatatctatatcccatatatccatatcctatatatcctatatatatatcacataggaaagtggaatcttgagctcctcaaactgttggcagaatgagctaatgtggggagctttgttggcactagtgactgatttttgcttcagcttcagaggactgggcctttgtctaatatttcagcgatcccaccatcccaagcttagtgccttaaaacaacaatcatttacmatctctccaagattctgtgggttgattgaacactgtgggggtggttcttctgttccaggtgttgttgattagagctggaatcctctggggactcaattctgctggagcaaccaagagggctgtctcacatggttgcagttgatactggctgtgggcttgaagtccattcggggctgttgagcagagcaccttgatttacctctatgtggcctctcctttgacttggacatctcacagtgtaaccattggcctccaagggaagaaagctt

SEQ ID NO: 595704 - DNA, 611 bp, Homo sapiens
tttctgagttatttcacttcggctaatggtctccagttccatctatgctgttgcaaaagacatgatttcattcttttttatggctgaatagtattcctatatatctatatatcctatatatctatatcccatatatccatatcctatatatcctatatatatatcacataggaaagtggaatcttgagctcctcaaactgttggcagaatgagctaatgtggggagctttgttggcactagtgactgatttttgcttcagcttcagaggactgggcctttgtctaatatttcagcgatcccaccatcccaagcttagtgccttaaaacaacaatcatttacaatctctccaagattctgtgggttgattgaacactgtgggggtggttcttctgttccaggtgttgytgattagagctggaatcctctggggactcaattctgctggagcaaccaagagggctgtctcacatggttgcagttgatactggctgtgggcttgaagtccattcggggctgttgagcagagcaccttgatttacctctatgtggcctctcctttgacttggacatctcacagtgtaaccattggcctccaagggaagaaagctt

SEQ ID NO: 595705 - DNA, 589 bp, Homo sapiens
aaatataattctaaaaaaaattttttttaattatttaaagacattaatttaccttttgaaaagaaatttatttcaaaacatacaaaaacatgacagaacagttcatgggccacgttatacaataaaatagacaatattttattgcctgttttatttttgcaagcatcaacagtcaggtatactaatgacagtcacttgggttaacagctatgaagagacaaaccatacacacaaagaaataggtcgaaaaccgagatgtataaaggcatatttctatggctggtaattgtgtgcacccgcttgtaactgtggtcatctgaaatactatgaagcacaacctaaagatcgcgccactgcactccagcctgggcaacagagcgagactgtgtctcaaaaaaaaaaaaaaaaaaaaaaagatkggtcaaaaatggcaacgggcacataagcattggcccaaagaatggagatctcaagaaatttatctctccacaaatgcacatgtacaaatcagatatctctttatttattgaggaagtttcaatgttttgcctacatgcacaatgctcacacacaagtcaacgttgtgaca

SEQ ID NO: 595706 - DNA, 589 bp, Homo sapiens
aaatataattctaaaaaaaattttttttaattatttaaagacattaatttaccttttgaaaagaaatttatttcaaaacatacaaaaacatgacagaacagttcatgggccacgttatacaataaaatagacaatattttattgcctgttttatttttgcaagcatcaacagtcaggtatactaatgacagtcacttgggttaacagctatgaagagacaaaccatacacacaaagaaataggtcgaaaaccgagatgtataaaggcatatttctatggctggtaattgtgtgcacccgcttgtaactgtggtcatctgaaatactatgaagcacaacctaaagatcgcgccactgcactccagcctgggcaacagagcgagactgtgtctcaaaaaaaaaaaaaaaaaaaaaaagatgggtcaaaaatkgcaacgggcacataagcattggcccaaagaatggagatctcaagaaatttatctctccacaaatgcacatgtacaaatcagatatctctttatttattgaggaagtttcaatgttttgcctacatgcacaatgctcacacacaagtcaacgttgtgaca

SEQ ID NO: 595707 - DNA, 589 bp, Homo sapiens
aaatataattctaaaaaaaattttttttaattatttaaagacattaatttaccttttgaaaagaaatttatttcaaaacatacaaaaacatgacagaacagttcatgggccacgttatacaataaaatagacaatattttattgcctgttttatttttgcaagcatcaacagtcaggtatactaatgacagtcacttgggttaacagctatgaagagacaaaccatacacacaaagaaataggtcgaaaaccgagatgtataaaggcatatttctatggctggtaattgtgtgcacccgcttgtaactgtggtcatctgaaatactatgaagcacaacctaaagatcgcgccactgcactccagcctgggcaacagagcgagactgtgtctcaaaaaaaaaaaaaaaaaaaaaaagatgggtcaaaaatggcaacgggcacataagcattkgcccaaagaatggagatctcaagaaatttatctctccacaaatgcacatgtacaaatcagatatctctttatttattgaggaagtttcaatgttttgcctacatgcacaatgctcacacacaagtcaacgttgtgaca

SEQ ID NO: 595708 - DNA, 589 bp, Homo sapiens
aaatataattctaaaaaaaattttttttaattatttaaagacattaatttaccttttgaaaagaaatttatttcaaaacatacaaaaacatgacagaacagttcatgggccacgttatacaataaaatagacaatattttattgcctgttttatttttgcaagcatcaacagtcaggtatactaatgacagtcacttgggttaacagctatgaagagacaaaccatacacacaaagaaataggtcgaaaaccgagatgtataaaggcatatttctatggctggtaattgtgtgcacccgcttgtaactgtggtcatctgaaatactatgaagcacaacctaaagatcgcgccactgcactccagcctgggcaacagagcgagactgtgtctcaaaaaaaaaaaaaaaaaaaaaaagatgggtcaaaaatggcaacgggcacataagcattggcccaaagaatkgagatctcaagaaatttatctctccacaaatgcacatgtacaaatcagatatctctttatttattgaggaagtttcaatgttttgcctacatgcacaatgctcacacacaagtcaacgttgtgaca

SEQ ID NO: 595709 - DNA, 561 bp, Homo sapiens
ctgggacatctctgtcccaaaataagttrgtttttcaatttcagtctgttgtcgaagatcttcttttactattaatgggggctatgatttattaaattcccattatctgtatggcactatgttttgtgagattgattttaaaaggtatatcatttaaaatcttcacatagccatgcaagatactatccttgttttacaatgggggacctgaagctcagatatattccataatttgtgcaaggcaacttctgagtcactgttaataagtggccaatgatggattcaaaacagatatgcccgactctaaacctaaagatttttttcccactatgcagcagaaactcttactctacctatattttacagtgaatatggcctctttaaacttcttaaaataatccagcatccaaggttattgctagtgggaactgagtattgcttggtagataagtaatctcagtatcctatgcaaatcagtccagtagctataggcctaagaggtgaatttgggtgtaggagaaaagtcaatttaacccctttcctagagggagaagtcataga

SEQ ID NO: 595710 - DNA, 445 bp, Homo sapiens
ttgtcgaagatcttcttttactattaatgggggctatgatttattaaattcccattatctgtatggcactatgttttgtgagattgattttaaaaggtatatcatttaaaatcttcacatagccakgcaagatactatccttgttttacaatgggggacctgaagctcagatatattccataatttgtgcaaggcaacttctgagtcactgttaataagtggccaatgatggattcaaaacagatatgcccgactctaaacctaaagatttttttcccactatgcagcagaaactcttactctacctatattttacagtgaatatggcctctttaaacttcttaaaataatccagcatccaaggttattgctagtgggaactgagtattgcttggtagataagtaatctcagtatcctatgcaaatcagtccagtagctataggc

SEQ ID NO: 595711 - DNA, 445 bp, Homo sapiens
ttgtcgaagatcttcttttactattaatgggggctatgatttattaaattcccattatctgtatggcactatgttttgtgagattgattttaaaaggtatatcatttaaaatcttcacatagccatgcaagatactatccttgttttacaatggggracctgaagctcagatatattccataatttgtgcaaggcaacttctgagtcactgttaataagtggccaatgatggattcaaaacagatatgcccgactctaaacctaaagatttttttcccactatgcagcagaaactcttactctacctatattttacagtgaatatggcctctttaaacttcttaaaataatccagcatccaaggttattgctagtgggaactgagtattgcttggtagataagtaatctcagtatcctatgcaaatcagtccagtagctataggc

SEQ ID NO: 595712 - DNA, 445 bp, Homo sapiens
ttgtcgaagatcttcttttactattaatgggggctatgatttattaaattcccattatctgtatggcactatgttttgtgagattgattttaaaaggtatatcatttaaaatcttcacatagccatgcaagatactatccttgttttacaatgggggacctgaagctcagatatrttccataatttgtgcaaggcaacttctgagtcactgttaataagtggccaatgatggattcaaaacagatatgcccgactctaaacctaaagatttttttcccactatgcagcagaaactcttactctacctatattttacagtgaatatggcctctttaaacttcttaaaataatccagcatccaaggttattgctagtgggaactgagtattgcttggtagataagtaatctcagtatcctatgcaaatcagtccagtagctataggc

SEQ ID NO: 595713 - DNA, 595 bp, Homo sapiens
cctgagtcacaaaaagagtttaaattttattcagtgccctttttctgttaataccaggaaaggaataataaatgtttaaaggattttgaaaaacaactttagattaaaacttattctggcacttgtgcagataatttttatgtttgacagctccttgaagttttgttttgttttgttttgttttgtttttttgaacatttgactgtaagttaaattrccaaggctcaaacctcacccctgatgacaagggattttgtaaacatgggcaagtttcttaatctcagtttgctcacaactgtgcaatgacagaagttgtgaggatgaagtaaaataatgaatgtgagcctcgtgcatatggaaaagctctgtatgagtgtgaggtataattatcgtctgaatatttttgtatgacactttgtctctgatcattctggattaataaggcatcattgcattctatttagcagctggcatatgaatgcagaataacctattaaataaatagtgttatgagtcacatgaaacaattcacccacatattcatgttcccgacctctgttcctagttgaaattagtgacctggtactaaaacccc

SEQ ID NO: 595714 - DNA, 648 bp, Homo sapiens
gcatgtacctcctgtatctaaaataaagaattaaaattattaatgcagatttctgcgctccatcctgatctatcaaaccagaatctctgtgagtaggttccatgaatttgtattttacacactccccaagtagtgtttatgtacactaaagtttgacagttttagtctctcactgatttgccttacctattactatggccaacacatttaataagattaatgacctaacctctctgcctacagtatatgagaagtataacattagaagatgaaatgggaaagaaaaggaaaagctctttgaaggtagcacacgtatcaggagaggtgatatttgacaaactgctattgagaaataggaaagaaacactaaaaaatagatgtagacctctatttacctcagcaaaacaaatcatagaaattacttatgcccatcctgagtcacaaaaagagtttaaattttattcagtgccctttttctgttaataccaggaaaggaataataaatgtttaaaggattttgaaaaacaactttagattaaaacttattctggcacttstgcagataatttttatgtttgacagctccttgaagttttgttttgttttgttttgttttgtttttttgaacatttgactgtaagttaaatt

SEQ ID NO: 595715 - DNA, 648 bp, Homo sapiens
gcatgtacctcctgtatctaaaataaagaattaaaattattaatgcagatttctgcgctccatcctgatctatcaaaccagaatctctgtgagtaggttccatgaatttgtattttacacactccccaagtagtgtttatgtacactaaagtttgacagttttagtctctcactgatttgccttacctattactatggccaacacatttaataagattaatgacctaacctctctgcctacagtatatgagaagtataacattagaagatgaaatgggaaagaaaaggaaaagctctttgaaggtagcacacgtatcaggagaggtgatatttgacaaactgctrttgagaaataggaaagaaacactaaaaaatagatgtagacctctatttacctcagcaaaacaaatcatagaaattacttatgcccatcctgagtcacaaaaagagtttaaattttattcagtgccctttttctgttaataccaggaaaggaataataaatgtttaaaggattttgaaaaacaactttagattaaaacttattctggcacttgtgcagataatttttatgtttgacagctccttgaagttttgttttgttttgttttgttttgtttttttgaacatttgactgtaagttaaatt

SEQ ID NO: 595716 - DNA, 648 bp, Homo sapiens
gcatgtacctcctgtatctaaaataaagaattaaaattattaatgcagatttctgcgctccatcctgatctatcaaaccagaatctctgtgagtaggttccatgaatttgtattttacacactccccaagtagtgtttatgtacactaaagtttgacagttttagtctctcactgatttgccttacctattactatggccaacacatttaakaagattaatgacctaacctctctgcctacagtatatgagaagtataacattagaagatgaaatgggaaagaaaaggaaaagctctttgaaggtagcacacgtatcaggagaggtgatatttgacaaactgctattgagaaataggaaagaaacactaaaaaatagatgtagacctctatttacctcagcaaaacaaatcatagaaattacttatgcccatcctgagtcacaaaaagagtttaaattttattcagtgccctttttctgttaataccaggaaaggaataataaatgtttaaaggattttgaaaaacaactttagattaaaacttattctggcacttgtgcagataatttttatgtttgacagctccttgaagttttgttttgttttgttttgttttgtttttttgaacatttgactgtaagttaaatt

SEQ ID NO: 595717 - DNA, 628 bp, Homo sapiens
ggctggaacgtaaaggcatcttgcaagagtatggaataaaaaaaagctgccaagtcaggttgaggcgttttgacacaggagctatgaatgctacaacaatctatgaccatagaaagcatcctccgctctaggtgtgtgtttgttataaatcactctgcttctttcttttctcctacagttaatatattttccttcagcaaatatatttgctgtgcattaccagctatgttcagctgttaatatttgtgtctatagttagcatttttattcagctaatattttcattcagtgacactcaccaagcatcagtttgattctcatcatatttgctagaaatgttttcttccattaatgtgcatttctccctttaaggttcttattttctaggtatttataagctataaggwctgtcagcttcagctagcattacaagaaattctgatcacttgctgcaaagtgctctgagttagtggctcctccccagatgaaacatctatccggggcacagtctttggcatctttaaaatgggagtcataaaggtaagaagataggtgcgcccagtgcaggacttatttgtagcagctgaatgaaagtataaatgtttagggtattaaagttttaaaaaag

SEQ ID NO: 595718 - DNA, 628 bp, Homo sapiens
ggctggaacgtaaaggcatcttgcaagagtatggaataaaaaaaagctgccaagtcaggttgaggcgttttgacacaggagctatgaatgctacaacaatctatgaccatagaaagcatcctccgctctaggtgtgtgtttgttataaatcactctgcttctttcttttctcctacagttaatatattttccttcagcaaatatatttgctgtgcattaccagctatgttcagctgttaatatttgtgtctatagttagcatttttattcagctaatattttcattcagtgacactcaccaagcatcagtttgattctcatcatatttgctagaaatgttttcttccattaatgtgcatttctccctttaaggttcttattttctaggtatttataagctataaggtctgtcagcttcagctagcattacaagaaattytgatcacttgctgcaaagtgctctgagttagtggctcctccccagatgaaacatctatccggggcacagtctttggcatctttaaaatgggagtcataaaggtaagaagataggtgcgcccagtgcaggacttatttgtagcagctgaatgaaagtataaatgtttagggtattaaagttttaaaaaag

SEQ ID NO: 595719 - DNA, 442 bp, Homo sapiens
atcattaaacctttacaatatttgagtaaaagcttctatcactatacagccactttcctgtgaagaatattttagatcattgcctgaggtgaaaaaacataaaatatgtagaaaggcaacgtcatttctatctcttatttatgcactttatttttctttatattaatttagtggttacaatctaattaatattagcagacatcagtggacaggtaaagaaaaaaaagcaaaggtctttataactcagagacaattttaaatgcattaggtaattagtsaatcttactcagagttgtggagtggcttaatgtctgccagattaaaggaacaaatttattttgctacacacaattagtgctatatttaaaaaaaatcttagtagaacaggcaggtattattctatttttataatgggaaaaatatacaatgggaagacagaagt

SEQ ID NO: 595720 - DNA, 578 bp, Homo sapiens
ttcaaccagaatttgttgatcatatgcagagaactaaaatgcgattgcaaggactaaagaaacagtccctgtcatttgattatctcttgttagagttcatttttagagaaaagctgataccacatttgataaagcaaaaattataaatatcttagacttcctattgtttcagcacttagaccttctattgttrtgaaagctccaggtgactgatcttattaagatctgcatgttaaagagaaaaaatatatattctgtgagacaaacaacataaccagacatagctagacaaaactccataggggaaagctggcctgcatccttattcccctttgttctacacattcaattcatttcattatttgtgttgtggagatgttactaatcaagtgatgatggaacattatccctgcagcccctttaaatgtttagctctgtttccacttctctatattttacatgtgatatgctcctttgcaaacacgaagacttttaaactgcacaattggaattatgatttgagcaacttattcattctcttttttctccctctgactccacaagacttcaccaacttt

SEQ ID NO: 595721 - DNA, 581 bp, Homo sapiens
catttcaaccagaatttgttgatcatatgcagagaactaaaatgcgattgcaaggactaaagaaacagtccctgtcatttgattatctcttgttagagttcatttttagagaaaagctgataccacatttgataaagcaaaaattataaatatcttagacttcctattgtttcagcacttagaccttctattgttgtgaaagctccaggtgactgatcttattaagatctgcatgttaaagagaaaaaatatatattctrtgagacaaacaacataaccagacatagctagacaaaactccataggggaaagctggcctgcatccttattcccctttgttctacacattcaattcatttcattatttgtgttgtggagatgttactaatcaagtgatgatggaacattatccctgcagcccctttaaatgtttagctctgtttccacttctctatattttacatgtgatatgctcctttgcaaacacgaagacttttaaactgcacaattggaattatgatttgagcaacttattcattctcttttttctccctctgactccacaagacttcaccaacttt

SEQ ID NO: 595722 - DNA, 558 bp, Homo sapiens
acttgaacatggtggataagctttttgatgtgctgctggattcggtttgccagtatttcattgaggatttttgcattgatgttcatcagggatactggcctgaacttttctttttttgttgtgtctttaccaggttttggtatcaggatgatgctggcctcatcaaaggagttagggaggagcccttttttctattgtttggaatagtttcagaaggaatggtaccagttccctaaagttttaacttttgatgaagctccatttacctatttactctttaatgggtcatgattttgttgttatagctaagaaatatttgcttaactcaagattataaagattttatcttaggttttcccataaaatatttatagttttgggatttatgtttagttgtataaatcatttgagttaatttttttatayagtgagaagcatgaattgatgtttttgcatgtaaatatccagttgttctgacatacaaattgttgaaaaggcaatcatttatttcctaaattgctttgctccttagtcaaattttaatgtatggttctaatt

SEQ ID NO: 595723 - DNA, 599 bp, Homo sapiens
tttccttgaatgttatttcatgggtgctagatggcaatgaggtattgtagattgaaatttactctcaatcctacaaatgagagtaatcagcatcaggtaggaagattccacaattattaaaaacagagaatgaagtggtttcactctgctgaatgccctgaatttttgttaaaattatgtgactttactttttataaactcataatttaccctctgcacatatctaaattttgtaaagcacagagtsgttgttttaagtgaatggcaggtttaaaggaataaaaatgtttcatgttggagcacaaactaaactatactaaatatacagaattaccttacatatttacagactgttttcataataatttctgtctggggggagtataatactcttactaaaaaaacacattaaataaatactctttaagtagtaatatttcaacttatagttacaggtaaagaaaaatgctaatattctcaccataggtgcctggttaagtaatatcaaataaaacatttttgaattgtgcctcatatttggattaaaacaaatgttttgagaatgtttggcaagtcttctatgactttgcaattgtatt

SEQ ID NO: 595724 - DNA, 335 bp, Homo sapiens
ttatttcatgggtgctagatggcaatgaggtattgtagattgaaatttactctcaatcctacaaatgagagtaatcagcatcaggtaggaagattccacaattattaaaaacagagaatgaagtggtttcactctgctgaatgccctgaatttttgttaaaattatgtgactttactttttataaactcataatttaccctctgcacatatctaaattttgtaaagcacagagtcsttgttttaagtgaatggcaggtttaaaggaataaaaatgtttcatgttggagcacaaactaaactatactaaatatacagaattaccttacatatttac

SEQ ID NO: 595725 - DNA, 635 bp, Homo sapiens
gaaaacaccaaaccctcatacatttctagtgagaatttaaaataatacaatgactttgaaaaccaattttgcagtttcttaaaaagttaaacagatccttaccatgcaatccagaaatttcactcctggttatctatacaatagaaataaaacttaggtccaccaaaaaaatgtatacaaatgtttacagcagctttattcataaaatctcagactggaaataatgcaaatatgcattatctggtgagtggataaacaaaatgtggcatatccacacaacaaactattatttaacagtatataaagaagcaaactcttgatacacatgctacaatatgtatcaaactcaaaaccattatgctaagtgagagcaaccagacacaaaaaactacatattgtatgatttaatttctaggagatttccatacacagggcaaatctatatagacagaaatcagattagtagttacctgcagctgcaaatggaaasagagaatgactgcagactgacagagaacttttttaggttgatagaaatgctctggaacattgtggtgatggttgcacaacaatataaatttataaaaagaattgtatgcttacaaataaattttataatatataaattatacctc

SEQ ID NO: 595726 - DNA, 532 bp, Homo sapiens
aatcaattaagttgtcagaaaatctcttcaactctgtccctataatgtgaaaactatgctatgcaaaattgctgagrttaaaattgcaacaccattttagaaagaatgtaattttttaatgcacattaaaaggaaaaaagttttagttgaagtaaatgtccttgagttctttatataaacaagatttgaatgtggtaataagaaagaaagaacccactggatttgcaatggcgagaattatagctcgttttcttaacataaaaaagtcaaattgtaaagatgctttccccttcacctaattccacatttaccttccacttttatatttaacaatcaatgccaaggtatttcatcccacttccctgcaaagcacttcaatctcagcatacttatttatttattttccccttagtaataacctaataggagtgaataattttgcctcatttttctttacttgagcataaagaataacaatgaataatgtggaatttagccacagttttattgaactcgatcaaggtcattttta

SEQ ID NO: 595727 - DNA, 581 bp, Homo sapiens
actgcttctccactattcattcactcattctttcattcattcattactcaaatatttattagggcctacattgtgccagaaccttctagcatctttggatacatcaatgagcaaaatgagtacaggcccctgcaaacatgaagtttacaattcaacagagaaagacaattaaaaaataaacatgataatacaagtaaaatgtattgtgtaagaagatgataattgataaatacttttaaaaaatgagtgagataaggggtatgtggagagttgsgctgttaggcatggtgccattttaaatagggtgctcaggaaacaggcctcattggaagcatgtcatttgggaaacgatattaaggtgttgagataattagcaaggaggatacataggggaagagtattgtaggcagaggaaagggcaggaacatttctgtgtattgggaaaaagcaaaggccagtaaaggtggaagcaaggaaaagagtagctagagataaaatcagagaagtaacagaggtgagatcatgcagggtcttaaagccactgatttaccttgactttctctcaatagaaaggggaatta

SEQ ID NO: 595728 - DNA, 581 bp, Homo sapiens
actgcttctccactattcattcactcattctttcattcattcattactcaaatatttattagggcctacattgtgccagaaccttctagcatctttggatacatcaatgagcaaaatgagtacaggcccctgcaaacatgaagtttacaattcaacagagaaagacaattaaaaaataaacatgataatacaagtaaaatgtattgtgtaagaagatgataattgataaatacttttaaaaaatgagtgagataaggggtatgtggagagttgcgctgttaggcatggtgccattttaaatagggtgctcaggaaacaggcctcattggaagcatgtcatttgggaaacgatattaaggtgttgagatawttagcaaggaggatacataggggaagagtattgtaggcagaggaaagggcaggaacatttctgtgtattgggaaaaagcaaaggccagtaaaggtggaagcaaggaaaagagtagctagagataaaatcagagaagtaacagaggtgagatcatgcagggtcttaaagccactgatttaccttgactttctctcaatagaaaggggaatta

SEQ ID NO: 595729 - DNA, 597 bp, Homo sapiens
acctggtatcttagtcaaataaatgatagggacaaattccctactggtcagcaagccatccccagtgtggatccccactgggacctcaactctgatcatggggactggagtcataaacatctgttgacctgtgttctagaaggactaggagaattaggaaaaagcccatgaattattcaatgatgtctaacataactcaggcaaaggaagaaaatccttctgccttcctcgagaggctatgggaggccttaagaaaatatactcccctgtcacccgactcactggaggatcaattgatcctaaaagataagtttattaccaaatcagccacagataacaggagaaagctccaaaaatgagccctgggccctgaacaaaatctggaggcattattaaatctggcaacctcagtgttctataatagggaccaagaggaacagtctgaaaaggaaaagtgagataagagaaaggccgcagctttartcatggccctcaaacaaaccttggtggttcagagaggacagaaaatggagcaggccaatcacccggtagggctccttatcagtgtggtttgcaaggacactttaaaaaagattg

SEQ ID NO: 595730 - DNA, 521 bp, Homo sapiens
  misc_feature 1, 2, 3, 4, 5, 6, 7, 8, 9, 10, 11, 12, 13, 14, 15, 16, 17,18, 19, 20, 21, 22, 23, 24, 25, 26, 27, 28: n = A,T,C or G
nnnnnnnnnnnnnnnnnnnnnnnnnnnnatagctgagcagtagttatatcatttgaatatttaatgcctacagsgtaaaacaccaaatatgtccattttctcaatagatttactttttattccatatgaggggttcagctattggttcaaagcaatctcttccttgcttaatgatggatgactgctgccaaaatgcctccttttttctttgtatacctttctgacaattttttttccagctggcacatttttaaacttagcaggtaatttattgatccatttactgtcaagttcctcttgctggcaagtgattctgttctcatatatttgtgtatctctgatcttacatgtgcttgttgaatttagaatttaactgccaaagtgaaatcttattctcatgtcccacgtcttggtggagacatttttgccctctccatgccctcatgaagccaatgaaagcataaaattagatttataggaacacacacacacacatacacaatactcttattattattgta

SEQ ID NO: 595731 - DNA, 521 bp, Homo sapiens
  misc_feature 1, 2, 3, 4, 5, 6, 7, 8, 9, 10, 11, 12, 13, 14, 15, 16, 17,18, 19, 20, 21, 22, 23, 24, 25, 26, 27, 28: n = A,T,C or G
nnnnnnnnnnnnnnnnnnnnnnnnnnnnatagctgagcagtagttatatcatttgaatatttaatgcctacagcstaaaacaccaaatatgtccattttctcaatagatttactttttattccatatgaggggttcagctattggttcaaagcaatctcttccttgcttaatgatggatgactgctgccaaaatgcctccttttttctttgtatacctttctgacaattttttttccagctggcacatttttaaacttagcaggtaatttattgatccatttactgtcaagttcctcttgctggcaagtgattctgttctcatatatttgtgtatctctgatcttacatgtgcttgttgaatttagaatttaactgccaaagtgaaatcttattctcatgtcccacgtcttggtggagacatttttgccctctccatgccctcatgaagccaatgaaagcataaaattagatttataggaacacacacacacacatacacaatactcttattattattgta

SEQ ID NO: 595732 - DNA, 644 bp, Homo sapiens
aagttaaccaacactcaagaacactaatctccaagatggcccacagtaaaccacgccttctagtatttatgcccttgtgtatttccccttcattttgattctgtgctggctatgtgagtctaattaaacaatagcgggcagcagyagtaacactgtgcaagttccagacctaagccttaggaaggcctggcggtttctccttctgagctttgggaagccctgaacaaccatgcaataaatctggctagcctgctggagagaccacaaagaaagggcatgtgtagagagagaaaacctgagactacaggaaaaaaagagagtggctcagccattccagcatccaagaccagcccagccatatacctctccctgctgaggagccagacttgggacattccagcagcagcagctctcagactcgaaaagcatgagaaacctgaagcaagaccagaaaaatgactacacggtcaactcaaagaatcttgagacataatacattattgttattttaagtcactgttttaggggatagtttgttatacagtaatagataatggaaaaagcaaccagcaaaacatatggacatattgttcaatgagctagccactagaaaagtggtatgactgagaactgaattttgaatt

SEQ ID NO: 595733 - DNA, 651 bp, Homo sapiens
agtttttaagacagtacagaaaaaatttaaagaaagaaatataaactagacacattagtacttttttaaaacaagtatgttcctgtaagcatcagtctctattaatatggctcaatatatgcttactatttatatatatttattgtagatctttctgttggcagattgttgaatcattttacataaagttcttaattcgtcctaattaatattttttaaaaaacaagcaactatatcatactagacactaatttctcaaagattcataatatttaactgcttattaactaccctgatttcaaaattttagcatatttaagaataatatttttcacagaagtatattatttcttcattgtggtgatctaggttttattgatcctgaagcattttgtagatagatagatagatagatagatagatagayagacagacagacagacagacagatagacagacagatagatagatatttgtggggaatacatacattatatatatatgtgagtaaattagtgagggcaaattggagtcaaattataattaaaaaaataggaaggcctcaggacacttgcaatcatagcagaaggcaaaggggaattaaggcaccttctttacaaggtggtaggaaggaaaatgaacacaggagga

SEQ ID NO: 595734 - DNA, 546 bp, Homo sapiens
attataccctgaaccaaataagtataacaaaactacaaatgagttcaatgttacatatagtaaatatatcattaaaatagactacaatcagtgcccaaaaagcaagaatctaagaatgttatgggagtgcagttcaggtggagcttcctggaagaaataaataacagacctccacttgatgatgagcagttattatcctgtcaaatgtgtgtgtgctgtgtggagatctggggaactggagattcactgagatacagaggtggaggtggaagggaaagaaaagacaatgtgaagggtatatgcacaaagggctctggattcagggaataccacttgtaactgyagggctgaaacatgaagttcaagagggaaagcatatcatgccttcactggaggggaagaaagttgctcttctaagctcatgattttacatccctttaaggccatgaataattactgagtggctttaagtaagggaataatataattgggactacattgtttatttgttaaaacccaatgtaactccgtggtggtttttttgtt

SEQ ID NO: 595735 - DNA, 546 bp, Homo sapiens
attataccctgaaccaaataagtataacaaaactacaaatgagttcaatgttacatatagtaaatatatcattaaaatagactacaatcagtgcccaaaaagcaagaatctaagaatgttatgggagtgcagttcaggtggagcttcctggaagaaataaataacagacctccacttgatgatgagcagttattatcctgtcaaatgtgtgtgtgctgtgtggagatctggggaactggagattcactgagatacagaggtggaggtggaagggaaagaaaagacaatgtgaagggtatatgcacaaagggctctggattcagggaataccacttgtaactgtagggctgaaacatgaagttcaagagggaaagcatatcatgccttcactggaggggaagaaagytgctcttctaagctcatgattttacatccctttaaggccatgaataattactgagtggctttaagtaagggaataatataattgggactacattgtttatttgttaaaacccaatgtaactccgtggtggtttttttgtt

SEQ ID NO: 595736 - DNA, 578 bp, Homo sapiens
agaattcagttttcatctcatccaacatgcctgctcacaacatgtattcagtcacagaggcactgacgctgagattatcattattacgtctcaaactaataattaagacatctgaaacttggtgttcctatagattaagatattaggagttctttaggacagtatggtagtgagagagaaaataaaattaggaggatgttggaaaaggtgcttaaaggtagagaaatgtaggattcatgcaaggcrcttagcttttttgttcagctcttctccagaactaggcacactatggaaacatgatcagaactgagtgacgaaacatgtaagttgttcttggccaatgcttcaaaactggggtaaactgggataaactgatgcagtttcttgcaactggagagtattgacttctgggtttccagccttgtaaggccttactgggatggccaaatgacaagcaatcgagttcctgagaacctgcctgtgttgtggcccaatgcatgggaagcactaatctaatctatgaaaacttcattttaaatagactcttcttcaggtctgatattagcctatcctgacct

SEQ ID NO: 595737 - DNA, 589 bp, Homo sapiens
ggtttgcacttgctggtttaawaaagggcaatgtggctaggcagtggctttcaaaatacttgacccagacccacagtaaaaaaattaattttacattgtcacctaatacacacctagagacaccagacagagacacacacttacacatgtatagcttagagttttatgaagcattattctcttactacatgttatgcacttttacctttgtttctattcctttaattttgttttgttctctctgtctatctctctctcccctctctctctctctctctctctcaacacagacaggcccttgagttgacttcacaacccaccgatgggtcagcttgcattttgtgaaacaaaggaatagggaagagtgtggtagagactgatgtaacacgagtgcaggaaagccagcagatgccagagtggatagggtgtgtaggacactaaaaggggttttccttatccggcataacagggtgcccggttttggcaattaaaaatagaagctgcctaattaaattggaattttagataattacttttggtataatttgtctcatccaacacttgttctgcaatgatataatacttaaaa

SEQ ID NO: 595738 - DNA, 435 bp, Homo sapiens
tgagatgattctcttgccagacaggttctagtattttgatgcattatgggagtttcatctttccaggtggaggtctagctctcaagcccartgttgtactcatgttcacctgagtggtatacacttgggaaatatactgcagtcccacatgtcagacaatattgtccaagcccagaagctcacttctagagatgaaatcacctcaatgacattgttccaacccaagacctgtgtcagaggcaactttactctgagcactgagactaatgccccagcaatgcccatgggcagtctctccgaaagcactgacaagttggacaggaaacgtgttgtttttattccgctgatattagggagctctctgtttgctcaatcaatgacctggtgtacacccttatacttccattgctagagagaaatctggtaggtgctcca

SEQ ID NO: 595739 - DNA, 545 bp, Homo sapiens
ctttgtctctgactatgagcaaagaactacaccctccccttagctataaaacatataccattaatctttacatataccttactaaaccatcagttaataccctccaataatgtaactgctagacctgccactttgaccccaagaatatgccaggatattattgtcaaaaaaacaaaacaaaaaaaaggtggccaggtgcggtggctcacgcctgtaatcccagcactttgggaggccgaggcgggtggatcatgaggttaggagatcgagaccatcctggctaacacggtgaaaccccatctctactaaaaatacaaaaaattagccagatgtggtggcgggtgcctgtagtcccagctacttgggaggctgcagcaggagaatggcgtgaacctgggaggcggcattgcagtgagccgagattgcaccactgtactccagcctgggtgatgagtgagactccgtctcaaaaaaawaagtaaataaataaataaataaataaaagtaactcacacttttagtgcacttttaatctccaccaatat

SEQ ID NO: 595740 - DNA, 545 bp, Homo sapiens
ctttgtctctgactatgagcaaagaactacaccctccccttagctataaaacatataccattaatctttacatataccttactaaaccatcagttaataccctccaataatgtaactgctagacctgccactttgaccccaagaatatgccaggatattattgtcaaaaaaacaaaacaaaaaaaaggtggccaggtgcggtggctcacgcctgtaatcccagcactttgggaggccgaggcgggtggatcatgaggttaggagatcgagaccatcctggctaacacggtgaaaccccatctctactaaaaatacaaaaaattagccagatgtggtggcgggtgcctgtagtcccagctacttgggaggctgcagcaggagaatggcgtgaacctgggaggcggcattgcagtgagccgagattgcaccactgtactccagcctgggtgatgagtgagactccgtctcaaaaaaataartaaataaataaataaataaataaaagtaactcacacttttagtgcacttttaatctccaccaatat

SEQ ID NO: 595741 - DNA, 591 bp, Homo sapiens
tttaatttacagctgtggcaatgaagagaaacatattttaggccaatatgagctacttgacaatattttactggctataatgaaagatttaaacaaaattatccaatttgcattggtttttatcagtcttacactctattttatattaaaaatagatatatttggcaacatagtcaaatatggacataattaaaacatagcactttgggagttttgaattatttacttgactgtaaattcactaaataataaaacaactcttcaatacattctaaaggaataaataatataattttatacagataagtatgtaaaacaacgatcttctggtagtgatatgcctacaagttgcaagtgtgtggtgtagtggaaaaattagcctggaaatcaggaagctgggtactattctgggaactgacaataacagattatggacacatcacttagcttatctctgtcagatttcattaaagaaaatgagaaagttkggacagatgtgagttttctaaatagtgcttcttaaaatgtgtttctagaaaattttaacagatatgaatcataaaatgggttgtctgataagactagtttggg

SEQ ID NO: 595742 - DNA, 570 bp, Homo sapiens
attttgggcgggagtgtcccatttttttcaggtacagtgtgtcatggcttcccttggctaggaaagggaaatcccccaaccccttgcacttcctgtgtgaggcaacaccccgccctacttcatctcgccctctgtgggctgcacccactgtccaaccagtcccagtgagatgaaccaggtacctcagttggaaatgcagaaatcacctgtgttctgcatcgatcacgctgcgagctgcagaggcacgtgtctcctatttggctgtcttggaacggggggagagttaagcatagatttcctctgattttggccatataacttgtttagacaatgctttatcttcaagtgtttgagaactagcattacaaattaaattcgtgcacactgctaaatgtagagcaggttttatttatttatttattttttatgtttaatggcaaygtccatgtaattcagtctctagccagtattacatgttgtgcatcccagtgaaacttacttaccatcttttctgaatattttgtcaaatattgcttcatatggtttgtggattccaagactaagaaactt

SEQ ID NO: 595743 - DNA, 572 bp, Homo sapiens
aaacgctccataggaaatgttaactttcgttttttagggaatgggaaactaatgaagattctttttctgagctagagaatgacacaattactgagtgcttgagtaaaattaatatgaaactgctattttaagaaagtgctggaaggagaaagactgaaggcatcaggtagagcagcattggggggctattgaaatggtctaatttttgaacaattaaagcctagagtttgtggcagtgaaaatagaaagtatgtgtgaaagagttctttggaaattattcagttggatttgacgaggaaccaagtgctggcagcagaggagaggatgaagtccaagatgactctgtggtgttaagtttagtttattgggaaaataaggtactattttagaaatatgaaagttattgggtaaagaatgattaatttgaggtagcatttgagtggcagtgtccaacaaggagttggtaaggccagtcttatgagatggttcaaacctaaatagtgggaaatagaccagggtaccagytgaatttaaggatagaattgagactgggcatggtagctcatgcctgt

SEQ ID NO: 595744 - DNA, 522 bp, Homo sapiens
tgtatgtggtatcactttctttcagttccgttttccgtatgttttgcccttcttgttcatttgttcttcctgctggagtctaacctcggatgtccaggaagctctgcacggggtggcagaacctgttcgtttgttggcttcattatgaccttgtggtgcactaacttttgagggccatatctcagtatctagaaacctcttttcagaggttactcatttctccagaaaagaactctctaaacttctacttggggaatatgcctgcatctgggagcagggagtgggaaggaaagcagagtttggacattcaggtcatacattttctaaatgcccagattttcaaaccaattactcaactcctcctatgcagattcagattaatatccagtaatctgaaggttttctrgctcaatttagaggccctttgcctcaatgcatgagtcaaaaaaagcacaaacctcttgtctcacatgaaaaaagaaaaacaaaaaggaagaagagacagtgaaggagtatttaccc

SEQ ID NO: 595745 - DNA, 494 bp, Homo sapiens
gagaattcccaggtggcccagatgggagaatcgctgctgggcttcagaggatgtcccagcagttagaatgttgtaaggacacgtcgcagaaagccttgaaagcaaagtggccaggttgtgactctggtaggcaaaacaggcaggttcatcctcctggtatgcagctactgagatgcaaggtgctttttaaacattgtgcagctcttagattgtgccccagggaaggacaggccccatcaaggctagccaagagcagattgattacatctgtggccaaagtgtrggcgataaaatgtcatccatcagattctctaatcaccggtgaacatgaaataaggcaaatcagctgaagaatctttcagtaagtaaaaataataaaatgcctaaactgctttctattctacaagctaagtggtatttattttagtaataaagatgctctttaaatgaaaatgcatcagatcgagaggatacatttggccagtgtgaattaa

SEQ ID NO: 595746 - DNA, 445 bp, Homo sapiens
cctgcccactacagccttgcaaagtgctgagattacaggcatgagccattgcgccgggccagtatttcatttttgaatcacttaatactctccagtttttctatagactacttccctgtttagcacataggtgaatagacgtaagtatttttttaaaagttctttcctggtagtagattttgtattttaagtaattgggatcggcttagtccatttgtgtcgctataaagaatacctgagggcgagtaatttatacagaaaattggtttatttggctcatggttctgcgggctgtacaagaagcatggtgctggcatctgcatctggtaagggcctcaggctcttccactggtggcagaagggaaggggagctgstgtgtgcagcaatcacatggcttgagaggaagaaaaagacagctggggagaaaggttccaggctcttttt

SEQ ID NO: 595747 - DNA, 383 bp, Homo sapiens
tctctcttcatctcctatcttctacccagcttttgataaataattttgaagatatgttttgtaaaatgtttagttagcaaagcaatctcatctaacttctaaagttatatgtaaatttcagttaaccatgctatgtctataaagtctatgcttttatgttgaatgttcaaattatttaatgggttttctagaaaaaattagtattgaagcaattcagtctggacactaacgttttcatacttcctagttaattatcctcccatctatgtttacaaacaaaaatgtggcttattgctgatgttactacttaaccttccttatacttgatttgaatcttttcagcattagtctacatygaaaatatgtcagtgctacaaactgca

SEQ ID NO: 595748 - DNA, 650 bp, Homo sapiens
tgattacagattctgagggagtatgatatctacacacaaaaacaactttttcctttgacaaaaacatctgggatcgttctttgttaagcaattaactgagatccaggtaaacagaagaataactattgatttacccacatgaggctactgaaattcttttgggaaaaaagaattaaaattgtttgctgtataaagcaaccacaaagcttttataaaaatagcaatgatattggttgtttgagacatgtaagctaaagggagtcattttctggaagatcctattgctgaggagcagatttcagtccggttggtcagaagaacttgtccatgatcrtcatgagaccaaacagcacagtctcaactgtttattaagggcttgagaatccaagcagtatctgtgggctacaaatgccagtgtcattaattctggaaaaatatacatgattcaacaatggacaaaggcaggcttagacaaaggcacaggtcttaacgtgtgtatcactgtctgacaggacttggatgtggggtaaggagccctaaggggtggtcaaaggttaaaggtgaaaggtgaattctattctgggaaggttctgctttgtttttcctgtactggccacttccttccttgaggagctacttccttctaaaca

SEQ ID NO: 595749 - DNA, 655 bp, Homo sapiens
aaaaagtttaaactgatacatcacaaaagaagatatatgaatggccaataagtacatgaaaagatgcccaacgtcataagtcattagggaaatgcaaattaaagacatatggagataccatcacatactaaaattaaaaagactgaccatactaagtgttggagagaatgtggagcaactgggatacttacatattgctggtgggaatgtaaaatggtttaagccatttggaaacagtttggaagtttcttataaagttaaacgtaccctaccaatgaattccactcctaggaattactaaagatatataaaaatatatctttgtacaaacgcctttttccacttagagataattctacaaaagtcaaagctrtagtggcagagatcagctcagtgcttgccagaggctgggaatggggtgaatgtgggatgagattaactacttggtacatgagagaatttttagatgtgatgatgaaaagcaaagtgataaaccggggaaatatttgcacaataaatatgcaatacagtgttattatctgtaataaataaagcacttctgtaaatcaaagagcaaaatagaaacaatccaattgaaaaatcaatggatttatgaataagatttcacagaacatatagaagtgatagaattggg

SEQ ID NO: 595750 - DNA, 438 bp, Homo sapiens
ctttagccaagccctagaaatcgtcactgaaacacactgttctyaacttactccaccaaagagattttaatctacccaaaccaagaactagtaaatcacagtgcaaaagtgtgaagcatccaaaagattcattagctactgctttttgtcactggtttctaccagattttttttccttctcctctttatatttacaatctgctgacacatataatctataccatatagccatgaaatcagccacagtaaccaattttgaacaggtgaagaatcctgacccagtgaaacccatagactggagtcactcatcaagagctaggattaaatgttggctcaaaagagccgtctgatcttgcttcagtcacctctaactcctctgtgggtgaaagcaggaatttacttttccaaaactttgaaatgttacctgaagcagaattc

SEQ ID NO: 595751 - DNA, 558 bp, Homo sapiens
gaagccatgttaaagcaagtcctctcacaatgaaygaggacatccaatgacaatttttaaaaaggcattgttactctctgacatctgtgcaagaagcaaagaaaattaccaagaacagcttcttccttcaaatctcattttagatctatgtctattaatttatctacaaaatttgcatgactattcttatttttaactgatttcacttcttatgctaatgaattccatatgagctttcttacttgatattaatggctcaactttagttcttacaccagtccaggagttaacccaaattctgtgtatgttattgcaagttttggggacttgatcatacgatggcttctcatttcccttaatccactggattactgtttgtgaacctattctagcttcattataatgtattttaaggtacatgatactttaacagtgaacacagaagggtaggattagctttcttgtttgggttcttgataaaacttaatgttttctataaataagttctgagccaatttaatagacatgtggctataggtcaagacactcttcttcctc

SEQ ID NO: 595752 - DNA, 566 bp, Homo sapiens
tggaaaacttcatttatttaattctaagatgtcagtgataatataatgcaccatcaatttaaccactgcttagaagagaggaagagggaaaaacattgaatagataataaacatgattcttataaaatggagcaacagtagtatacatttatctgcatgattgcaagcaatactcttctttagtatgaccatcaacattttagactaaaccttctttttaagcctagaaagtcttatggatgaatctcttttagccaccaattagtgtgyaaaatatcacggtgacaactttctgtttccgataatgtttgcttgtcatcaagtccgctttgtcaaattttaggctgatataataattttgagacaaataaagaaaacctggattttttcacatttggatgaacttagcattttgaaattttctgtaactggattacatattacggtaagtgaagtagctctgtttgcaagttagccaaaggcttttgacagatagatgttatgttcctgagtggtagtccttcatgatgaataaattggtcatactaacctcttctagggctgaa

SEQ ID NO: 595753 - DNA, 648 bp, Homo sapiens
ttacccaaatctcatgtcaaaatgtaatccccacggttggaggtggggcctggtgggaagtaattggatcacagagttctcatgaatggtttaggaccatccctcttggtactgtatagtgagtgagttcttatgagatctggttgtttaaaagtatatagcaccttcacccttgctgtcttggtcccactcctgctatgtaatatacttgctccgtttgccttctaccatgagtaaaagttccctgtagctttcccagaagcagatgttgccatgcttcctgtacaccctgcagaatcatgagccaattaaacctcttttctttataaattgcccagtctcaagtatttctttatagcaatgtgagsaggaattaatacatcatatcctcacttaaaattctttagtggttctccatttcttccttaagaaagtccagcctccttagcatgatttgaaaagctccttgatttgcctatttgcagtcttatttctatgctttgtggtatttcacacttctatgcctttgctctgctcttttcttggctttaaacatattgtacttatttacctgtctctgtcagtttatttacttgccaaaattaaccgaagagtaaagattttctaatgccccaaataagatcaacc

SEQ ID NO: 595754 - DNA, 648 bp, Homo sapiens
ttacccaaatctcatgtcaaaatgtaatccccacggttggaggtggggcctggtgggaagtaattggatcacagagttctcatgaatggtttaggaccatccctcttggtactgtatagtgagtgagttcttatgagatctggttgtttaaaagtatatagcaccttcacccttgctgtcttggtcccactcctgctatgtaatatacttgctccgtttgccttctaccatgagtaaaagttccctgtagctttcccagaagcagatgttgccatgcttcctgtacaccctgcagaatcatgagccaattaaacctcttttctttataaattgcccagtctcaagtatttctttatagcaatgtgaggaggaattaatacatcatatcctcacttaaaattctttagtggttctccatttcttccttaagaaagtccagcctccttagcatgatttgaaaagctccttgatttgcctatttgcagtcttatttctatgctttgtggtatttcacacttctatgcctttgctctgctcttttcttggctttaaacatattktacttatttacctgtctctgtcagtttatttacttgccaaaattaaccgaagagtaaagattttctaatgccccaaataagatcaacc

SEQ ID NO: 595755 - DNA, 651 bp, Homo sapiens
ctcatgctctggagttctgtttcttcctttcagtttgtttgttctctgttttgattgtaaaatttctcctgttctgtcttcctggtcacttattctttcttctgtctcctctattctgttgtttttattttagttattatatttttaagttctacagttcccartgggttctttttaatgtctttgatttatttgttcaatttctatttcttttctattttcttcatttgtttcaagtgcattcataattactctttgaagcattttaattatagctgctttaaaatctctgataattctaacatatttgttatcttggtattggcatctatagattgtcatttttaattcagttatgagatattgctgattcttgatatgacaagtgatttttgatgagaacttggatatgtttgtaatattttctggaaccctggatcttatttaaaccttctgctgtacctggctttttctgacactgctacagtagatgaaggtggaggcaattcttcaatacttctaggtggaaaaaaaaagtctaaattccctacttggcctctattgtcacctgaggcaggggtgggtttctaccttatcatgtggttttcagagaccatggtggaatgggggtggccttgtaaccgtggggaa

SEQ ID NO: 595756 - DNA, 535 bp, Homo sapiens
tgtcaaatatagtttaaaccataagatatgtgtattggtagcttaacaaaatacctagatataaatgatccatagttagttcagcagcccaaaacagccatcaaggactggtgcaggttgggttccccaagaatcagactctaaaattgtttttagcctgcgaaaggtttactgcagagtactttggggatcaacattgtggaaggaaagaaaaagaggcagcatttgcacagggagaagtccaattgttataaaggcccagggaaaacagctgaccttcaatgaggagttctggagactagatgacctttcagagstctcttccattaggaggaaaaggctgccatcttagagatcctgagcccattagttatgggatttaggaccttaggaagggacgctctgtgctgctgatacaatccctgaagggatcgacagttgagggcagcagcacttcgaagggtgggagtaattatctttccttcctgcagtgagatctggacagcatatcacaggatcccacacagacacttga

SEQ ID NO: 595757 - DNA, 593 bp, Homo sapiens
gtgtatcacaggagaagttaatcaggccagccccattaagaccaatgcagaaagtagcaaaaatttggcaggaaccctggacaatgtgctgggaatcttgagtcattcttcaagatgtggagaggtatttgagtatttttgtggttactgttgtttgatttctctctctctttttttaaaggaagtgaacaaatgcggttaacaaaaagaaacagcacataaaacatatttttgttatctcatgtaagacctagtgatcagattgaaagctgctcctggcttcaggcacctttgatagcaggctagcaagctgtctttccagatctatcagtaagtgtcactagtgctggtttcatctgtagtagggacagatctgagttccgcctgcaatggattgaaatcacctttattatctgagctgtccatctggtgtgtgtgttgtatatttgtgtgtgtgttttcctttccatctcccccagtccatttccaatactgaaggtgaagtaggaactgataatggaatgaccttgaggccaaaaaaatgtggagtgaataacgtccaataaaatgsactatgacaggtatttcataaa

SEQ ID NO: 595758 - DNA, 369 bp, Homo sapiens
atctgaggttgagtagccattacctaggtaaagaaagatgaggagaaaacttccctagacagagggaagtttaaagattcagatgaggaaagaaaactttggcactgttgaagaagtgaaggaagctcattgtgtgctcatgttatgttttaagggagaagctcatgttgtgttttaagggagaagtaagtaaggtaaagaaagaagtttcagatggtttgagatgtaggaaaagggtagaccatgtaacatattagaaaatttgacattattacagggacrgaggaatcattgaagatttcaaagaaggaaattgaattgataagatgtgcttattttaaaattaagatcctattagttataggatgt

SEQ ID NO: 595759 - DNA, 464 bp, Homo sapiens
tacttattaataattactttgattgcacatagaataaattctctaattagaaaacacagtgtggctaaatgggtaatgcaaaaagagctaactatattctatctacaagagactcacttaacctgttagggtacacataaagtgaagggtgaaaaagatatttaatacaaatggaaacaaaacaagagccgaagtagcaatacttttatcaggtaaaatagactttaagccaaaaactgtaaaaagatgtaaaaaagcccattatatagtgataaagttctcgatacagcaagagaatataacaagtgtaaatatatgtgcacctaatgtgggaacaatttaatatagaaaacaamtattaatatacctacaggaagatacagacttcgatataataatagcagggaacacttcactttcagcagtgagtagattacccagatggaaaatcaaagaaacactgg

SEQ ID NO: 595760 - DNA, 595 bp, Homo sapiens
gtgcggggacgggaggaggggactcacctggactcgcgagggggactgagcgctctccaaatataggtcaatgtcccgctcagcctccctcccccagcaccgtgaggaccgaggcctggggctggcgcccgcctggtggacctcgggggcaggctggggaccgggcccctgcgggacgcggcgcggcaggacgctccccgcgcctttctttctgcacctgcccctcggggtgggtccccctctttaccctcgcttcccccsgcgggtgccgataaaggcggctaattcccgagcccggggagggagggggcgactgttccagtcaacacttccccgcgctcttccccgaccctcccagagcgttcccgctgctcagggcgaggagcagctgcggccagtttgtcctagcggtttaggaggcagggaggtttcctccagcctggagctctggactcgcctcgggccccaacaccttcccgctgagaccgcgggcgttgtccctgggtctctctgcctccatttcccccacctccattctggttaccccttccccccactctttccttcctaacccatgagagcactggaaagatgc

SEQ ID NO: 595761 - DNA, 488 bp, Homo sapiens
agaacacactcatttggtaaaccattaggaaattcattcttaggaaacagtggttggtaaaaggcagacgtaagagacaagagccaggcactgttctgggtgcactayaaatacttatttcatcctcatagcaaccctatgaagtagatatgaaggaggaagctgaggcacagagaggttcagtaatgttcccaaggtcacagagtaagtgacagagttgggattcaaacagaagcatctgggctcccaagtctgtgatcttcatactgtactctgccatctcagtctgatgccacagggtcaggttgaactctgactcttctctccctccaacatcattagagccagatcttggctctttttttatcactgctctacattcattgcctaattcacagacacttcttgcattactcttacagaaacctcctgactgatcactctagttccttaccctctggtcctcctcacgctggtataagacttgc

SEQ ID NO: 595762 - DNA, 590 bp, Homo sapiens
attaggaaacaggacagatcatgtccggattttgtagcttacatatggtctcatgctgttgccccagaactctgtgagggtccaagatgactgtggcttacgtctgatgagcttatgccacataaggatgaggtcagatgctacaagaggggcacagacattgaaaagaagaaacatggggcaactcaatggatgagcaaagttgaatgcgttgtgcagtcagcaagtgtcttttttataagaaagctctgtgcttggtttcacctcctggtgctggacataccatcatcctgctgattcccaacattgtgaagggattttgagttcagcctccgtggttccttttgagaacaatggttgccatcagccaaactgcctagcttggtcaaaacacagaaggcataaacagcctttatgcagtgggaaatgtttcatgattcagaccagtcactgtttgctgatcacacagcactctgggtggcactgctaatacagaggagtttgtgcttyttgccagattgtggacatatggcagacactcaaaattatgtgttgaatataaaagagttgaattatggggaaagtcagtg

SEQ ID NO: 595763 - DNA, 599 bp, Homo sapiens
ctatcatgactggcatgtctgatattaccccaaacaaaatgacagctctgcaagtggggaagatggagggaatggatgctgggtagacgccaggacttgctgtgcagtgttctgattcaacagattacgtcactctcctgtcaggtgggcaactatttggtatcacacaaacaatagcttattcatckttgtatctctaagtcctaacacagctttgtggcacttactctgttagacaaacttatgagtaaatgaatgtctgtctggttttaatacctctcacatctaaagtagttctttttaaaacacaatccagttttattcttgtctttttatatctcttatatgaaaatcaattcatcattagttttccattggatttgggcagacgggtaagttgtaaagtgctagagtaatggtattgacaagttatatgatgaagttgaacaatatgagagaaaatgggatcatggtaaccttgttatccctaggtcagtttaactattgaagaggaaataaactgagcactaaaactagctttcctttagtttttattaaaatcagaaccagggctttgtagtgtaactttgtgcaatgcg

SEQ ID NO: 595764 - DNA, 606 bp, Homo sapiens
catgtcctaccaccagcagcaaggaaggctgggaaagcaggaacaggactatcatgactggcatgtctgatattaccccaaacaaaatgacagctctgcaagtggggaagatggagggaatggatgctgggtagacgccaggacttgctgtgcagtgttctgattcaacagattacgtcactctcctgtcaggtgggcaactatttggtatcacacaaacaatagcttattcatctttgtatctctaagtcctaacacagctttgtggcacttactctgttagacaaacttatgagtaaatgaatgtctgtctggttttaatacctctcacatctaaagtagttctttttaaaacacaatccagttttattcttgtctttttatatctcttatatgaaaatcaattcatcattagttttccattggatttgggcagacgggtaagttgtaaagtgctagagtaatggtattgacaagktatatgatgaagttgaacaatatgagagaaaatgggatcatggtaaccttgttatccctaggtcagtttaactattgaagaggaaataaactgagcactaaaactagctttcctttagtttttattaa

SEQ ID NO: 595765 - DNA, 606 bp, Homo sapiens
catgtcctaccaccagcagcaaggaaggctgggaaagcaggaacaggactatcatgactggcatgtctgatattaccccaaacaaaatgacagctctgcaagtggggaagatggagggaatggatgctgggtagacgccaggacttgctgtgcagtgttctgattcaacagattacgtcactctcctgtcaggtgggcaactatttggtatcacacaaacaatagcttattcatctttgtatctctaagtcctaacacagctttgtggcacttactctgttagacaaacttatgagtaaatgaatgtctgtctggttttaatacctctcacatctaaagtagttctttttaaaacacaatccagttttattcttgtctttttatatctcttatatgaaaatcaattcatcattagttttccattggatttgggcagacgggtaagttgtaaagtgctagagtaatggtattgacaagttatatgatgaagttgamcaatatgagagaaaatgggatcatggtaaccttgttatccctaggtcagtttaactattgaagaggaaataaactgagcactaaaactagctttcctttagtttttattaa

SEQ ID NO: 595766 - DNA, 597 bp, Homo sapiens
ccacatgcaacctggtgaagcacatcctaggagtaggcatttcaaggggcactgctggctggagaaagtgcaggctgattcatcctgtggttggaagcaggaaacaaatgtcctgggataatattttgaaataggagcatgtcccttcccccatccccaagagctgaccttcccctgctcaaactaaatgattctgagttccttatctcaggaatgggatgaaccccagaaagggagaaaagaggarcttttctgcttttgatgttcagtaagccagccttcagaggcaacagggagaaatctgggcttaagcaatagtttgagaaaaaagctgatgagtaagaagcaggttccaccttccctggggtgaaggaaggggaaagtcagaaagaaacagttgagtgcatagacttgtgaatctctgaagaagggggattgtttatccttcagtcaggctgagctcagggcaaggcagattcttcagaaaagagcatggaagtgcatatcttgtttcctgtgtgggaccaaaaaaggtagcaagagctcagaaaagaagtgcatagtgtacagagaggggcttcaacagctcctcgaaga

SEQ ID NO: 595767 - DNA, 597 bp, Homo sapiens
ccacatgcaacctggtgaagcacatcctaggagtaggcatttcaaggggcactgctggctggagaaagtgcaggctgattcatcctgtggttggaagcaggaaacaaatgtcctgggataatattttgaaataggagcatgtcccttcccccatccccaagagctgaccttcccctgctcaaactaaatgattctgagttccttatctcaggaatgggatgaaccccagaaagggagaaaagaggagcttttctgcttttgatgttcagtaagccagccttcagaggcaacagggagaaatctgggcttaagcaatagtttgagaaaaaagctgatgagtaagaagcaggttccaccttccctggggtgaaggaaggggaaagtcagaaagaaacagttgagtgcatagacttgtgaatctctgaagaagggggattgtttatccttcagtcaggctgagctcagggcaaggcagattcttcagaaaagagcatggaagtgcatatcttgtttcctgtgtggraccaaaaaaggtagcaagagctcagaaaagaagtgcatagtgtacagagaggggcttcaacagctcctcgaaga

SEQ ID NO: 595768 - DNA, 621 bp, Homo sapiens
ttctgagaataaaggaggaaaacttttttcttctctgtgggcaggaaggacagcatgttttccatctcaaagacaggaaagagttatctcttcctctgggatccatcagcatcctgcctactcctgcgtcacagcacagatcctaactggcaaaattattaatctctcttccactgaaatagatacatcagacagattcctttctgactgaaactgttctgctgtgaaagactaacaacaaagcagatgctccttcatgcctggccagttctatcagttatcctactggccatccrgggtaggaagaagactaaagccttctaacacctgacatctcccaatccaggagagaataagaggaaattcccagttactgagaagtgaattgcagctcccctttttgaggatctaataccatcagccaccccatctccttatgggcccagaaacccatgatctcttattttatctcttcctttataagaattattgagtaattgctatgctgcctatactgtgtcagttgcacatcaattaaacaattgcctaattggactatacattctctaccctactcctggtaccaaaatctgtgttagagttctccagtgggacaaaacc

SEQ ID NO: 595769 - DNA, 566 bp, Homo sapiens
cctgcattctatgattttatggcagactctcaagaaaggcattagagttggttgggactgttactatatccccagctccagcaccatatctgatatagagttagtgctgaatacatgttactcaacgaacttgctgcaagaagtcttcacttttaagagaayatttcaattacttaaaacgatcatagaagggaggaatatgtacgtactaacaatctaataaggttactcagaattgtatacacaaaactgctgaagctaacagcatttatatgcttaagttttccaaacaatgagttgaaaatataccctgaagaattgtttatgccaaataaggctgactattcatgatcatgactggaattgctgcatgttttgtgccagccacttcattcctgccaaacatcctcccaatttgcaaggattcttgggtttcattttgaaaataaagcagtaaaatgcttcttaagctcaacttatgtggggtcttattcttcattagtacttacttaagctatactgattagagtaacatcttaactcttttgaaatgcttattttgattg

SEQ ID NO: 595770 - DNA, 583 bp, Homo sapiens
ttgctttttccctgcattctatgattttatggcagactctcaagaaaggcattagagttggttgggactgttactatatccccagctccagcaccatatctgatatagagttagtgctgaatacatgttactcaacgaacttgctgcaagaagtcttcacttttaagagaatatttcaattacttaaaacgatcatagaagggaggaatatgtacgtactaacaatctaataaggttactcagaattgtatacacaaaactgctgaagctaacagcatttatatgcttaagttttccaaacaatgagttgaaaatataccctgaagaattgtttatgccaaataaggctgactattcatgatcatgactggaattgctgcatgttttgtgccagccacttcattcctgccaaacatcctcccaatttgcaaggattcttgggtttcrttttgaaaataaagcagtaaaatgcttcttaagctcaacttatgtggggtcttattcttcattagtacttacttaagctatactgattagagtaacatcttaactcttttgaaatgcttattttgattgacaaagt

SEQ ID NO: 595771 - DNA, 599 bp, Homo sapiens
agagcctccaaccctgattcaggccctgggtcccttgaggctactctctgggcttctaaattatctctgtgctcaatatggccatgcccatatacctcccagtctccaaacagggatgttgctttagccctcactgccttttcagcttgtcagttccccaccctaagtccagaggctggagctggaacagtcacccccagcttatgtcaggagccctactgcctgcytctggaaacttctgtctgtgtgcctgactcattctgtcaccattttcccaccacttgcccaccctcccaatgggcctctgcactcccaatgctgactatgacctgaactgaccacctcactttaaaatgcttgctgtcctctaagaccttgtcctaccctaatggacaggtcctgtgcatgtcctggtttgctaccaatttctatctttcctagagaaataaaatattaatatttaaaataaccattattgaatgttttcttgtgtgccaggaactgtgctaagggctgtaatatggatttccttccgtaaccccatcacaaccatagaagataggtactattattatttccatttcacaggtaagaaaact

SEQ ID NO: 595772 - DNA, 555 bp, Homo sapiens
tcaggtacactttcaagaaccacttattttagtttgtagcatacatcacaattataattttaaaagattcatataattatgtatttaatatttgcctttgccacaggcctgtaaaatcctcaaaggcaagtaacatatctgtgttttgtatccaagcactgagcacgtggagggtctttgtcatgaatgaatggatggatagaaggatgcatggatggatggatggatgaatttttgttccgtcttctacctaccggtcagcacagagtctagctccaaatctacacttaatgaaagtttgctggatgaatgggaccgtgcaactyggagtgcagcatgagctctgagccagtcgagtgaagatgcagacaattccctcagcactcagacatggatctgagcctcacctcaaaaaggagggccgatcagctggatcaggtgctgctagggtcaagaagggctagggatgagagaagagcataattggcttcagcaaggggttactttcaggtgacctctgagagaaggcgtccagttaatagtggcagtgggaat

SEQ ID NO: 595773 - DNA, 630 bp, Homo sapiens
aagccccaagaaccctggtgtgagctctctaagagagctggatggaggaaggggaaggtatttctctctcagccagagagaaaggtgagcacccaagggatggcagacaggaggcaaggagctccaggtggtggcagcagagagaaaggatgccagtgccacaggggcgttggccagaggctgagggcagatggcctgtgtccagagtgcagaccactgggagggaagagagagcagttgcatcatggtggaagctgaaacgctgctgctgtggcatgaaaagcagagcaacagcaggcaaaagggcagaggcaaggggctgccaacctcagaaactggctctgagaaactggctctgagtatctggagaagtaggcctgaggggattattgagccatcaaacctagacatcaattattaaagtgacattccctagaaccagcacattgtggagtcatttgtagtactttccaaacctagctatgcctttggagagtgyaaaaactaaactaaaatttaatttaataaaaaaacttcctgggccccaccctaacaaaaggctggattccaggaatcttatattcttctttcttttttcactcttttaaaggaaaatgatgagacacaaag

SEQ ID NO: 595774 - DNA, 557 bp, Homo sapiens
agtagagtatagcagtactcccttatccgaggttttgctttctgtggtttcagttacctgcagtaaactgtggtccaaaactatcaattggaaaattccaaaaataaacaattcataagttttaaattgcatgctgttttgagtattgttatgattgtgtcttattagttattgttgatttcctactgtgcctaatttataaattaaactttatcatatgtatgtatgtatgtatgtatgtatgtatgtaaaggaaaaccatagtaagcatagggtttggtactatccatgatttcaggcatccatttggggtcttggcatgtgtcttggccttatctgcagggggctactgtatatcatgtctgtccatgacttccactggcagaacttggttataaagctgacttaactgcaaaggaggctgggaaatgcagtgtagctgtttccacaagaaaaatgaaatatgttttgaagaacacacagcagcctctgccacaaaggtcatcctacaggattttgtgctgtgaagractagttttctcttgggccagtctaat

SEQ ID NO: 595775 - DNA, 535 bp, Homo sapiens
agctgggactgcaggtgcacgccaccatgcccagctaatttttgtatttttagtagagacagggtttcaccatgttggccacgatggtctcgayttcttgacctcatgatctgcccaccttggcctctcaaagtgctgagattacaggtgtgagccaccgcatctggccagatacttcttttttataggagatgctatccaatgcattgtaggatggtttagcagtttccatggcctctaactactagatgccattagcatcccccttccccaattgtgacactcaaatatgtctcaagacattgtcaacaatgtcctctggaggagtgagggacaaagtcatctccagttgagaaccccaggtctaagctaatcatagtattcaattttttccaccagtaattgatttaaatgttgtatatgatatatttcttctggccagtaggacttaggaggtctgctgaggcctctgaaaaagtttcctaacttttaaaaagaagctcaaagaatatatagctcatatagctcctttacc

SEQ ID NO: 595776 - DNA, 535 bp, Homo sapiens
agctgggactgcaggtgcacgccaccatgcccagctaatttttgtatttttagtagagacagggtttcaccatgttggccacgatggtctcgacttcttgacctcatgatctgcccaccttggcctctcaaagtgctgagattacaggtgtgagccmccgcatctggccagatacttcttttttataggagatgctatccaatgcattgtaggatggtttagcagtttccatggcctctaactactagatgccattagcatcccccttccccaattgtgacactcaaatatgtctcaagacattgtcaacaatgtcctctggaggagtgagggacaaagtcatctccagttgagaaccccaggtctaagctaatcatagtattcaattttttccaccagtaattgatttaaatgttgtatatgatatatttcttctggccagtaggacttaggaggtctgctgaggcctctgaaaaagtttcctaacttttaaaaagaagctcaaagaatatatagctcatatagctcctttacc

SEQ ID NO: 595777 - DNA, 535 bp, Homo sapiens
agctgggactgcaggtgcacgccaccatgcccagctaatttttgtatttttagtagagacagggtttcaccatgttggccacgatggtctcgacttcttgacctcatgatctgcccaccttggcctctcaaagtgctgagattacaggtgtgagccaccgcatctggccagatacttcttttttataggagatgctatccaatgcattgtaggatggtttagcagtttccatggcctctaactactagatgccattagcatcccccttccccaattgtgacactcaaatatgtctcaagacattgtcaacaatgtcctctggaggagtgagrgacaaagtcatctccagttgagaaccccaggtctaagctaatcatagtattcaattttttccaccagtaattgatttaaatgttgtatatgatatatttcttctggccagtaggacttaggaggtctgctgaggcctctgaaaaagtttcctaacttttaaaaagaagctcaaagaatatatagctcatatagctcctttacc

SEQ ID NO: 595778 - DNA, 514 bp, Homo sapiens
cgacttcttgacctcatgatctgcccaccttggcctctcaaagtgctgagattacaggtgtgagccaccgcatctggccagatacttcttttttataggagatgctatccaatgcattgtaggatggtttagcagtttccatggcctctaactactagatgccattagcatcccccttccccaattgtgacactcaaatatgtctcaagacattgtcaacaatgtcctctggaggagtgagggacaaagtcatctccagttgagaaccccaggtctaagctaatcatagtattcaattttttccaccagtaattgatttaaatgttgtatatgatayatttcttctggccagtaggacttaggaggtctgctgaggcctctgaaaaagtttcctaacttttaaaaagaagctcaaagaatatatagctcatatagctcctttaccttctgctggacatttttgggtctggttataatgagcagactgtagtagctatcttgcaaccatgcaaaa

SEQ ID NO: 595779 - DNA, 464 bp, Homo sapiens
cgtatactttaactttcttcctcttggctggaagttccatgagagcagagacatctttctttcacaacaacacacacagtgctgggtgccatgctgaacacataatcaaagctgagtaaatattagtcacataaataaatgtattaacccctcttcaactcagattccactgcctgcccacatacacacccatgaagtaggcactcttattattattcccattcacaggaaagttaacactgagggaatcagagcattgatcgatggcacagagccagtaagtggcagtgaacaaagactaagccaccaaaggcctgtgtcattttctctattctgcatctcttacagctctggggagagaygtatgggagagacaagacagaaatttactgctaaacccctaaaatcctttctgggttattccaggggtcataccaggtttacagcttcacagatccaccagg

SEQ ID NO: 595780 - DNA, 605 bp, Homo sapiens
acatcccatcatattggattgtctattgatttatctgggatgactgagtgcagacataaactaactctgagatgactcaaaagctgaaagatgcagggaagccacaaggagaccacttctggaacagcattgcaggctgagggcctgagagctttctatttcctttcccaggtcctgtaagtttttgctatagctttacagaaaggactcatttgcttgaaccagccctaaggatatcttcatttcatgggtcagtaaactgtggcctgagggtcaacaccagcctttcacctcaaaagctaagaatggtcttagcacttgaaaaaaatccaaagaataacatttcacaccccatgaaaattctatgaaattcaaacttcagtatccaccaataaatattttttggagcacagctgcatttgtttgcctgtatattgcttatgactgctcttacattacaaaggcagagttgagtacttgccccagagatcatatgacccccagagccttagacaggggtgtccaagggagagaacacmgtcatgggttcttagtttctgtttctggctggtccagtgaagccccttcctcatccctcttttcca

SEQ ID NO: 595781 - DNA, 480 bp, Homo sapiens
gcttccagatagtctagaataaacatctcctctcaagatccttaaataaatcatatcttttgccatataaggtactattcacactttctggggattagaagtgaacatgcagtagtccctttgtatctgcaggttctgcatccactgattcagccaaaaatattggaaaaataaaaattaaaaattaatacagattttaaaaatacagtataacaactatttacaaagtattacatcacattagatattataagtaatctggagatgctttaaagtatacagaaggagtatatgggaggagtagctgtggattttgatattcacaggatgatgctggaaccaacccccgacaaayaccaaggaatgattgtatttcgcggggacatttttcttcctaccatttacacttatgcaggaccactgaccttggagggcccttgacctgcctggcaatctgaccaaattactctggaaggcttg

SEQ ID NO: 595782 - DNA, 556 bp, Homo sapiens
ttgttattaattattatcattatatagttctgagactcaaggacctgggttgacaccatcaaggtagagtattatatatgatcattatgtatgatcattatgtatctcttaggaggtatttggctataagaaacagaaaatccaatcatggcttttatcatgggttcttttattgtttagcaaggagtttggagataaatggcttccacattcttttagcagctcagtgacatcaggtccctggactagtagctctgtgattcactcagcctttctcttctattccataaaatggctgtgctagctcctccggttcataaattggccacactagctcaaagcatgtcaccctcaccaacagtgttctaaataggagagaaggaggatagtgggggaaaacactytcctcataggccactaccccttttgtcagagaggaaaatcccagaagcctcctggctgatgtttctgtacctctcattagccaaaagcaggtcacatggtcacctgaaactcaaggaaaggaacaggatagccataattggtttagaccagt

SEQ ID NO: 595783 - DNA, 537 bp, Homo sapiens
tattaattattatcattatatagttctgagactcaaggacctgggttgacaccatcaaggtagagtattatatatgatcattatgtatgatcattatgtatctcttaggaggtatttggctataagaaacagaaaatccaatcatggcttttatcatgggttcttttattgtttagcaaggagtttggagataaatggcttccacattcttttagcagctcagtgacatcaggtccctggactagtagctctgtgattcactcagcctttctcttctattccataaaatggctgtgctagctcctccggttcataaattggccacactagctcaaagcatgtcaccctcaccaacagtgttctaaataggagagaaggaggatagtgggggaaaacactctcctcatargccactaccccttttgtcagagaggaaaatcccagaagcctcctggctgatgtttctgtacctctcattagccaaaagcaggtcacatggtcacctgaaactcaaggaaaggaacaggatagccataa

SEQ ID NO: 595784 - DNA, 543 bp, Homo sapiens
gatcctggtccgaattctagtacaaatgaatcacatttagctattagtaattgaaatcccaaaagagtagcttaatcaatttagaagcttatttttctgattatatgagaagtttcaagtgaggcattgctttaactgctcaaggatgtcargactgagatctctgagattctcttggcctttccctcattgtcacttcatggtcccaacatggctcctctatcaccaacctaagtgtccatattccaggcagaagaaagataaaggacaagggcataattggatgcatcagctgtctccagcctccctttcccttctgagggactctccccgaggctctatccgtcaacttccttctcttatctcactggtcaaaactgtgccagatggtccagtggtatctgaaacaagtggggaatatagtgatttagctaggcacatggctcctctccctggccaagatcaggaatttgttagtaaggaagaaaagaatttatattgagtacataattagcagtctctcttacaacagattttccaaga

SEQ ID NO: 595785 - DNA, 505 bp, Homo sapiens
atttgttccagcaatcccattactgggtatatatgcaaaggaaaataaattgttctacaaaaaagacataagcactcatatgttcattacagtactattcacaatagcaacgacatggcatcaacttaggtgtttgtcmgtggtgaactggataaagaaaatgtggtacatatataccatggaatactacatagctataaataataaaatctatcctttgcagcaatatggatgcagctggaggccatcatccgaagcaaattaactcaggaacagaaaaccaataccacatgttctcacttgtaagtgggagcaaaacactggattcatatggacataaagatggaaatgatagacaccaggggctaccggagcaggaagagattaatggggaaaggtctgaaagactaccttttgtgtactgtgctcactacctgggtgatgggatcattcgtaacaaacctgtacatgtacaccctgaagttgaaattatatatttttaaaa

SEQ ID NO: 595786 - DNA, 529 bp, Homo sapiens
agaaatagacatcccgacacccagaatatgatctctgaccaytactggctgcctctggagtgaacactccattactgtcccccgtcaatactctctcttcccaaaaatcaggttctgacttttcttgccagtgaggctgatgatcctcaagcttgacaactgtgctgataaactttaagaactgctttgatcagtaaaagggcagtaggtagttgatagggtgaggccagcagggcagagaaatatgtggactatggattgattgcaagaacaaatattctgcagaggtgtgtgtgcttctttgtttatttcagcagtagctattagagtcatggttctctcccatcaacaggccaacagtatgatccatccccttatgactatattgactgatttaaaatctgatctgcacatgtataaagatgaccactttaaaaatctagaaatacataaatttatgaagttatcataagacacaggagcagcttgctctcataattaaaatacaggaaatatagatgttaagctc

SEQ ID NO: 595787 - DNA, 593 bp, Homo sapiens
gctgtcattcttacttttgttctcctttatagatatcaagtcctataacgtattctgtttattcctggttttgaacaatttgattttaatgtatcttggtatagctttcttcatgtttcttgtgctttgggttcattgagcttcttgggcctgagggttaatagtttccatcaaatttgaaaaaaaagttagtcattatttcttcagaatttttttaggagtccctcctcttttttctcttattcaggaactccagttgcatgtatattaggatcactgatgctctgtttgtttatttttattttttcttctccatatgttacattttgagtagtttctattgctgtgtcttcaagttcattaccaagtagtcatatttagtgtgttctccatctcacacattgtagttttcatctcttgaagttcaatggggtgtttcacaattttccatgtccctatttaactttctggacatatggaatagattcataataactgttttaatgaccttgtttgcaaattctaatgtcttttttagttcttggtcaattttgtttgatwgactttttatccttgctattggttatattttc

SEQ ID NO: 595788 - DNA, 645 bp, Homo sapiens
gggactacattttatgtcacaagagagcagtgcccccttttggtgccaaatgccaaaagttctttgagggcaaggacacagtcacttctgcagatcctcaacactgccacataaaatcatttaagcaaagcaaactattaagctaccaatccttcacatggtaaaagaggaacaatttacccacattagcataaacatggatacatttggcaaagatcacttttcatgtatcatgttcttttcttgaacaccaactataggaccttacatgctaacagaaaactgatgtatattaattgagtgcataggccttgttggctctttctaacacaaatctcttgacataaagaaaggaccgggactttctctagaactaatatgtctataatgtctctcatctaatgatatcaaaatgcttttttcgactggcccacggaggtatcagatttcatattcaaatccagatcttgcgtacaactctgtgaaatatgaaaaatagagttcagtaattgtttggatataaaattgtccaatagaatagggtagaatagaataatccatttattagaaaggaatattatctgtttctccctttcatttccaagaaacaacaaataacaycaactctttgctaacaaacagcat

SEQ ID NO: 595789 - DNA, 463 bp, Homo sapiens
cagagcctgagctaatattaaccacaagattatgctgtctcatcacagacagggttaatagtgaattttaaaaatgtattttattgtaagaaaatgtaataatattatatgaggtaaagaagtaatcataactttggatggaagaagcatattagaacattctagaactgaataacaayacagatttgtattaataaatcttacaataaaaaaagataaagaagattttttcttctaatttaaatctccatagttgtattattcatcatcctgtttatcatcatcctaatcatcaaattgggatgaagtcagacataggtgctggacagaaacatgcagaaaacatttagatagctatgaagacttggacattctaatttttataagcctctccccaaagaaacacagtcagagaatcactgagcaacgtgaacaaatcaattttttagttactcaagaattc

SEQ ID NO: 595790 - DNA, 596 bp, Homo sapiens
accatttcctcgatttttttgtgccattcacaatgtaattgttgtataccaacacaagtttaactgtagtccgcattcttaacaatttctctatcactttctcaggtctagaaaatcaacaaaacaaaatctccgatttgtggcatttatttgccaatttccacggtgtaaatactctcactttggctaatttcaatatgccaacaagagtcaataaacatagacttgaaaagaaatgtgcggtagtacaccattgtatagtacatccacccattcaggaaaataatagacataaataaccttaagagcatagataatagaaaaatgttgtaaaataattagggaggatgagctttaatatttttactacatctattctaatacaatttaattgtaagtgtacatactttaatttttactaatggctattttaamaaccagcttgcataattcctgaaaatttaacaatccagctctctcaaggcagcataagctagatctagcacaccactggcaggaaatacagcttgtacatacaccactctactgcacctgctcttgctagagccagcatggaactgcagtttcaaagccca

SEQ ID NO: 595791 - DNA, 539 bp, Homo sapiens
taaaattccaggaactattaactgttcccaaaagtcattcccattctcctgtggcaacttaatatatttgaaactgagcccatttttgattaaactataggaagactctgccaggtctctgctaaaatttatcacgtatttctctttcatgtcatctgaaatgtttttgaagaaaatcaaaggtacatctaaaatagaattttatttttaacttctttttgccacttgaaaagaatgcagttgtcaatgacgctgatctaygggtgaaggaaaaaaaccaaggtggtcaggaaggcagcccaaagttttcacaaagtccttggtcagcttttatgtacatcaaaacgaaacctatggcccctgatgactgaaagccttcatctactcacagcctctctcctatctcctctccatgctatgtggttgcaggggctcttccttttcaagtcagaatgtcagacaagagggtgctggtggttgatattcatcctttgtgagagttacatctgtcaaagtaacccagataaaatgggtttcct

SEQ ID NO: 595792 - DNA, 474 bp, Homo sapiens
tatacttttagttttaatcttattaaaattttaatagtattcagatcagttaaaaagattgttttgaaacattttttatcttggctttcatggcatggccttcacctaattttcttttgatctcactaacaatttttttcaatttgtttttcagtatccttttgttctactctaatataggtttcttttccaaacttcatcctaggccattttctctttttagcaaatatctcctttatgggtgggctcagtctttctaatatatrtgtgtgtgtgtgtgtgtgtgtgtgtgtgtgtgtgtgtgtgtgtatatatgtgtatatatatatgtgtgtgtatatatatatatatatatatatatatatgctaatggcactcaagtgtatatcacatagagcttacttttgagaaatgtgtaccttgcatctcacccgagtactttgaagcatctacacttcatatgtaccacacgga

SEQ ID NO: 595793 - DNA, 534 bp, Homo sapiens
aaaggccaaggtacagcttgggccattgcttcagtggggtgcaagccccaagccttggtagcttctgtggtgttggtcctgccagtacatggaagacaagaattgagatttggatatctacacctagatatcagaagttgtatggaaatttctggatatctaggcagaaactatcagaggtggagatctcatggagaatttctgctagaacagtgcaaaaggggaatgtgggattggagcccccacacatagtactcactggagcactgcctattggagctgtgggaagtgggccactgtcctccagaacccggaatagtagatmtactgacagctttccacctggaaaagccacagacactgaccaccagcagtgaaagcagctgggaggggcattgtaccctgcaaagccacaggggtggagctgcccaaagtcctgcggtgctcatctcttgcttcagcatgatctgaatgtgagacacggagtcaaaggagatcattttggatctttacaattttatgactccccagatg

SEQ ID NO: 595794 - DNA, 449 bp, Homo sapiens
gcattagagggttggtctaactgtaagagaagcacaactgatgtttctgattccttatgcattgcaggctggacaacaggctggacaacactattcactaaacagaatagtgagaygtatgcattgcaggctggacaacaggctggacaacactattcactaaacagaatagtgagacgtcacctgagccagtcaaacctgaagtcaaggctacagagaagaaagaactatttgaatcaaaacccaaatttcaggagcacatcattcaagcctctaacccagcagaatcaataaaaaggccaagtccaggtaaaccaatgacaaatttggaactaaaaagtatctgcctgcctaaaacaagcatttgataaactgtcgtaagggaatgaataagataagaaagagacagtgaagaaatcaagattgggacctcatgtgaaaatggaggg

SEQ ID NO: 595795 - DNA, 494 bp, Homo sapiens
ttgtagctgtgagtaaactgagatgctaagagagattgaagagaacgtagggccagcgattaacatctgaaaaatgtttttcactgtaagaaacatcaccaccgtcatggacaacacacatattttcaacaccaactatctgacacagcttcaagatttctggaatgaatttaaattgcctgatgcttgcaacaaggaaattgtatcagtctctgctttctaatacagcttagtaaatacctggatcatagaaatcatggctaattcagtgcttaatacttgttggcccaaagagaacrtaatcctattggaacatattataataatgagtttgtcctgggactgcccaatctggggtctagaatcttacctgaaaatgacatggtcagtcttttctggacaaattctttaaggaactgtttgttttaggattttaaagaagccaacaaaagaaattttagtctctcattattaaatatctccggactacagta

SEQ ID NO: 595796 - DNA, 575 bp, Homo sapiens
aaagctattaatgggttcaatggaggcagactggtctcccttaaggttttctttttttttttttaattaaagaaaaaatcaccctggaatagaatggaggaagaattataggggtaaaaactagagtgggaaggaaagttaagagaatattgagagaaacaatgggggtttctgaagcaggaacaacggacaagggagaatggatgacaaaaagaacaaggcagatattgatatactcgtgctataggtaaacagattgaagctctaaaaaggtgattcgcccatgatcacacatkggtccctattgacttcaaagccaagatgggcttccagctgtattcccttgggtggggccacattcacctagagcaggaggaccacttgcctagtcacccagtggcatttagtagcttggaaggtgtgctcaaagacaacagtctcaaagaggcaccagtgcaccagcatcctgggttgttttcctggagtctttattcagacattgtactttagcaatattattttctcttttgacaaaattgctatatgagcatattttatcttctttttggaaatgc

SEQ ID NO: 595797 - DNA, 565 bp, Homo sapiens
cttgtctctctttgtctctcttcttcccggacccctactctgcttccttcccttccttacaggttcctcctagaagagctgtcttgaaatcacttgcacagagtgcattcttagtctcagcttctagggcatgtaagatcctgagctaagcttagggaactggcaaagcatgggacctaaaggagaggagggggaaatttttgcaaaatttgatattgcaaatcaagraaaaatagcatttaagcactggtcatggagaaaaattagaatttttcttttttttttttagaggttcacattgtttttatattttaaatggctttgggcagggcacctaatctcttgagtgcttagttacattacatgtcttaagcactgttagtagaaaagggtatttattgcatacgccaatttgtttgccatttatttaaagatgtatgcctctgtgaattcatggatgaaaaaacatatataaatcacaaagtttacaaatttaactatgcaaatctcataactacaaatgaatcttcccaaagaagtgatgtgataaattgttgctaggtga

SEQ ID NO: 595798 - DNA, 565 bp, Homo sapiens
cttgtctctctttgtctctcttcttcccggacccctactctgcttccttcccttccttacaggttcctcctagaagagctgtcttgaaatcacttgcacagagtgcattcttagtctcagcttctagggcatgtaagatcctgagctaagcttagggaactggcaaagcatgggacctaaaggagaggagggggaaatttttgcaaaatttgatattgcaaatcaagaaaaaatagcatttaagcactggtcatggagaaaaattagaatttttcttttttttttttagaggttcacattgtttttatattttaaatggctttgggcagggcacctaatctcttgagtgcttagttacatwacatgtcttaagcactgttagtagaaaagggtatttattgcatacgccaatttgtttgccatttatttaaagatgtatgcctctgtgaattcatggatgaaaaaacatatataaatcacaaagtttacaaatttaactatgcaaatctcataactacaaatgaatcttcccaaagaagtgatgtgataaattgttgctaggtga

SEQ ID NO: 595799 - DNA, 581 bp, Homo sapiens
gcaacctgacttattactgacattattaacctggatcacctggccgaggtttctctactgtaaaggtactttcctcccactttccgtgttatgttccctggaagcaagtcactaagcctaatctatgctccasagggtagtaatgaaattatttttcatttacaatttttagattataagcttttttcccaaaataatttcatatatccaccaagagtaccagtgacttgaagtcaaagggaggtgtgattattatgccttttatggatgacaaaaaatgatagggatgagagatgtatgatgaagaggaaaaggtttacttagttttctatacagagctatttcaacctgtagtttttaagttagagattctgatccagtgtttcccaaagtgtgttatacaaaatactagctttatgggaagtcaactgttattacttgaaataaggaaattattattatttttattattattttttatatactttaagttctagggtgcatgtgcaaaatgtgcaggtttgttacatatgtatacgtgtgccatgttggtatgcctcacccattaactcgtcatttac

SEQ ID NO: 595800 - DNA, 616 bp, Homo sapiens
gaatacaaatgattctccagtagggtgatgctttgaatgttaataacaataatgatgatgattggctgggtatgatggcacatgcttggaatcccagcactttgggaggctaaggcaggaggatcacatgagtccaggagttccaggctgcagtgtgctatgatcatgccacttgcactccagtctgggtgatagagctacagtctatctctaaaaaaaaaaaattgaggaagaataacaatgataaacatcttctgagcacttactatgtgctagacattaggctgaatgtatcatctttaattcgcagcccaacattgagaattgaatattagctgatactattataaagtcatttgatttcatttttccacctttacttctaaattttatttacataagtttaaataatgcatatataaataaggaagtgaagtctctactttctgccacatartgttagtaactgttcacagtttcatacttgaactactagacaattgtctgtgcttatacaaatacacatacataggtagtttgaaaaactggtactatattaaataaattattttgcaacttttttctacttaatacattgtgtgtgtaattcattgtc

SEQ ID NO: 595801 - DNA, 582 bp, Homo sapiens
agaccctgtttgcaacatgaagttaattgtgggggcggggtgtggggagagaaatactgtttaatggattatggagaattgagttataattgagctaaagtttatatactttctaggctctataaaaagcaagaaaataaaaaaattgcatttttacctgtttgcgtgtatgtgggcacattttagttaaagttggacttatccagctaagcagaatcaggttgcctagttttcccctaaatcatctttcacaatggacagtgstatttccaatggctctttggactctttgtcttgtctctcattacccatctccatctttataggtctccctcaactcccttcaatagcccagtgatcagctatgtgtcaggatttcacatcatgaattaatttccaatgtagagaagtttagtaaccaatgttacaaagatgtgattggttttactcttcactctatctcacttgtctaacacactaatagtaaaaaagaagccagtgtctttcttgttctacataggaaataccctggctttgtaataacactaaaaacttgttgagtctggaagagataaaaggata

SEQ ID NO: 595802 - DNA, 569 bp, Homo sapiens
accatcaccatggggattagatgccaacatacacattttggggagacaaacatycagtccatatgattaaataagatctccttttcctttacatctttgatgatgttttctttgcattctttggacatgtttaaaataactgacttagaatcttttaaatcaaaaatctgggccatcgtatgtttgacttctattgactggttaaaaaaattttttttatactgtggatcacatttttcttttcttttaattaatttattttgagacagtgtcatgctctgtcatccaggctagagtgcagtgacatgatcacagctcactgcatccttgagaccctgggctcaaacagtcttcctgcctcagtctcttgaggagctaagactgcaggtgcaggcgtgtgccatcacgcctggctttttttttttttttaatttctatgccagagatttttgaattgaatgttaaatatatgggaaatatgtcattctgattctagattctgttgtattccgaaaagtgttgattcttgttgtagaagacaattcacttgctgaatcctttaaacttgc

SEQ ID NO: 595803 - DNA, 569 bp, Homo sapiens
accatcaccatggggattagatgccaacatacacattttggggagacaaacatccagtccatatgattaaataagatctccttttcctttacatctttgatgatgttttctttgcattctttggacatgtttaaaataactgacttagaatcttttaaatcaaaaatctgggccatcgtatgtttgacttctattgactggttaaaaaaattttttttatactgtggatcacatttttcttttcttttaattaatttattttgagacagtgtcatgctctgtcayccaggctagagtgcagtgacatgatcacagctcactgcatccttgagaccctgggctcaaacagtcttcctgcctcagtctcttgaggagctaagactgcaggtgcaggcgtgtgccatcacgcctggctttttttttttttttaatttctatgccagagatttttgaattgaatgttaaatatatgggaaatatgtcattctgattctagattctgttgtattccgaaaagtgttgattcttgttgtagaagacaattcacttgctgaatcctttaaacttgc

SEQ ID NO: 595804 - DNA, 569 bp, Homo sapiens
accatcaccatggggattagatgccaacatacacattttggggagacaaacatccagtccatatgattaaataagatctccttttcctttacatctttgatgatgttttctttgcattctttggacatgtttaaaataactgacttagaatcttttaaatcaaaaatctgggccatcgtatgtttgacttctattgactggttaaaaaaattttttttatactgtggatcacatttttcttttcttttaattaatttattttgagacagtgtcatgctctgtcatccaggctagagtgcagtgacatgatcacagctcactgcatccttgagaccctgggctcaaacagtcttcctgcctcagtctcttgaggagctaagactgcaggtgcaggcgtgtgccaycacgcctggctttttttttttttttaatttctatgccagagatttttgaattgaatgttaaatatatgggaaatatgtcattctgattctagattctgttgtattccgaaaagtgttgattcttgttgtagaagacaattcacttgctgaatcctttaaacttgc

SEQ ID NO: 595805 - DNA, 480 bp, Homo sapiens
atatcaccacaggtggggttcttagatacctgagtcacactgtttcttgttaactgattattccatgacccttttcacctttgaaggggcactgtccaaagcagaggataactatagctgatctgattgggttctaatacagctctgtaaccctcaggattaccacagatgacaataaatatatacccttttttataaatgaagaaataagtataaagaaaataaattgccactkaagtcacacatcaaattgataggcaaaggggctgtgtggctttgttcaagctaccaaagccaaaagcaccatcatttatttatctgcaaagccaggataataagaatgtcttcttcatagggtaattgtaagggttaaatgagatagtctacataaatgctaagcacagtgcctggccataaatatgccctgctattttgacctgttattttggtttgatttctctatgcagttgagtagaacat

SEQ ID NO: 595806 - DNA, 480 bp, Homo sapiens
atatcaccacaggtggggttcttagatacctgagtcacactgtttcttgttaactgattattccatgacccttttcacctttgaaggggcactgtccaaagcagaggataactatagctgatctgattgggttctaatacagctctgtaaccctcaggattaccacagatgacaataaatatatacccttttttataaatgaagaaataagtataaagaaaataaattgccactgaagtcacacatcaaattgataggcaaaggggctgtgtggctttgttcaagctaccraagccaaaagcaccatcatttatttatctgcaaagccaggataataagaatgtcttcttcatagggtaattgtaagggttaaatgagatagtctacataaatgctaagcacagtgcctggccataaatatgccctgctattttgacctgttattttggtttgatttctctatgcagttgagtagaacat

SEQ ID NO: 595807 - DNA, 594 bp, Homo sapiens
catttatgagacacatatttttatacatgcatacaacaagtaatgatcaaatcaaggtaactaagatatccatcacctcaaatattaatcactctgtgttgcaaacattagaaatcttctcttctagatattctgaaatatacaacaagttattattactatagttaccttaccatactattaaacactagaacttattccatctatctagttgtatttttgtacccattagccaaattatcttcattcccccrggttccagaggaacagaatattaaagatggagttctttcggtgattttgaggattctggagttggctgcttaatgtgattagactcaaaaatgctaaggagtgtatttctaatagtatggagaacaatggtagcccttggcatgaactgtttagagagttatgcaaaataaatgcatttgaccctcctgattcaccacttgtgagaggcaaggagtttagtgactctatacataataaatttgaccatatgtggagaaccaaggaacataatgaaactggttggttgctcctaagttcactggacaaagtgatgaaagaaaatgatgaactcagggattc

SEQ ID NO: 595808 - DNA, 512 bp, Homo sapiens
gacttctgagttgcatttattcctatctcctatcatttcatttttttcttcttatttgtaaatgccaccactgcttttgaaaaaccaggttataatttactatatttttaaaaagtcttaattatggatcttgcagccttcttaatccatatcttgtgagccattatttgagttttctttttttctatttgtcatgtcacatacctaagagtagaatttacattagtagttctcaagcccatgagtcccaaactaagaaaagagaatctatgggttatatcagcttttgacaggtaaaataacatcctgttgcaaatayctttaattcaaatttgtcatgttctggagggctcatctctttcaaaagtgcagaactcagaaggccaagaaatggcagtagaaggtgtgatcttgaatgtgaaatatctgtgcaattactacattaaatattcatgcgtttcagagcaaatgaaatttctctcataatcaacttgcagtcacaaactagcatg

SEQ ID NO: 595809 - DNA, 562 bp, Homo sapiens
ccagtagattccagacttgtctttctgcttcccctctgatctattcttccatattgcctctaaagttgtttgcagttaatgattctggaataagtatgtattcattttgaaaataatgaaattgcatcttcacctcacattaaagactcaacacctgatgtgttatacacttaatgtaaaagacaaatctgtaaagctttcagggggatatgggaaactatcttcaaggcyttaggataagaaaagctttctttagtaagtcatcaaaagcagaaattagacatatcttagtttattaaaattaataactcatcaaaaagtacatattaataaagtttaaaaacacccaagagtggggaaatctattgcagcccataaaaccagccaacattcaggtccaaagtatgtaaaatcttctacaaagcaataagaaaagacatacacaatttttttaattaaaaaaaaggacagaagacttgaacaggcacttcataaaaaagaaatccaatagctaaaaaatatgaaaatgtgttacatattatatataatgcatagattatga

SEQ ID NO: 595810 - DNA, 580 bp, Homo sapiens
aagtctgtcacattgaccctccactgagctgctaatacttaagccatctgcagatggcaaagctaaaagagcactgtatcactccttcggcggcttcagaggtcatgggcaacccccctagatgctgctacggggccgacatggagttttgctcctgctggcatccaaaagcattcgccctggctcctgtgcccactcacctgtgctccccctcctgagaggggtggaacgcagtgggacagcgcaagtgagtggagtccagccctgacagcactgaagcagccagctagttctagcacctgtgcgctccagttcttgcccacartggggtcagggaaatatcctgcttcaaaatgagcaagcatgtttgaaggctctgcttacatcacatttgctaaagtccattgttcaaagcaaagcacgtgatttagcccagaatcagggcagcaggggactaccaaggaatgtggctgcagaatgtgatgaatccacggccatccttgcaacccaacacagccctagagaaactttactagggtcacacagttagtgtgtggcattgggaccacagcttatggct

SEQ ID NO: 595811 - DNA, 485 bp, Homo sapiens
ttaattttatttaattgaaacagaataaaatgtataattcagcttcccagtcacagtagccacatttcaagtgttcagtagaatacatggctaatacatggctaatattcagtagaatacatggctaaacagtgtaggtttagataattagaattaattactcaaaggcttagagctcataagtgctggaaccaacatttaaatctgagttaactcagaatttcatgattttatctctaacttctggtataaaaattctgttgcrtagcagaagttgtgtagtaatgagagtttacttagttggatacattctctcctctgctttttgataattgtactgaagttaatgggctcgaatgcctaaaatcaattgtccactgtgaggcagcttgtttatgggttttgaagaggaggcaggccttctgagagcagcaagcacacttcacaggcaacaatgctaatgtagttcttagttaatcttagtc

SEQ ID NO: 595812 - DNA, 582 bp, Homo sapiens
catcttccttatcagggagcccctcggctgcatgaattgtcagctttatcgcaccagagatagtaattaaaccttcaccagctccagcacatgtcccagcacaaggagaacaagcatgtagaatcatattatgtgatgtttattaactagcaaataaaagctctgttaaaagaatatccctgacaggagagaagaaggctaaataagtccatgctttattgctacatgtatttttaaagaaatgcctattgtactgtagagtaggtaacatttcccagtatgtttgaaatcattcactgagcaccatatggtgcagtaatgtcactgaacggtggggcacaaatcactcacaatccatttcactgtgcactcttatttgtttaaaaaagcaaaactattctgraatgcaacactgccctttgttacccttcagaaagaatcaagataggctgagcattagtgatgctatttatttttacataggaagccacagaagaagtacacgtgaaaaggatacccttcaggaaaggatatcaaagttagccaatgcatgggaatggggcagaccacggagggggaact

SEQ ID NO: 595813 - DNA, 601 bp, Homo sapiens
ccagtgggtgaaggttgcagtgagccaagatcacaccactccactccagcctaggtgaccgagtaagactccgtctcaaaaaaaatgaaaactaaaccaaaccaaaacaaaacctagagatgagccaaatcaaataatacatcttcccatgtcattatcaaatggtcagggtgagggggaaaagtacagggagtagctagacgcagatcagaggctaagatcaaagacctaaagagcagatgccgccatgtcgtgatgattcccccataacccacccaattagacaacggttcattgctcatccttgtttggttttattcaaagggacaatatatccamaggccctaattaagaggaaggattataaagctgtctttaaacatctacacctattgggacattatgtggaaacaccgtaatacacagcaaggcaaataaaactaaaagcacaccaacaaacaagaaaacctctaggacccagaattgtaggagggtgcacaggaaatggccagagaaacagactatgagagttatgacctggatttttttttcctgtgagtcttctgaagtcttgatagctacaaatgcataacaaaccata

SEQ ID NO: 595814 - DNA, 522 bp, Homo sapiens
ggtgaggaggcattattagtctaagcagcagatattaagtattatacgacatggttcagacaactgctgtttgactggtactagttactaatgggacagtgagaagacctaaaagtttttctttggttaagtgaggagaggctcaagaaagagttagcagggatggacaggggaaaagggaagcctgagttagtggaaaataatttaaattgccttagatttaattgatagagtttgcaatagaaaggaaaggcaggcaatgcatggtcacttgcagtgaacctggtttaattaacctcgcatttccactagtgcagtcttttgggtaggtgaggggaaaatgctgtgggatagaattgaccttgccttcctacrcatgcatatggaaatgccacgcaggaactttacagttaatattgattcaatgtcagaagcacaacattgattgcaatggaaaagactgttggggggaaacttctgaaattttcatttggaatgtgtgaaagtgcaagccctaattat

SEQ ID NO: 595815 - DNA, 562 bp, Homo sapiens
cttgtatgttcataccacatttcaagttggagaagaatgcaaggtagtttagcttcatctgtctatgtgactaagaattattaggtgtggaaattggatacaaggatcttttgaaggcagtaaggatgggcttgtcacacaaggtaaaattttaaaatgaattttgacatattcaataggcttcataacaactgattagcatctcagaatatttaggaaccccagtgacaccagctgtcttataagggccgtcagatcatagcacagatgcactgaaatcaaagraagtgttgaatttatgttgaattttctcctctgtttcagaacttcatgtttcaatgtaggatagtattccgtaatataaactctcactaaatagtcactgttgtgtaacatttatttaatcttttgctttataatctaaattgtcaaattaatctgtccttgccaacttcctccactaccagcggagaattagctgcattaggatgcactcacatgaccgttttgtatcagatggtgagatagttctgtcagacagctgagtaaccacattaaaata

SEQ ID NO: 595816 - DNA, 622 bp, Homo sapiens
ttgaattttctcctctgtttcagaacttcatgtttcaatgtaggatagtattccgtaatataaactctcactaaatagtcactgttgtgtaacatttatttaatcttttgctttataatctaaattgtcaaattaatctgtccttgccaacttcctccactaccagcggagaattagctgcattaggatgcactcacatgaccgttttgtatcagatggtgagatagttctgtcagacagctgagtaaccacattaaaataactcaacaagttgtttgaaaagaccaatcygttgaaattaatgaaattttttacttacaggaagtacaagtcaccactggagtagatattagccatatttattttattagagtttacacacaataggtcattaaggtgaactgtgcttttcttaaaatacaaggagtgcaagcttacataaattgtaaatatgatgcatctatccaaatatttatcttcaaggagatagttcatggaaaacttttctttagtcatttggtggagtgtgtaataatgtcctttaatatcatgatgctctgctcctctgatactgtatttgatggtcgaactgtgctacagaaagcatttgaacatattgtag

SEQ ID NO: 595817 - DNA, 515 bp, Homo sapiens
tcaggagcttgtaaaatggtgtaggtggyaaatctatagataataacagtacaacatggaaacactacagtggggtaagcatggaactcttgagaattcacagaagggatattaaacaccacgtaatgctgtaaggaaatgatccacaaaagaaggtatagttaagctaagagaattaggagtttatcaggtcggtgagagtaaggacagcagtattccaggttggtaaactttagaaaggcctggagatgtcagcacatactaggttctaggattataagtaccagtggtctcagtaagaacagcatgtttcagaggcaactgagttataattataacagcttatattcatatatatgcctcatacttttaaaaatgatttacatatattaactcattcaattgtattatatctgttggctttttctgcattaaaaaaaatccaaccccataacttagtaacttaagacaatcatttactattgctcttgagtctaggaatctgcagggtgatt

SEQ ID NO: 595818 - DNA, 584 bp, Homo sapiens
ctcatacttttaaaaatgatttacatatattaactcattcaattgtattatatctgttggctttttctgcattaaaaaaaatccaaccccataacttagtaacttaagacaatcatttactattgctcttgagtctaggaatctgcagggtgattsttcccctatggggcaggcttgggtcatcttggctggatttgctccttcatctgcgctcagctgttcatctgggatggcctcattcacatgtttggcaattgtttttcttttggctggggcagtgcagatggctggggcagtggagatgactgggccacgtgtctctggtcattgagtgaagaagcccaggctggttcacatgacagccaggggctctaaaatcagcaagaggacacatctcagttctcaatcacattccaagtctctgctaactcctctttagccagatcaagtcacttagttaacccagattgaagtatgtgagaaatgacttccattttaaggggagcgaaagcatgtgcggccaattttgtagtttattgcaacttaaaacatctcaatgaggcacatgttattgttgtcaaccc

SEQ ID NO: 595819 - DNA, 584 bp, Homo sapiens
ctcatacttttaaaaatgatttacatatattaactcattcaattgtattatatctgttggctttttctgcattaaaaaaaatccaaccccataacttagtaacttaagacaatcatttactattgctcttgagtctaggaatctgcagggtgattgttcccctatggggcaggcttgggtcatcttggctggatttgctccttcatctgcgctcagctgttcatctgggatggcctcattcacatgtttggcaattgtttttcttttggctggggcagtgsagatggctggggcagtggagatgactgggccacgtgtctctggtcattgagtgaagaagcccaggctggttcacatgacagccaggggctctaaaatcagcaagaggacacatctcagttctcaatcacattccaagtctctgctaactcctctttagccagatcaagtcacttagttaacccagattgaagtatgtgagaaatgacttccattttaaggggagcgaaagcatgtgcggccaattttgtagtttattgcaacttaaaacatctcaatgaggcacatgttattgttgtcaaccc

SEQ ID NO: 595820 - DNA, 493 bp, Homo sapiens
tgatagccaaactttggtcactgaataatttgttcagttataatttttattggatccccaataaatgtagatttatttagaaaatacatwcagtaatgtcttcttatctatgtagggaccctgcataagatacttctttctctgactgtattcctcatccttaaggcagagataaacagtatcattttcataggggtgttatgagcattaaaagagttaataagcaatatatttagaacagtgcccagagtctaataagttctaaataagtcatctattattattatattgtaaaatatatcccaaacagaaaattttaagtaatgacaaaatatgaagtaaatattttttaaatgtgtgacattattaaaatagggcacaaaagttttgagatcacagaaacattagttattaataaccctagccagagaaatgtgatttaatatgcaatagtacttttgactattttggtttacttggtgataaaggagtt

SEQ ID NO: 595821 - DNA, 510 bp, Homo sapiens
tgccctaatgttctggaggcttatttttactattgaaaagttaaacacatacagtcagaaatatgtaatatactatcatgtacccatcaccttacttcaacaattatcaatacatagcccatctgttctcatttatatctctaccctctctccctaacatttctaacacattttgatgctaatcccagatatattattattattattattattattattattattattatgagacgagtctcgctctgtcgctcaggctggaatgcagtggcgcgatcttggctcactgcaagctctgcctcctgggttcacgccattctcctgcctcagcctctggagtagytgggactacaggcgcctgccaccatgcccggctaattttttgtatttttagtagagaagaggtttcaccatgttagctaggacggtctcgatctcctgacctggtgatccgcccacatcggcctcccaaagtgctgggattacaggcctgagccactgcgcccagcc

SEQ ID NO: 595822 - DNA, 634 bp, Homo sapiens
atcaagagttcctgtacatcctgcctgcgtcaataattactgtattatttacccaagagattttccatttccttcattctttttacatttttaaatcaaattccgtgaaaacaaaaaaagttccctctccccattcttctattcaagtgtttatttatagtaaattatataagaaggaggccatttgtttgaggctgcctctgtacttaacgttcctatgtaacaaactgcaacaacctaacctaagaatgcaaacaaaccaaaacgtaatttggtagtatagtttttgtaacagccatatttcagccaatcagaggcagccaactcaatacgctatgctaaataacagaaatacctcagcctaccatgccgaagtaaggcaaacrcctagctgtaactaatcagatgatttctctaccttgcttccacgttcagcttgtaatagcttgctactcaggttactggatggagctctttaaacctcttctggttttgagtgctgcctgattgatgaattggttttgcttagataacctctgtgaaattggtctaaagctcttaacatttgtaccaataaggactcatctagatattaatttaccctataggttataatggaataccattgttattt

SEQ ID NO: 595823 - DNA, 634 bp, Homo sapiens
atcaagagttcctgtacatcctgcctgcgtcaataattactgtattatttacccaagagattttccatttccttcattctttttacatttttaaatcaaattccgtgaaaacaaaaaaagttccctctccccattcttctattcaagtgtttatttatagtaaattatataagaaggaggccatttgtttgaggctgcctctgtacttaacgttcctatgtaacaaactgcaacaacctaacctaagaatgcaaacaaaccaaaacgtaatttggtagtatagtttttgtaacagccatatttcagccaatcagaggcagccaactcaatacgctatgctaaataacagaaatacctcagcctaccatgccgaagtaaggcaaacgcctagctgtaactaatcagatgatttctctaccttgcttccacgttcagcttgtaatagcttgctactcaggttactggatggagctctttaaacctcttctggttttgagtgctgcctgattgatgaattggttttgcttagmtaacctctgtgaaattggtctaaagctcttaacatttgtaccaataaggactcatctagatattaatttaccctataggttataatggaataccattgttattt

SEQ ID NO: 595824 - DNA, 579 bp, Homo sapiens
gtattagttcaagtttttgccattttcctgtttattacaccgaaacactgaaaatctgaggaaatttctatgcacaagtgtctacaaatcaactgagaaaaatagaattagctacatggtttctgacctcaaaatagtttcatcagggaaaagaccagggcttatgtgtgtaaaagacaatctattataacctgaggtaggagcagctgacttggcaggaaggaggaggacatttcagagagggaagatgtcatgaacaatgctggagctgcagtgagcacagcatctgtagggcagaacctggcccctgagcttatctgtgaagatgctcaagggcacgtgtggtgacagggactaatgtagtggatgtgtaagtctcactcacaaggaggactcytgctcaacacaaccatgttctctgttctctcctcaccaactgaactataagacctgttctccatgcacatgtcataaaattgaccactaaaccacaggttaagttgcattgcagctgcttctcaaaagcaaaagggtgattttcacttggtgggggtcagtactggaggacaagtacaaaac

SEQ ID NO: 595825 - DNA, 468 bp, Homo sapiens
ttcattgatagggttccaattaaatgcagagcagtatgctattattattcttaaaaagaagaagataccttcatgtgcattaatattgaaaaaaatccaaaaaagatagtgggaaaaagaaagtttaggacgctggataatgtgtgtgtagaaaaggggacagttacacatctctgcacatacacgtgtataaaatttataaaatgagcatataattacataaacatatggtatttacataagagcaaaaaattaatatttgttgcttccagggaagagtactgactggctagagacrttgtagagaggttgacttttcactgcatactctttacaaagcttggagcttggatagtttaagtaaatcacttagcttgaaaatgaatgaaacatatatttaaaatataatatgaataatatattaatgtgactgcctacagcaacttgttttaggtatgtttagtaatt

SEQ ID NO: 595826 - DNA, 468 bp, Homo sapiens
ttcattgatagggttccaattaaatgcagagcagtatgctattattattcttaaaaagaagaagataccttcatgtgcattaatattgaaaaaaatccaaaaaagatagtgggaaaaagaaagtttaggacgctggataatgtgtgtgtagaaaaggggacagttacacatctctgcacatacacgtgtataaaatttataaaatgagcatataattacataaacatatggtatttacataagagcaaaaaattaatatttgttgcttccagggaagagtactgactggctagagacgttgtrgagaggttgacttttcactgcatactctttacaaagcttggagcttggatagtttaagtaaatcacttagcttgaaaatgaatgaaacatatatttaaaatataatatgaataatatattaatgtgactgcctacagcaacttgttttaggtatgtttagtaatt

SEQ ID NO: 595827 - DNA, 605 bp, Homo sapiens
aattagctggtcacaaagattcaaaagattccccacatatgattggcatcatacttactggaaggcagtcatacaacttaaggagtggagtaatttaaaagtggtgttaatgagccagtttgttgtaatacttggggctgtattttgggaaccacatagagctgtgaatttctctgctaataagtgttcctggaagatttctagttgtttctgctattgcaccttaacagtttgttcaaattctcagggtcccagtgagcagcagaattgagtgaccatcctatgaattgttaggctgtttccacaaatacctaagcattaaaatatccacgtctaccacttcttccttccaaccttgaaaacagtttactgactcaaaaataaacctcctaagaatttgtactaaacaatttttgacacacctttaagtcactggagaaacagaggaacgagttgaatgcaccaacgtccgtaggtgagaacattccatcatgttagttttgtgcagarcatgatattactgatgagatatgaagtggccatggggtggaactttccttaatgaggttctcccaattaattctcgccttttcttgtttttatgt

SEQ ID NO: 595828 - DNA, 610 bp, Homo sapiens
tgtattcctgaaatccggttctccttttctagttarcaatcaatcaaaaaatgtagccagcaggtgccatccctacaccaagtcagtctccctatggttatgcttcacctttttttttaatttttaatttctgtgggtatatagatgtatagacttatggactacatgagatattttgatacaggcatacaatgcataataatcacatcagggtaaatggggtgtccatcacctcaaacagttatcccttgtgttccaagaatcaaattatgacccttcttggtaccttggaatgttgcatcacgtaagtgttaatactaacagcaacagcagcaataacaaaacttcactttgctcagcactttacagtttgcaaggtaaatgtccagcacaaatcaaactcaggtctttcagatacaagctcagttatcttcctactctactgtagtttacttttctggtccataaaataattacaaattttatgtagtatacatgattgagagtaggagaatagggagcagagaggggaaaagtcatggtcttcataactgctatatatttggaaatacttagtgttcaaagtggtataactaaaaatgaacacaaa

SEQ ID NO: 595829 - DNA, 575 bp, Homo sapiens
tgaaaaataaaaaataaaaaataaaaaaagcaaagtaagccctatctatagcattttctaccacagctttcaaaggaaaggtaagctcaaattgtccctttcccacagtcacagatttagacatttcctatgtttaaatttaatgtggaaagcctcccgcgtgccacttttgataacaaataactcaagatgctcttcaatgccatttcttcawttatattttctttactgctcaaacaacataagtgggggaacccaaacaatttttcataggtcagagattccgtgcacccagtgcaggcagagtttggttaacaatacagcaacagctcttctaaaattacaagctagacgttttttttccctcctcaggcttttagtcgatttccctttcacagcactgagcctctctttagtaaaaaacaattaacagaagaaatcactgaatcttccagttaaaaaaacaataaggtacttttagaaagtcaaccgattgatttgcaggctctcagggctgagtgattttcctatttaaattgagtggggtgtgtacatgtctatagaaagaaatacca

SEQ ID NO: 595830 - DNA, 583 bp, Homo sapiens
gcgggctgtccccttgactggaatgttcagggccaggtgcagcagatgttcaagttccctccaactctggaagtgttacctgatcctgtgaataagactgtagcgagcaccatggtgcagtagcgtcagaagctgcacagggaaattgaaaacaggcagagaagggataggtcaaagcacgtggttggaaaccaagacacattttagaaaggaaggaaggggaaggcccagctggcagtaaagaagccgaaaattcaccagaatcccaagagtaggttttcaagtgaaaaagaaataataggctgggcacagtggctcatgctagtcatcgcagcgctttgggaggctgaggtaggaaaactgcttgaggccaggagttagagactagcctgggcagcatagcaagacaaggtctgtaccaaaataaaaataaaagccaagcttggaggcacaagcctgtagtgccatctacttgggaagctgaggcaggagctcactcacatgagcctaggagtcaggggctgcrgtgagctgtgattgtgccatgcactccaacctgggtgacggagcaagactctttctc

SEQ ID NO: 595831 - DNA, 392 bp, Homo sapiens
cgacctacacagatctcattcaaattcctagacgttttctcttccattcatttggaacatttaggaagctgatttttaatgctggctatcataccaatttgactgccttatatatttaactagatcaataattcttcctggaagaatatttttcacacacacacacacacattcactcacttactctctctctctttctctctctccctccctccctccctgcttcatttgtagccatccacagaakttaaaacaataccgttcccttttactcattattcagtgattagaaggtaatacttagagccttaagcaagaggttggcaagcatgatcctggcaggtgtgacgtcaaataaattactttgtcttcaaggcttcatttcccttaaa

SEQ ID NO: 595832 - DNA, 459 bp, Homo sapiens
tacagcatatagcaaaataacatacaaaatatgtatacatcatttatgttattgttaaggctttctatcaacagtaggctattagtagttaagtttcacgggattcawaattacacaaagatatttgactccactgtgggtcagtattcctaagccctgtggttttcaaaggtcaactgtaaattcaagttgcttttttaaccatttttgaaagctttgaccaatgtccaacattgcaatgctacaataattagaacaaaatttttctgctagaaatgaattaataactgaagttctgaatatgcagcatgctctaatcctggttttaaaaatccctaatgggctttgtagcaatgcaatttggcaaagtgagtaaaatcctcacataatagataaaggtaattagagatgcagaacaaattctttttaaatgccctgaatgcaattcggacactttac

SEQ ID NO: 595833 - DNA, 527 bp, Homo sapiens
actctgtctcaaaaaaaaaaaaaaaaaaggaaaaaaaaggagggactacagcatatagcaaaataacatacaaaatatgtatacatcatttatgttattgttaaggctttctatcaacagtaggctattagtagttaagtttcacgggattcataattacacaaagatatttgactccactgtgggtcagtattcytaagccctgtggttttcaaaggtcaactgtaaattcaagttgcttttttaaccatttttgaaagctttgaccaatgtccaacattgcaatgctacaataattagaacaaaatttttctgctagaaatgaattaataactgaagttctgaatatgcagcatgctctaatcctggttttaaaaatccctaatgggctttgtagcaatgcaatttggcaaagtgagtaaaatcctcacataatagataaaggtaattagagatgcagaacaaattctttttaaatgccctgaatgcaattcggacactttacttccttcttcagaaatgggaaa

SEQ ID NO: 595834 - DNA, 459 bp, Homo sapiens
tacagcatatagcaaaataacatacaaaatatgtatacatcatttatgttattgttaaggctttctatcaacagtaggctattagtagttaagtttcacgggattcataattacacaaagatatttgactccactgtgggtcagtattcctaagccstgtggttttcaaaggtcaactgtaaattcaagttgcttttttaaccatttttgaaagctttgaccaatgtccaacattgcaatgctacaataattagaacaaaatttttctgctagaaatgaattaataactgaagttctgaatatgcagcatgctctaatcctggttttaaaaatccctaatgggctttgtagcaatgcaatttggcaaagtgagtaaaatcctcacataatagataaaggtaattagagatgcagaacaaattctttttaaatgccctgaatgcaattcggacactttac

SEQ ID NO: 595835 - DNA, 459 bp, Homo sapiens
tacagcatatagcaaaataacatacaaaatatgtatacatcatttatgttattgttaaggctttctatcaacagtaggctattagtagttaagtttcacgggattcataattacacaaagatatttgactccactgtgggtcagtattcctaagccctgtggttttcaaaggtcaactgtaaattcaagttgcttttttaaccatttttgaaagctttgaccaatgtccaacattgcaatgctacaataattagaacaaaatttttctgctagaaatgaattaataactgaagttctgaatatgcagcatgctctaatcctggttttaaaaatccctaatgggctwtgtagcaatgcaatttggcaaagtgagtaaaatcctcacataatagataaaggtaattagagatgcagaacaaattctttttaaatgccctgaatgcaattcggacactttac

SEQ ID NO: 595836 - DNA, 454 bp, Homo sapiens
gttccaatcacagttctcccatctggggaaaccaagcagaaaacacagtaggagttttaaactacacattgtcagtagctgcaatgtgtgttttaaaaaatatatattgccaatttcacatcagttcttggaacatacattcatatggatatagccacagtttgccactgccaccatgcccatatagtttcccagactcctaaaatatgtactcacacagcagaaattaatagattgaattcaaagatgcacatacttgacttacaacacagctgtagttgaaatgtggacacacagaacatagaagacaattttccttccaagtaatgactggtaacctatagacgatgcactaaaacaagacagaktatagaattctggaacacactcagcattccagagaatatgccgagctgtgcatcaagccaatcagcagctcagcaaagcccaagac

SEQ ID NO: 595837 - DNA, 508 bp, Homo sapiens
aaaatctgagctccccgatgcacaatttctgtcccttttaagggctcacaacactaaagatttcacatgaaagggtcgtgattgatttgagcaagcaggtggtacatgacaggggctgcatgcaccggtggtcagagagaaagagaacagggcagggagtgtcacagtgttcttctatacaatgtctggaatctatgaataacatcagtttctaagttgtgagttgatttttaactactgggtttaggccaggcaggcccaggactggttttgggcctggcgccgggctgcctgtctttggttttacttccttgtcattttttcttaaaacaggtactgagtataaaacagtataaaacaatatgagagggtctctctcttccctcagtttgagttgattgtatagagaggttttcacctagagtttsgtgcccccaaaactccaggtcaaagggcagtgaagagtcataccaagtgtgaagtgagagggccagggatggaattctgt

SEQ ID NO: 595838 - DNA, 559 bp, Homo sapiens
atcacttttaataaaacacttttttgcattatattccttttcaaaacatgyatctatatcaactttttaaaaattaaaactgtaaaaaaaaaaggatgttggaaaacaaataaaaaggaaagggagcatagaagaaaaggggcaaaaaagtgggcagagaggagataatttggcaaaaagaagttaagaagatgcaaatggcctcaggtcaaagcagaatctacaccacactgtaccatggaggaagatagtatattttgctgaaagaattaatgaatttccttaaagaattaattagcaagttgaatgggaagacaggacgtagaactaaagaaagacacaatgtatatcactgagatgagatcttactacacaaattaaaagcctgcagacattcaaggaaatatcaaggaaggcttgcagaagaggtgatggctgagttggaccatgaagcaccgagaagatgaggatggcaagcagaggaagcagggcctccaggtgcatggagcagcctgggcaaaggcatggacagaaggctgagccagccccctggaggaca

SEQ ID NO: 595839 - DNA, 559 bp, Homo sapiens
atcacttttaataaaacacttttttgcattatattccttttcaaaacatgcatctatatcaactttttaaaaattaaaactgtaaaaaaaaaaggatgttggaaaacaaataaaaaggaaagggagcatagaagaaaaggggcaaaaaagtgggcagagaggagataatttggcaaaaagaagttaagaagatgcaaatggcctcaggtcaaagcagaatctacaccacactgtaccatggaggaagatagtatattttgytgaaagaattaatgaatttccttaaagaattaattagcaagttgaatgggaagacaggacgtagaactaaagaaagacacaatgtatatcactgagatgagatcttactacacaaattaaaagcctgcagacattcaaggaaatatcaaggaaggcttgcagaagaggtgatggctgagttggaccatgaagcaccgagaagatgaggatggcaagcagaggaagcagggcctccaggtgcatggagcagcctgggcaaaggcatggacagaaggctgagccagccccctggaggaca

SEQ ID NO: 595840 - DNA, 559 bp, Homo sapiens
atcacttttaataaaacacttttttgcattatattccttttcaaaacatgcatctatatcaactttttaaaaattaaaactgtaaaaaaaaaaggatgttggaaaacaaataaaaaggaaagggagcatagaagaaaaggggcaaaaaagtgggcagagaggagataatttggcaaaaagaagttaagaagatgcaaatggcctcaggtcaaagcagaatctacaccacactgtaccatggaggaagatagtatattttgctgaaagaattaatgaatttccttaaagaattaattagcaagttgaatgggaagacaggaygtagaactaaagaaagacacaatgtatatcactgagatgagatcttactacacaaattaaaagcctgcagacattcaaggaaatatcaaggaaggcttgcagaagaggtgatggctgagttggaccatgaagcaccgagaagatgaggatggcaagcagaggaagcagggcctccaggtgcatggagcagcctgggcaaaggcatggacagaaggctgagccagccccctggaggaca

SEQ ID NO: 595841 - DNA, 582 bp, Homo sapiens
attatatgacaagattatctacaagcatccattccattatagttacctaattcattaatttttaaaatagtttacccagattacttatgaaaactctgatagttatttgaagttatttccttgctaaccattttgatagcctgtgaatttcaggcttttctaagtaagaacgttaagtttagmtaagtggggtttttgtgatttttctttgccaataactaaggacttcactgttttgtatttcacctaattttttaaaatccgcttacttattaaatatttacttaaatcacttgaacttgaaagagagtttggcttaaagtctctatattccaataaagtatttgatttaagtgattttttaaagccaatcaattagagctcttttatatatttttagtagtgaaacatatacataacatgtaagtacataggcatattagacacatagatataagtagatcttatagattcatagacctctatgaattcttttattttagacttccaatttcttaataactgattttattaccctagacaattgtcagtgagatagccctaaatttgcatgttaaagaa

SEQ ID NO: 595842 - DNA, 582 bp, Homo sapiens
attatatgacaagattatctacaagcatccattccattatagttacctaattcattaatttttaaaatagtttacccagattacttatgaaaactctgatagttatttgaagttatttccttgctaaccattttgatagcctgtgaatttcaggcttttctaagtaagaacgttaagtttagataagtggggtttttgtgatttttctttgccaataactaaggacttcactgttttgtatttcacctaattttttaaaatccgcttacttattaaatatttacttaaatcacttgaacttgaaagagagtttggcttaaagtctctatattccaataaagtatttgatttaagtgattttttaaagccaatcaattagagctcttttatatatttttagtagtgaaacatatacataacatgtaagtacataggcatattagacacatagatataagtagatcttatagattcatagacctctatgaattcttttattttagacttccaatttcttaataactgattttaytaccctagacaattgtcagtgagatagccctaaatttgcatgttaaagaa

SEQ ID NO: 595843 - DNA, 519 bp, Homo sapiens
agagcttccaggcctcagcaaattttcctattggtttgagccataaagaagctcaagctggtaccacacacccataggaactttgtcaaagctcagagatacctccactcagaatccctttgttgttaccaattctgaatgcaaaatatctgagacaggtcttagttaatttagaaagtttattttgccaaggttaaggatgcacccatgacacaccctcaaggagtcctgagacatgtgcccaaggttgttgggggtatggtttgcttatatacattttagggagacataagacatccatcagtatgtgtaagatgtacattggctcagtccaataatgtgtgacractggaagttggggctttctggttagaagtagataagagacaaaaggttgcattcttttgagtccttgattagccttctactgaatacacaatttagtatggctcagtaaacctgcatttttacataaatgatagggtagaggaagaaatcagacatgcatttgtctcaggt

SEQ ID NO: 595844 - DNA, 599 bp, Homo sapiens
ggcttataagggcatcataaattaagtaaataagtctaagtaattttcaagctcacatgacctaagtatgactttactaaacaagctagctttaaaattattggtggaataaaaatagaaatgccttcagggttgtcagcatacattctgtctaaattttatgtttgtcttggctagatattttaaaatgtcaatgttaattcaagctaggagctgcttggggagagcctgcctcctattctattcaaagtctcactgagataaatgcatatctgattgcttcctttggaaagtctgatcagaaactcaaaagaatgcaaccatttgtctcacacctgtgatctgaaaggccccaatcyccttctctgcctcaagttgtcctgcctttctggaccaaaccaatgtattttacctatgttgattgatatctcctgtctctcttgttaaaagtaaaatttaagtacaatgattgggataaattttttaggtaaactttttgtgtaaattaaaatcttaaagttatttttgatgctcatttaatatctgggtctttccaattaggaaagcgttgtgatagggaaaatatgtttctaaagttg

SEQ ID NO: 595845 - DNA, 582 bp, Homo sapiens
tcattatgttggttttttgggggccctaggtaacactgtagcctctagagtaaattaagtaggaaaatttagggttggtttcctgtttatttgttttggcttctattttcattcatttgctttttattcttctctggttttgcttgtgtctgcatgtatataaaaccgtgakgctttttagtttccagtggaaggcttttatttggttctgtcaatagttattttgtttcctatgcatttctagcaaggcatcattcattccatttatctggaattcctaagcaaccttttttggggtgcaggaattactggagcacaccagcttttcatccttaaactaactttttggattttaggcttcctgatactttaagtgtgttgagtatacacttacaaatagaatttaagtcatatttctctctctgcctagtttctccaaaatttgtaaactgtctatgaatatttttaattcatggcaatgtgtttgtttgcatacagtcaagcagggctgccagggccgctcagggagagagaacccagaaacctggcatgccagccaaagggtaagaatttcttaccagg

SEQ ID NO: 595846 - DNA, 633 bp, Homo sapiens
cattttacttcatcctctccatttacatagggcttaccccaagtaaccaatggaatcctctagcaggtatttaaactcccaaaaattctgtagtggggcctttgagcccctrtgctcgggcccactcccacgctgtggaacatactttcattttcagtaaatcccttcattccttgcttgctttatttgtgcgttttgtccaattcttcattcaagatgccaagaacctggacaccctccaccattaacaatgcctgtaataccagcactttgggaggctgaggtgagtggatcgtgtgagcccaggagttccagaccagcctggacaacatggcaaaccccatctctacaaaaagtacaaaaattagctgggcatggtggtgcatgtctgtagtctcagctactcagaaggctgaagcaagaggatcacctgagccagggaggttgaggctgcagtgagctgaaatcatgccattgtgctccagaatggacaatggagtgagaccctgtctcaaaaagaaacaaacaaataaaagcaaataaaataattgagatcatataaaccatgttctgtgaccataattgagtcaaattaaaatcaagaacaggataacaagaaatcctccaataact

SEQ ID NO: 595847 - DNA, 549 bp, Homo sapiens
atccaacttcatcccacctcacatgtcaccattgccagatgtacaactgagagaagcacttggttacttgacaactcacacaccatcagtgccagagccagaccttcaggctttcaagctgtgcaactgtggacaggtttcttttttctgcaagtaagttgcctcmactataattttggaaatgtaatagcttatatcttataattttgtgacaaggacgtgattatgataaattgtgttttgcaggtttggacatacaaaccgaaaactattgctaccattttttgttaccactattctcattagctacagaagattttgcaacttgcaggacctccctgtttctaaatagaatgaactcactgttggtttggtggctggattttcatggaacattctattctatgaagttaagtgaatgtttgtgtgatcaataataaaaagtggtttgtttgctgaatgaatgagccaagaaaaagaaagggcttaggaaagaatgtgctcaaggctcttttggccttctgtaaatctttggctttacagaagcag

SEQ ID NO: 595848 - DNA, 572 bp, Homo sapiens
ccaggcatggtggctcacacctgtaatcctaacactttgggaggccaaggcgggcagatcacctgaggtcgggagatcggggccatcctggccaacatggagaaaccctgtctctactaaaaatacaagaaattagccgggcatggtggcacatgcctgtaatcccagctacttgggaggctgagccaggagaatcgcttgaactcaggaagcagaggttgtggtgagccgagatcacaccattgcactctagcctgggcaacaagagcgaaactctgtctcaaaaagagaaaaaaaaaaaaagaaagaaaggtaggggagagatttgaactcagatttgtgcaattctaaagccagcctgtttattatagtctcccaggagactacaacagaaacaatgagaaaacaatttgaaagagatgcaaaacccaccccttgaatcttacccaggactatggagctccattaattgctgtcaacacgctggaacctatttcacatgaagctcagaccaattacaattaatgccacagtcatgactacaaactrgaaaccaatgccagaggaagctt

SEQ ID NO: 595849 - DNA, 507 bp, Homo sapiens
tgtgtgcaggaagcaggatgttactttagactctgtgtgcaggagagatggccgtagtaacaaatttatgtgggtctggcctttcaatcctggaattcaaatgcgcatgaggttgcaaaggggcctggaaattcaattgccatcccttgacctagcccaaagcaaaacatgaagaaggtaaccaggagacaycactgtaaattgaaatcatctggtgtacatagcatagggatatataaacatgaagtttaaagcatatagaattctccagtgccactatcttatagggtatgacatttgttctttctaaagtgctactgatataatttgattcttataactttgtgaagtagggaggtgaatgtacatttggcagattgagaaaccaagattctaaaaggtcaagcgacttgcctaaagtcataaatgagagctatgacagtaccccaaccttccaatgccctaggatctttttctttctttccttccttcattccttccctcctt

SEQ ID NO: 595850 - DNA, 507 bp, Homo sapiens
tgtgtgcaggaagcaggatgttactttagactctgtgtgcaggagagatggccgtagtaacaaatttatgtgggtctggcctttcaatcctggaattcaaatgcgcatgaggttgcaaaggggcctggaaattcaattgccatcccttgacctagcccaaagcaaaacatgaagaaggtaaccaggagacaccactgtaaattgaaatcatctggtgtacatagcatagggatatataaacatgaagtttaaagcatayagaattctccagtgccactatcttatagggtatgacatttgttctttctaaagtgctactgatataatttgattcttataactttgtgaagtagggaggtgaatgtacatttggcagattgagaaaccaagattctaaaaggtcaagcgacttgcctaaagtcataaatgagagctatgacagtaccccaaccttccaatgccctaggatctttttctttctttccttccttcattccttccctcctt

SEQ ID NO: 595851 - DNA, 507 bp, Homo sapiens
tgtgtgcaggaagcaggatgttactttagactctgtgtgcaggagagatggccgtagtaacaaatttatgtgggtctggcctttcaatcctggaattcaaatgcgcatgaggttgcaaaggggcctggaaattcaattgccatcccttgacctagcccaaagcaaaacatgaagaaggtaaccaggagacaccactgtaaattgaaatcatctggtgtacatagcatagggatatataaacatgaagtttaaagcatatagaattctccagtgccactatcttatagggtatgacatttgttctttctaaagtgctactgatataatttgattcttataactttgtgaagtagggaggtgaatgtacatttggcagattgagaaaccaagattytaaaaggtcaagcgacttgcctaaagtcataaatgagagctatgacagtaccccaaccttccaatgccctaggatctttttctttctttccttccttcattccttccctcctt

SEQ ID NO: 595852 - DNA, 604 bp, Homo sapiens
acaggctctcactctgtcacccaggctggagtgcagtggtttgatcacggcttactgcaacctctgcctcctaggtcaagcgatcctctcaccycagcctcctgagtagctgggaccacaggtgcacaccaccatgcctagctaatttttgtattttttgtagagatggggtttcaccatgttgcccacactggtctcgaactcctgggctcaaacaatccacctgccatggcctcccaaagtgctgggattataggcatgagccaccacacccagcctatggtaatttcttatagtagcccaaattgactaagacacatcctacatactcaatgtataaatatgcttatatccctctatttgtttaggtttttaattgctcacaatagtgatttataattttctatgtagaagtcatgtgtatacttcatatgtgattccaaatggcacttaaacattttgtggttggttgttgagatatatatatgtgtgtgtgtttatatactatatagtttatcttatattcaaaacctctcttatgtgcttattaattctaacactttgtctatagattatttcaaattttgtgtgcatacaatattat

SEQ ID NO: 595853 - DNA, 618 bp, Homo sapiens
agattcggccattcttcccctctggagggaacgggactgcgggatgctctggtcgagcggccgtcgtggctccccggcggccccgcccgaggcccccaacttcgagggcgctgaccccggcgcccccgttaacctggcgggctcgctggccgccagcaggagcctgtcgccaacatgacaccctsctctcctcgcccgccaagggttctttcagcccagatgccggcggcctcccctgtgagtgtacagaggggagtcacgggaggagaataaaactaaatgaccgtcaaaagtcaaggcttctgttcctaaattatcttaagagacagagagaaaacagccactgggcgagaggggttttctgtagcatatcaaagacgaataagtcaggaaaataaaacgttagatgaggaagtaacttcccagaaatttaggacaaaaacctaccgacgtgtaaaaccaatgtcacattccggataccaagtacataaatagttttcgaaagatgagcgaacactttcatttgttctcttagcctgaaaaattggttcctcaaagaggccgtaagttttgtgtgttgaagctaaagtccgtgcaaaaattaacacgtctgcaaga

SEQ ID NO: 595854 - DNA, 588 bp, Homo sapiens
ggagggaacgggactgcgggatgctctggtcgagcggccgtcgtggctccccggcggccccgcccgaggcccccaacttcgagggcgctgaccccggcgcccccgttaacctggcgggctcgctggccgccagcaggagcctgtcgccaacatgacaccctgctctcctcgcccgccaagggttctttcagcccagatgccggcggcctcccctgtgagtgtacagaggggagtcacgggaggagaataaaactaaawgaccgtcaaaagtcaaggcttctgttcctaaattatcttaagagacagagagaaaacagccactgggcgagaggggttttctgtagcatatcaaagacgaataagtcaggaaaataaaacgttagatgaggaagtaacttcccagaaatttaggacaaaaacctaccgacgtgtaaaaccaatgtcacattccggataccaagtacataaatagttttcgaaagatgagcgaacactttcatttgttctcttagcctgaaaaattggttcctcaaagaggccgtaagttttgtgtgttgaagctaaagtccgtgcaaaaattaacacgtc

SEQ ID NO: 595855 - DNA, 536 bp, Homo sapiens
ttctctcatgaaatctaccgaattcttcaacaggtgaataaaaagacaaaaattcattgaatgcaatattatttggtgatttaatgtgccattttttgccattaaggcataaaaaagacatgaaagcagctaaagcgtacatcaatttagtgcaataaattcatctgaaaaaactacataatatatgattccaactatatgacattctggaaaaggcaaagctgaagcgatagtaaaaatattaatagttgccaaggtttctggagaaagaggacagagattaatgagaagagaggatttttagggaagtgaacattytctttatgagaccataagggtgaacataatgttttaaatatttcaaaattcatatatatgtataacagaaagaatgaacattatgcaaatgtagacttcagataataatgtgtcaatattttctcattattctagcaaatgtaccacagtaatgtaagatgttactaataggtgaaattaggaagtgagggtgaggagacagaataatatgggaactt

SEQ ID NO: 595856 - DNA, 607 bp, Homo sapiens
agcagccctgagaaacatcgcccactatctctccataccactcccaaaaaattttcaccaccccaacacttcaactattttgttttatttttcttagtaatataagayggcaggaatgtcaggcctctgagcccaagctaagccatcatatctcccgtgacctgcaggtatatatccagatggcctgaagtaactgaagaatcacaaaagaagcgaaaatggctggttcctgccttaactgatgacattaccttgtgaaattccttctcctggctcagaggctcccccactgagcaccttgtgacccctgcccctgcctgccggagaactcccccctttgactgtaattttccactacctaaccaaatcctataaaatggccccacccctatctcctttcactgactctctttttggacacagcctgtctgcacccaggtgaaataaacagccttgttgctcacacaaagcctgtttggtggtctcttcacatggactcgtgtgatacaatatccttttccacccctttactttaagtttatgtgagtccttatgtgttaggtgactctcctgaagacagcagaaacttggttggtgaatatttatc

SEQ ID NO: 595857 - DNA, 567 bp, Homo sapiens
gcttaacccacaattattttgttgtccattcttttgtttcattttatcgcatacagccaaatctaatcttaattgatactgggggctccctctcactttctcagagcatggtcttcttgcctccaagcctctctgttctcagagttctctctgctggctgtgtccagccccttcttgtccctacccttctgttatgtacatctctacctctgcaaccaacccactgtcaaggcccatctccaatgtcttctacatgaggcctttctgatcctcccatcactagagtctcccactccttagattcctccagcccattcaactccctgatgtgatgtcttccttcatagtgatcactctaaaccagtcttacctcaccgtcctcctcttctatatragggcagagagaccctgaagcaccatggtgtacacatggtcagtgtttgttgagacacattttgggcatggcacagctcacactgattgattcccccttctttgggagttaccactgccccacaccccctcccatcaccaccgccatcatgtttttcaatatggttgcccttg

SEQ ID NO: 595858 - DNA, 379 bp, Homo sapiens
atgtgagagaaagagactttcatggagtccagaccagaggtagcaatttcagggccatctgggcagtggtaacaggcacagtggaggtaaacccatgactggtcctgcagttctctgagttcagctccagctcagctctccaatgtgtcacagacacatyggagcagatagcccagtttgattcttgggccactgccgacttggtttacattggtctatttgtcttcttcacgtcacagtactttttctgtatctccatcattgcacttatactccagtttatgactctatgtgctattacagttctttgcattcaccttatcctctctaccagactgtaagctgtttgagagcctgggacatgtccgactcttcttgg

SEQ ID NO: 595859 - DNA, 476 bp, Homo sapiens
tgtttctcccattttcttggctatcaacatttgccttccttttagttatgtaaatttctgcaccctgcttgaattcctcccctgaaaatgggtttttcttttctactatgtggccagactgcaacttttccaaatttttacactctactttccttttaaatataagttccagttttacattatttatttgctcacaaataygagtacaggatgctagaagcagccaggccataacttgaatgctttcctgcttagaaatttcttctgccagataccctaaatcatcactctcaagttcaaagttccacagatccctagggcaggggtacattccaaccaagctccttgctaactgataacaaaagtgacccttattccagttcccaataagtttctcatttccatctgagaccacctcagcctagacttcactgtccataccactatcagcattttggtcataaccattcaacaag

SEQ ID NO: 595860 - DNA, 580 bp, Homo sapiens
atgagatttgggcagggacacagacccaaaccttatcaatatctgtgatataacaactattatttttatcaatatttattgggcatctaccaggtgccaaatgctgttgtagatgtttgggattcagcactaatgatacacaaagttcctgtctctgtggaactcacactcaggtgggagagcgataaagccaggaagtaacaaagccataaagagcgggatcaaaagatagtgacagcagcragtgctttttagatcagctagtccataaggatctctcagaggaggtgacatttgagcaaagacctggatgaagcaggtgatgggtctatctaggaatgagactctgcactgcatctattcacatgtctatcttttttaatgcaggagtctgattgacttgtaggcagaaatggtgtcttaattcatctttgtattttggatcattgtagggactgaaaaaagtttgtaaaaataaatgaatggcacaagcaacaaatgaaaatataaataaattgaacttcatcaaaatttgaaacttttgtgtttcaaaggacattatcagaaagtgaaaaggaaa

SEQ ID NO: 595861 - DNA, 526 bp, Homo sapiens
ggtaacccattctcatgatgtgaggtggtacatgtttagagtggtttttatgttaggagacagtgttgagcctctaatcagacaatgttaaaatgttttgtcttctactattttttaggtgtaactaaaatctaacttcatttaaaatgttaccatattytaaaccgtgtgcctcttgcatcaaaattgaaaatcagtagatatgggcatagcaccgcatatgtatttataatatacttgtgaattcattaaacactttacctatcatctggctttcaaaataatgattaattccatttttataaaagccctctcagaggggaaaaaaaagtaattgtatagtttcaacttagtggccattcaagttgctaagattatttatattttttacttagcatttaactctcagtactcattcattaggcaaattaacatgactcttttacttcatttaatttgaggaccttggagtaagaacttcgtttaaacaagtttacaaaaaaatccctgtaatgaatgtttctta

SEQ ID NO: 595862 - DNA, 489 bp, Homo sapiens
caaaactctaaaagcaagtttcagaatttaaaaattctggtaccagatggacagctaagaaatccaattggctgcaaataagaaataatgaagcactcaacttttcaaaaagtttcaagttaaatgatctaaccatgatattgtatctctgtaaagttgcaaacagaataataacccctccaggaaattctttgaaaatccaagattaactgaaaacatataaatacatgagtatgacttaatccctgcactcaacaattttatagcccaatgggagaaaaacagatgaagaagataaacacaaataaacacttcaaatattgaaaagtaaaatcagaacagagaaagcagcaattttygggtgaaatttcccaacatgctggcatcctgtgttgtaagaaagtccaaaggggatttatcatgcaaataaaagagaaaaattatcttgatttgtcaccttgtctatttatttttatttatatatataaa

SEQ ID NO: 595863 - DNA, 497 bp, Homo sapiens
acataagggcatgataaatagcaaaaaataaacaagtgagctgaatttttaaccaaggcaaggaacaaaaactgccaacacactgtcagaccaaatagccctgaaaggctcgtctatgcctaactaccatttaagggaaagaaggcagagggagaggatagaataaaagaatctttggattagttgcaaacattagcatttttggatagtttagctttggtggtgatgtgatcaaaaaatcaaaaagcttgattttaaattctgtaaacaaatagtcttttcttttagaacayagtgcttattttacaggggcattcttggtttatcttttatttgaaccaatttttatctcataaacatcaataacaaaagagatgtctgtaagtacagcagtgaaagatagattgttagtttgagagtgggtgacagaattatttagggagggagctgtcttttcctgagcacgcgtattatgagccggatttagttagaaaaag

SEQ ID NO: 595864 - DNA, 343 bp, Homo sapiens
cagtcaccttgcaccaggtccctcstccaacattggggattacagtttgacatgagatttgggtggggacacatatcacttgcacttcctcatttgttgcacttatagattaaatttttatatatggttatgtatgctacctcatttgctacatttgtagattaaaatttatcagaatttttgaaatattcttgcatcagaaactaaaccagtagtaaaaaatgaaaagacttattttctttaaatacttaatttacttatttcgtgcacacctattttacatcatgtaagctagcaaacatcacaactgaaatttaaaggcagattttctttgtgctcatta

SEQ ID NO: 595865 - DNA, 512 bp, Homo sapiens
atacatttaagtattagtcctttgtcttgtctgcaatttgtaaaaaagagtatacatgaagtgcaataaaatgcagcacaattaaacaagctatgctttctagtcaatggaaattatgttaaatctatttcatatatatacattttaacagttttaaaagtaaaaattcaatatcccractaatacaaatacatttaacaatcaaatatttattgtttaccagtataataaaaataaggatcaaaatctattgaatactattataaactgacttgttccctacaaattcatatcttgaagtcctgaccccactgtgactgtatttggagttagggcctttagggaggtaactggaattaaatgaggatgtaagggtgtgccctaatccagcaggtctggagttcttgtaagaagagaaagagacaccagagccctctctctccagcactgtgagaaaataaacttctgttgtttaagccatcccatctgtgatattttgttatggtagcctg

SEQ ID NO: 595866 - DNA, 536 bp, Homo sapiens
atacatttaagtattagtcctttgtcttgtctgcaatttgtaaaaaagagtatacatgaagtgcaataaaatgcagcacaattaaacaagctatgctttctagtcaatggaaattatgttaaatctatttcatatatatacattttaacagttttaaaagtaaaaattcaatatcccaactaatacaaatacatttaacaatcaaatatttattgtttaccagtataataaaaataaggatcaaaatctattgaatactattataaactgacttgttccctacaaattcatatcttgaagtcctgaccccactgtgactgtatttggagttagggcctttagggaggtaactgraattaaatgaggatgtaagggtgtgccctaatccagcaggtctggagttcttgtaagaagagaaagagacaccagagccctctctctccagcactgtgagaaaataaacttctgttgtttaagccatcccatctgtgatattttgttatggtagcctgagcaaactaaaacagatttttaaa

SEQ ID NO: 595867 - DNA, 536 bp, Homo sapiens
atacatttaagtattagtcctttgtcttgtctgcaatttgtaaaaaagagtatacatgaagtgcaataaaatgcagcacaattaaacaagctatgctttctagtcaatggaaattatgttaaatctatttcatatatatacattttaacagttttaaaagtaaaaattcaatatcccaactaatacaaatacatttaacaatcaaatatttattgtttaccagtataataaaaataaggatcaaaatctattgaatactattataaactgacttgttccctacaaattcatatcttgaagtcctgaccccactgtgactgtatttggagttagggcctttagggaggtaactggaattaaatgaggatgtaagggtgtgycctaatccagcaggtctggagttcttgtaagaagagaaagagacaccagagccctctctctccagcactgtgagaaaataaacttctgttgtttaagccatcccatctgtgatattttgttatggtagcctgagcaaactaaaacagatttttaaa

SEQ ID NO: 595868 - DNA, 467 bp, Homo sapiens
tttatattctaatataatctgttctcagattcagaaaaactgggattcctttccattccaattctttcagaaataagaaatcttccactggcatagtgcctttgggttgcctatttaaagaatttcacacatattatagcaaacatttttcatgtttttatggcttttattaaagcttatgcaatacttgttaaatcactcagattctgacactcaaaacaacatgaaactcttgagtcatcaaaacaaatttacagggaatttctgaggtggctgcaatagagtagctgactaacactcccactgagaacaactagaaaaaaacagatrtaattacaaagagggagaggcttcgtttgaagtcactggaagagtcgctgaggctatcaggacttgaggggtcaagatccctcaaagaggtcaatcacaaaagggttacctgacattctgtaagcagctttcatatt

SEQ ID NO: 595869 - DNA, 654 bp, Homo sapiens
aagactgacacctgtcatttttgctgcctgtccatcaagacaggccactttcaaaaacttttcaggtgttctttctagaaatagctaagcaggcaagataaatacaaatgttctaagagttaactttactatctgtattgtagcttgcaaggcaaggttaatctcactgtcatgtctgctttctattttgatagatgttgtggtggtttctatatccccatacatgggtgctgcatcatgagaatttagtttatggaattcgattctacttgcttggcaagtagaataagagaaaaaattattcaccatgtcgtgtttaaatattttgcttgatgcatagtgtcgtataagacccccactaacctcagcagggatggcaccatatttgagaggccaaagaagagactcagagccagtaaacaagatatagggttctattagcgggtaacttacagggacggtctagtgacagcaggatggagaggagaaccgtaaatgcttacaaaaagcattcagtttatatagcattttcatttagcaccctcagcctaacaacttccacctggcaacyttcatttaccccccccactccaaaacaaaggcctgagatctccatacagtctgagttccatagacaaggagggggtccaggtg

SEQ ID NO: 595870 - DNA, 571 bp, Homo sapiens
aagaagagtcagagggatgtgctgttcttgacttcgaaaatgaagaaagtaaatcatgagccaagtaacacaggcagcctctggaaatagaaaaggcaaggaaacagatcctcctttagagctcctaggaaggacacagttctgtccaactcctgttggacttctaatccaaaaaaaawatataataaatttatggtattttaagcatgctaacttcatagtaatttgttacagcagcaatgggaaactgtacagtattatgtgacattctatgtggttaaaattaatttatcagactgtagagagctaataaagcttttcaatcaaggcagtgattttacttaatttcatatgtattaggaaaatgacattactttgtctttaaaatgtaatacaaataaaactagagttagaaaaatcagatttccagaagaaataggaaataattatataaataaaatatattttgcctttaaatatgaattagaaaatccagtataacatttgtaagacaagaaaatatatttgatataaattataactgcttaaaataaattattagagaaggaag

SEQ ID NO: 595871 - DNA, 492 bp, Homo sapiens
gctcagctacttgccccactgaaccagaaagctcaggaagtggtcctaccaaatacagagctcagtcagaagacacctaactacaaatcccagacagcaaccctactaaaccgtaaagcatgtgcagcagacctgaacaactacaagctctgagatcaggcccctcctcctcacagaatttaccagctggcctgtctagaactccaggctggacagaatggtgcaggtctttccccactaagcaaaccagccaaggctgaaagaagtgatcactttctcaaatacacagtcatcacaacaaatatataactttcataaataaccaaggaagcaaaaaacctccagagaaaactaatgagatttccaataactgacactaaagaaatgaagatctgggccaagtgcgatggcttacgcctrtaatcctagcattttgggaggctgaggcaggtggatcacttgaggttaggcatttgagaccagactggccaa

SEQ ID NO: 595872 - DNA, 603 bp, Homo sapiens
tttcttccatgtagaatatgcctccctttcattttagtaactcgtgtcaagatgtaacagtagagtgcaggagcaagagatttgtagtcaggcagtgcggacttgaacccacctcatagtaattttgtgaattttctcaaattccctgacttttctgagctcctgatctgtaaaatggggaaaatagcaatttcttcctgcttgtgaggctaagttgtaataatgtatataaattacgtgtatataaatattaataatttaaactgtgtaccatgtccattcatgtggacagccccaggatgcctacctgatatggtctggctgtgtccccacctaaaacctcatcttgaattgtaatccccataatcttcataatccycacgtgtcaaggacaggaccaggtggaggtattaataattggatcatgggagcgattttccccatgctgttctcatcatagtgaatcttactagatctgatggatttataaacttctggcatttcccgtgatggcactccctccatcctgctgccctgtgagaaaggtgcctgcttctcctttgccttccaccaatgattttaagtttcctgaagccaccccag

SEQ ID NO: 595873 - DNA, 618 bp, Homo sapiens
gatggagtcttgctctgttgcccaggctggaatgtggtagtttgatctcatctcactgcaacatctgcctcctrggttcgagccattctcctatctcagcctcccaagtagctgggattacaggcacacaccggcatgcctggctaattttttgtattttagtagagacagggtttcaccgtgttgcccaggatggtctcgaactcctgagctcagacaatccacccacctcggcctccgaaagtgctaggattacaggcacgagccaccacgcctggccagagtttttatttttttgcttttgaaggcaagtgtgaaatgatcccttttgttgaactgatggaggagtctaggctttagtcgaataatcccacaggaaaaccaagttggcctgtataataagattgcgctagaaggagaaacaaaagaagcagcctatgaggactgtttgtgagcaagcttaagagatcttggatttagggtgaatgtttttattagcagctgtgtttgaaatctacattgagaataaaagttgaagaatatatatttctgaaaagttttgcaacgtaactaatttatcattaaaatatttatttgactttttttcataagtgtcct

SEQ ID NO: 595874 - DNA, 618 bp, Homo sapiens
gatggagtcttgctctgttgcccaggctggaatgtggtagtttgatctcatctcactgcaacatctgcctcctgggttcragccattctcctatctcagcctcccaagtagctgggattacaggcacacaccggcatgcctggctaattttttgtattttagtagagacagggtttcaccgtgttgcccaggatggtctcgaactcctgagctcagacaatccacccacctcggcctccgaaagtgctaggattacaggcacgagccaccacgcctggccagagtttttatttttttgcttttgaaggcaagtgtgaaatgatcccttttgttgaactgatggaggagtctaggctttagtcgaataatcccacaggaaaaccaagttggcctgtataataagattgcgctagaaggagaaacaaaagaagcagcctatgaggactgtttgtgagcaagcttaagagatcttggatttagggtgaatgtttttattagcagctgtgtttgaaatctacattgagaataaaagttgaagaatatatatttctgaaaagttttgcaacgtaactaatttatcattaaaatatttatttgactttttttcataagtgtcct

SEQ ID NO: 595875 - DNA, 618 bp, Homo sapiens
gatggagtcttgctctgttgcccaggctggaatgtggtagtttgatctcatctcactgcaacatctgcctcctgggttcgagccattctcctatctcagcctcccaagtagctgggattacaggcacacaccggcatgcctggctaattttttgtattttagtagagacagggtttcaccgtgttgcccaggatggtctcgaactcctgagctcagacaatccacccacctcggcctccgaaagtgctaggattacaggcacgagccaccacgcctggccagagtttttatttttttgcttttgaaggcaagtgtgaaatgatcccttttgttgaactgatggaggagtctaggctttagtcgaataatcccacaggaaaaccaagttggcctgtataataagattgcgctagaaggaraaacaaaagaagcagcctatgaggactgtttgtgagcaagcttaagagatcttggatttagggtgaatgtttttattagcagctgtgtttgaaatctacattgagaataaaagttgaagaatatatatttctgaaaagttttgcaacgtaactaatttatcattaaaatatttatttgactttttttcataagtgtcct

SEQ ID NO: 595876 - DNA, 541 bp, Homo sapiens
tttagtaagtttatttttctcaatgttatgaattagaatttatgaaacactatatatttcagggctgagtagataagcacatataatgtaaataaagaagtcaagattctcactgttggagaagagagtgcatgatatatatatataggaaaactagaataaaccctgtgatactgaaatggaattggaggaatcaatataaatttatggttttcagtatatgcagacagatgtttaaaatataaatatagtaaataatgttcatctatatctattgtatattttacatatatgtgtgtgtgtgtgtgtatgctatacatattttgtcatcaaactttgccccctaagtttaacttccgctgatgtttcttgccttaatcaaataattactatgaaggttgacaaatggcgattttctaattctataattccttccacatgtattggttggctagtgacatttgactayaaaaagaaaagagatgctgtgttagttatttcaggctgatataatacaatatcataaacttggtgtttttta

SEQ ID NO: 595877 - DNA, 514 bp, Homo sapiens
ataattatgctcagaccctgcatttttggcaagaacacctaccttagagatgatgttttgttgttctcactttattctctcmgaaagcatataatgtggcctgttctgggatttcttttggtggaaaaaaaggtggaatgtactgaaaaaaaaaaaaaaaaaaaaaaaaaccacacacacacacactcacacacacacacacacaataatgaaggtatatcaaagggacatagaattcaaccaaaagggcatgtcaaacttcagtaaagccacagaaaagcatcagagaaaaatcaattgaagaattttacaaaaatacttggccaatattcttccaaactatcaagaccataaaaaacatgggaaaggtgagaaactgtcatagttcagaagactcttagcaaacatgatgatgaagtataatgtggtatactggaagatatcctgggatgaaaaaacgaacattaattacaaatttagaaactctatggacttttagataaaaataatatat

SEQ ID NO: 595878 - DNA, 284 bp, Homo sapiens
gaaaaaaaaaaaaaaaaaaaaaaaaaccacacacacacacactcacacacacacacacacaataatgamggtatatcaaagggacatagaattcaaccaaaagggcatgtcaaacttcagtaaagccacagaaaagcatcagagaaaaatcaattgaagaattttacaaaaatacttggccaatattcttccaaactatcaagaccataaaaaacatgggaaaggtgagaaactgtcatagttcagaagactcttagcaaacatgatgatgaagtataatgtgg

SEQ ID NO: 595879 - DNA, 284 bp, Homo sapiens
gaaaaaaaaaaaaaaaaaaaaaaaaaccacacacacacacactcacacacacacacacacaataatgaaggtatatcaaagggacatagaattcaaccaaaagggcatgtcaaacttcagtaaagccacagaaaagcatcagagaaaaatcaattgaagaattttacaaaaatacttggccaatattcttccaractatcaagaccataaaaaacatgggaaaggtgagaaactgtcatagttcagaagactcttagcaaacatgatgatgaagtataatgtgg

SEQ ID NO: 595880 - DNA, 553 bp, Homo sapiens
gttatagttgagttctcttaaccataatagggtagggatggtctcttaacttstgccccaccaggtaattcagtgatttggcaggaccctaattccttatgttatttcccttccctctagcaatactttaattattccttctagaatgggcattacgttctgactaattaccaaattgcaatatatatatatatatatatatattcttttccatgtagatttctatgtaacattctctttgcataatgaggttcattaattcttacaaaagtccatctattattttcacaaagccctaagttaaaggaattcttctaattattgaactttgtaaattccctttttggagatttttaactgattattacagtggtacggaaagtagtaaaaaataaataaacttctcttggacaatcctgtgttaattatacttaatgttatacggataaactctctattacaaaaactctcttggaagatacacagtgctaagttcccaggctttgtaaacaaattcagaaaagagaatcatctgaatgtcacaacaatattt

SEQ ID NO: 595881 - DNA, 553 bp, Homo sapiens
gttatagttgagttctcttaaccataatagggtagggatggtctcttaacttctgccccaccaggtaattcagtgatttggcaggaccctaattccttatgttatttcccttccctctagcaatactttaattattccttctagaatgggcattacgttctgactaattaccaaattgcaatatatatatatatatatatatattcttttccaygtagatttctatgtaacattctctttgcataatgaggttcattaattcttacaaaagtccatctattattttcacaaagccctaagttaaaggaattcttctaattattgaactttgtaaattccctttttggagatttttaactgattattacagtggtacggaaagtagtaaaaaataaataaacttctcttggacaatcctgtgttaattatacttaatgttatacggataaactctctattacaaaaactctcttggaagatacacagtgctaagttcccaggctttgtaaacaaattcagaaaagagaatcatctgaatgtcacaacaatattt

SEQ ID NO: 595882 - DNA, 463 bp, Homo sapiens
gctgtgttgtccaggctagtctcgaactcctgggttcaagtgatcctcttgcttcagcttcccaaatagctgggactacaggcacataccaccatgctgagatacttctttcaaaaaaacttttgtagatacagagtctctctatattgcccaggctggtcttcaattcctgggctcaagtgacccttcctcttcagacatccaaagtgctgggatttcaagcatragccactgtggccagcttggatgtcctacttttgatttgaatttcttccatttataattctcatgtttgttttgttttgttttgttttttgtttttttttttttgcttttttctctgtctagtaaaatttgtattgaataccagacactgttaatgttatatatttagactttgaacgtcgctatcttcatttaaattgaatattgtttgggaagtttgttacttgcagatcatctt

SEQ ID NO: 595883 - DNA, 463 bp, Homo sapiens
gctgtgttgtccaggctagtctcgaactcctgggttcaagtgatcctcttgcttcagcttcccaaatagctgggactacaggcacataccaccatgctgagatacttctttcaaaaaaacttttgtagatacagagtctctctatattgcccaggctggtcttcaattcctgggctcaagtgacccttcctcttcagacatccaaagtgctgggatttcaagcataagccactgtggccagcttggatgtcctacttttgatttgaatttcttccatttataattctcatgtttgttttgttttgttttsttttttgtttttttttttttgcttttttctctgtctagtaaaatttgtattgaataccagacactgttaatgttatatatttagactttgaacgtcgctatcttcatttaaattgaatattgtttgggaagtttgttacttgcagatcatctt

SEQ ID NO: 595884 - DNA, 561 bp, Homo sapiens
tatattattctggtgtttaaaaaatttagaaaacatgaggcaaaaaaaaaaaaaaagaaaatatgagacaatatactgtgaaaattctcctccttactgtagggcccagccattctgtgttactttttgaaggctcggattttctagtttcttatgtattcttgcatagtctctaatgtagtctctctttctctctccatatacatacatatgtatcccactttactcaaaaggattgagtattacattcaccatttcacacttttgtttattcacttaaagtcatttaaaatacatgttaaagattgtcccatgtgggcttataactttgtttttacagctgtacattagtccattgtgtatataccataaattatttaaacagcttgctattgatggattactgttgcttttgaaatttgtttttaaaattttaragcaatgctccatgtcatttcacacatgtgattagaagtatagtacacatttctataattggaattggctgttcaaagagtggatgcatctataacttataattcctcttgaatttcactttat

SEQ ID NO: 595885 - DNA, 418 bp, Homo sapiens
aagctgtttttgactgagtgcagtagctctagaatgaaatttcaytggtcaatttctctgccactatccagtgaagtgttatctgcttctattttctcaactaactaatgtaataacacatgaatgatctttaggaaatggccgttggtgtcagaaacttggaaattgaaaggattatgatttataatataattaagaagttaattctagatggcacattttccctttcacttatgtttaatgtacacatgggatgtagtacaaaaaagtatctcatgatatgttctgaaggatgcaagtgacactaagcttttcctgtcactccaatcgaagaatggtcatgttccaaatttaacaaatgataaatttgaaatgttttaattgatataatggtcccaataatacatttttgttaaat

SEQ ID NO: 595886 - DNA, 330 bp, Homo sapiens
tggaagaattaagtgattctctagtatctggatgttttagactatttcctgagctgctgctgatgtaattacctacaaatcttgattgaacaattaaagtcttttgatgacaagcttcaaaactacaaagaagatgaacagagaaagaaaatggaaactctcaaagaaacaacaaatagcatagtagaatcagctaaacactgcattgtgttgctgcasattgctaaagggtaatgcagaaaagcacgcagatggaataagtactattaatcctgtagatgcaatctatcaacctagtcctttggaacctgtgatcagcacgccttccca

SEQ ID NO: 595887 - DNA, 583 bp, Homo sapiens
gcagcattttaacccagacctatataaactggcgtagtgaaagataatgggaggtagagttgaagagaatggcaaagcaggaaaataatatatgttctagtcttagagaatagcatgtacaaaagcatagggtgagaaaattataggttatttagtgataaatagttttcagatacaaatataacttgcctttcagttgaaattggaattataggtgacttgttttgtctttttctkttcccctctctaatattgacatgaaatacctacacagtatgaatagccttccaaatcaggctctaatctacttatgcaaacctatgtctctccttatctgttctgaaaatacagagacacaagctcaagttgtatttcttaagcataaatgactctgtacctctccttttctgagctcatgatgataaggagagagactgtttaataccctattgccattgctctattattgatctggctttccctctttgcatcaatttataacctcttgctactccaacaacacatctcttgaagtctacttattcctactactaggtaaaatagctgtctcctatgaatgtag

SEQ ID NO: 595888 - DNA, 585 bp, Homo sapiens
tttcttcacatccttgccaacacttgttatttttcatttttcaaaattataattttcataataggtgtgaagtgttatctcactatgactttaatttggatttccctaatgactaatggtgctgagctaatttctttttcatttattggccatttgtatatctttgggaaaatgttaaagtcctttgcttatttgtttaattttactttaattgataaataataactttatgtatttatggagcgcaatgtartgtttcagaacctgtatacgttatggaatgattaagtcaagctataaacatagccatcaagtcacatacttttttttaatggcatggagtgacaatttaaaatcgactactctcttatcaattttgaaacacacatgacattattatgaactaaagccaccatgctgttcaatagatctcaaatacctactccttctatatcactgaaaatatactttcatcctttcatcctttcatccatatctctccattccccactcttcacctccatcctctggtaatgatcattctggtctttacctctataagttcaaaattttttagattacaca

SEQ ID NO: 595889 - DNA, 585 bp, Homo sapiens
tttcttcacatccttgccaacacttgttatttttcatttttcaaaattataattttcataataggtgtgaagtgttatctcactatgactttaatttggatttccctaatgactaatggtgctgagctaatttctttttcatttattggccatttgtatatctttgggaaaatgttaaagtcctttgcttatttgtttaattttactttaattgataaataataactttatgtatttatggagcgcaatgtaatgtttcagaacmtgtatacgttatggaatgattaagtcaagctataaacatagccatcaagtcacatacttttttttaatggcatggagtgacaatttaaaatcgactactctcttatcaattttgaaacacacatgacattattatgaactaaagccaccatgctgttcaatagatctcaaatacctactccttctatatcactgaaaatatactttcatcctttcatcctttcatccatatctctccattccccactcttcacctccatcctctggtaatgatcattctggtctttacctctataagttcaaaattttttagattacaca

SEQ ID NO: 595890 - DNA, 606 bp, Homo sapiens
ttttataatacatatatatctctcttaaaaacctgaaaaatattaaatataaaaactacaattacataaagaacaatttttaaaatactgacattatatgcactatgaaaaagagtgatattttgaatagaacgagaaaacaggctctgaaaacacgatttcatttattatttcatttaaaaacaggaggcaccggggaaaaacactaattttcatgttctcagtttgccccatggataatgtaaatatacatttccataatgtagaaatggtaatagcaatatggaaatggttatataaaacatgcctgtcttttatacttgaggtagatatattattttctttcctgttcttcatgcatttatatttcctttcatttatgtagtatcctggmataaagtacattgggagttattgctcaaaggcacattcacccttaggtgttgtaaagagaggcaaagtaggcaccagattgcagatgcagagcaaagctacataaaagagcaaaacgtgtgattatggtgtgctgtttaaaagactggagagaaaattccatctggagaatggcaacctgaagatgctgtagaaagggcaatcccatgagct

SEQ ID NO: 595891 - DNA, 487 bp, Homo sapiens
caaatacaaaattataatagcataattatgtggtcgcaaaaaatgtatttttaaggatttcttcagtagggagagacagaagtccaacacaaagtagcttaaacaatggagataattacttgttcctaaaaatttataagtctaatgacatatcaatggctggatttagatgaatatatgccataaagacagtttaactctcatcacttctcggttttctcttcctctatgatagatccacgcttaggtaagactgctgccctcagtttcaagtctgtaaactatctcagaaaaatacatagataaattttctcttctctatagcttamaaaataatctccataattaagtttaatttgatttgtttggttagtgcatcacagcaaaaaccaatcactgatgtaagagggagagaatgttctgatttgccagtcttgttttcctttctgttattgaaagtggagaagggtagtaactcatgaaaaat

SEQ ID NO: 595892 - DNA, 590 bp, Homo sapiens
ggatgaaatttacagcactacttctatttgaagaaaagtattgaaacaattacctaaacttctactttacaagacagtaaagataatagcaaattaaatgaaaaggatacaagagttaaaaatacttagtagaaatcaatgaaatagaatttagaaaacacaatagagaacatcaatacaacaaaaaaagtttttctttgaaacagtgatatatttcttgccattcaggtaaaaataaatattttccaatactggtaataaggtttggggtaatcataaagttactaaggcaacagaaagatattaaaaamttatgttaggccaggcgccatggctcacacctgtaatcccagcactttgggaggccgaggtgggcggatcatgaggtcaggagatcaagaccatcctggccaacacagtgaaaccctgtctctattaaaaatacaaaaaattagctgggcgtggtggcagacacctgtagtcccagctactcgggaggctaaggcaggagaatcgcttgaacccaggaggcagaggttgcagtgagccaagatcgcgccactgcactccagcctgggatacagtgcgag

SEQ ID NO: 595893 - DNA, 597 bp, Homo sapiens
ctaaaagtagacacaccatagtaaatcatgtgctatataaatcagctatggctgctggagactaaagtctgacctttatttttctcttgcccaaattcctaactaaagggcctgtggagtcacaccctgcaaactataacatctcattagatggatttttattaaccttgtataatgtggtttattttctaaatggactctggtatagcatcacatgacagagaacaggtcctgaaggaaatgaaaatattttaacccaaaatatataccttctacatattttgaaattgctgccacagggccaacagattgaaatgtcatggcaaagccctgttttgtaggggatatttgcatctgcagagaatcaccattaatgcagccaagccttctctttctatgcctttcctggatataggagagattaactaagacacctgataaaggagagattaacaracaccttaaagtctgaaaagacacttttaccatctatactctctgagggctgctatttatgagacttcatagccataacaagaaccttggccttcacgacccctttatcttaactcaggcattcctttctactgacattaa

SEQ ID NO: 595894 - DNA, 572 bp, Homo sapiens
tcactcatattggctcagaataaacctctttaaatatattttggcagaatttgttttttctatcatcactgccataacaacataccacaaacygggtggcttgaacaacaaaaacatatggtctcacaattctggagattagaagcctgcaatcaaagtattggcaggtctagtgtcatctaagctctccttggttcgtagacagctaccatcatacaaagtcctcacatagtctctatctgtatggtctctctttctctctgtatattctaatctcctttcttttaacaacaccaatcatattgcagtagggcccaccccaagtgcctcattccagtataattacttctttaaagatcttgtctccaaatatagttacattttgaggaaccaggggttagggctttaacatgtgaaatttgaccaatgcaattcagttgataacatgctttttttaaaaaaaaaaaattgtgatataattccaaactgcatggtcaacaagagccaatttatgtactcattaaaagattccagttggtaattttctcacattttgaccaatactgcatatt

SEQ ID NO: 595895 - DNA, 575 bp, Homo sapiens
ataattcagtgatctgaatttaatgctttcagtgttcagtttgtcatttattctctgtaaaggaatctgttgattattacatgcaatttcacaaataagctcttcattcattttctgctgtattttattagcaaataaaaatacaagccacccagttaaatttgaatttcagataaacaacaaataatattttagcattagtatgttttatatgatatttgcagccctacttacctgtctcctctgctccgcctctctgcaaacggtgttcctgttcckgtctttcatagtttaagtcagaatccaaccccttatacctggactcatgccacttacattttacgaatcacagaaggctcctgattgtatcctttttatgtgtctcagatttatctatttcttttgactcccattggcatttctctactagaggtcaccattagctctgactttgatgacaacaacagcatccaaattagtattcctctcttagtcttgcctccagtcaccctctagtaatctaaatgttatttaaaatgcagtcatgtaaaccagaaatgtcatccagctagtaa

SEQ ID NO: 595896 - DNA, 515 bp, Homo sapiens
tcaccagttttaccctaatttgatcacgtatatttacaataattcttgaagtcagataacgtcagtccacaaaccttgtcttcttttaattattaattagtatgagatgtcggtttccagattktcattttccactgtgtgtttttagatacaaaatgagtttctacagatatagttggatcttgtttttcaaaaatatattctgccaatatatttttttaaatgtggaatttaatctatttatatttaaatagttactgacagggaaatatttcactttgctatttttaattgggttttgtttgtcttatagcatttttgtctttcatttttgcttttattgactttctttgtatttagttgatttattgtatggacatatttggattcatttctcttttcctcttgtatgtattctacaaatattcctttgcctttgccatgaggattgtattagttcattctcttattgttatgaagaaatacctgagaatgggtaatttataaagaggttt

SEQ ID NO: 595897 - DNA, 617 bp, Homo sapiens
ctgcctatgagcctgtaaaatcaaaaacaaattagtttacttccaatatacaatgggagcacaggtgttaggtaaataggcctgttccaaagaggagaaatcatccaaaagagaggggatgtagtccctatgcaattttgaaacacagcagggtagtcataaatattaaacttccaaaagtatctcctttgactccgtagcacacatccaggcaacactgatgcaaggagtgggctcccaaggcctttggcagattcactcctgtggctctgcagagtacagcccttgtagctgctttcacaggctagtgttgagtgcctgtggcttttctagtaacacagtgcaagttgtcagtggatataccattctggggtctggaggatagtggctttcttctcatacctccagtaggcgccccagaggggactgtgtgtggggactccaaccccatatttytcctctattctgccctagtacaggttttccatgagggctccactcctgcagcagacttctacctggacattcaggcttttcaatacatgctctgaatctaggtggaggatccaaagcctcaacttttgccctctgcacacctgcagacttaacaccacagg

SEQ ID NO: 595898 - DNA, 580 bp, Homo sapiens
tggtctttcaacaccttggttacatttattcctaggtatttttttttttgtagtatttaagatgattttgctttctcaatttttttttcagctagtttgtcattcatgtatagaaatgctactgatttttgtacgttgatttgcattctgcaattgtattcaatatgtttatcagttctaagaggtttttggtggaatctttagatttctctagatataagattatttcatctgcaaagaaaaacaatttgacttctttttcaatttgaatgtttttgtttctttctcttsgctgattgctcaggctagatcttccagtactatgttaaataggagtgatgaaagtaggcattcttatcttctagttcttagaggaaaggttttcagtttttccttattcagtataatgttagctttgggcttgtcacacatggcctttattatgttgaggtatgttccgtctattcctaatttgttgagcgtatttatcatgaaacagttgaattttatcaaatgctttttctgagggatattggcctgtagctttctttttttgttatggtcttgtctggtttggata

SEQ ID NO: 595899 - DNA, 580 bp, Homo sapiens
tggtctttcaacaccttggttacatttattcctaggtatttttttttttgtagtatttaagatgattttgctttctcaatttttttttcagctagtttgtcattcatgtatagaaatgctactgatttttgtacgttgatttgcattctgcaattgtattcaatatgtttatcagttctaagaggtttttggtggaatctttagatttctctagatataagattatttcatctgcaaagaaaaacaatttgacttctttttcaatttgaatgtttttgtttctttctcttcsctgattgctcaggctagatcttccagtactatgttaaataggagtgatgaaagtaggcattcttatcttctagttcttagaggaaaggttttcagtttttccttattcagtataatgttagctttgggcttgtcacacatggcctttattatgttgaggtatgttccgtctattcctaatttgttgagcgtatttatcatgaaacagttgaattttatcaaatgctttttctgagggatattggcctgtagctttctttttttgttatggtcttgtctggtttggata

SEQ ID NO: 595900 - DNA, 462 bp, Homo sapiens
tggtgctgggttaactgaatattcatatgggaaaaaatgaaagttgacctctaacttacatcataataagtaagtctacttggatagtagatctaaatataaatagtaaacaaaaacaatttctagaacataacaaaaaaggtctttatgatcttggcataaggaaagatttctcaacaaaaagcactaacagtaaagaaaatattagtaggttgtactaaattaaaatgaagaagttctaattatcagaagacactataaggaaagtgaaaaggcagaccacacaatagaagatatttgcaattcatgcagttgacaaaggtcttgttcccaaaatgcagaaagaattcctaaaaatcagtaagaaaaagctatawataatccaatagatcagcagacccctgaggaagcacttcacaaaagaagatcttcaaatggtcaataaacatctgaaaaagagct

SEQ ID NO: 595901 - DNA, 555 bp, Homo sapiens
attcaggacttaaatttgacgcttgacctaatggatctaatagacatccacagaatactgcaccctaaaactacagaatacaccttcttcacatctgcacatggcatatactctgacattgaccacatgcttagtcataaagtaagtctcaacaaattcaaaaagtagaratcataccaactacactctcagaccacagtgtaataaaaatagaaatcaataccaagaaaatttctcaaaaccataagattacatgtaaatgaaacaacatgctcctgaatgacttttcggtaaaacatgaaattaaggttgaaataaaaaaattccttgaaactaatgaaaacagagacacagcttaccagaatttctaggacatatagttaaagcagtattaagaggacagtttatagcacttaacacttacatcaagaagttagaaagatctcaaactaacaacttaacattgcacctagcggcactagaaaaacaagagcaaaccaaccccaaagctagcacaagaaaagaaataacctaaatcaagctgaactgaatgaa

SEQ ID NO: 595902 - DNA, 564 bp, Homo sapiens
tctattttgattttttgtagttgaacatattctaaattttaaagcagattcaacccaaaattaaatatccattttggatagaaaaaacaactacaaccaagatgtgatcttatgaggctaacaacatattttttgatctgtagatgcatggccaagtctttatgcagtgagggtgtttggaagttttgttcctttttttcactcaaataacaagaataaaaatttggcatgcctttgtttgttcattcacttgctgcataattgtcagctggcagcctacctcagtgctaggcctaattcaaccaaacatgagggcaggatttaccctcctacttgttgytttttttttttcctggagaaacaaggtctttctgtgttgtccaggctggtctcgagtgcctggcctcaagcaattctcctgtctcagcctcccaaagcgctgggattacaggtgtcagtcactatgccaaggcaacttgttgctcttcattgtgagattgaacaaaggggagtggagttaaggaacccacatttgaatcatatctgtaaaatgcacttgttaag

SEQ ID NO: 595903 - DNA, 608 bp, Homo sapiens
agagccggtgagtctaatattctaacccagatgatctgccaaactgcgttacagggtgaacttctgtcctaactcttgaattcctagcaaactgtactgtgcacagttatcttatgtaaatggtgtttgttacacatcaagaaaaagggctgtctttgttctctgccttctttatagagccctccgtatttgaccttcctggttaggagagaggaaagtcgaggtactttgatctgtatcaggcacgcccttctctcatcccatattaatttttcccacatcagttttaagagctttgygcttataggaggaaaggcatattcattcaaattgtcattttttcaatatcacttgctcaggaagagttaaagctccgtcagtgagtagaaaattattaagttttctgatctcctagtaggattggctaaagaactccagagagtgagaagggcttggaatttagtcatgatttttttccatcaggaaaaagccagttagatacgaggagggagagggaagccgcttggttcaaaggaattaaaatgagaaatgaagtttcagctgagtgtaatgaggctgctgctgaggctggcctcagggtgaggctg

SEQ ID NO: 595904 - DNA, 404 bp, Homo sapiens
ccaaagacctcatcatttccaaaagccttttagtagttattaccttctgtatggtaacatttaataccattttacccgcttttgtctacgaagctctcctattctacggctttatgatgcttttttctttctattaccctgcttcttctggaacacactttgtttgtctccatgggtccttctatgttgtcctctctttggaggggacatccttcaatgtctttccttggccttcttctctcccttctccactggcttcttcrgggagatgactcactctcacaatttcagctgttatttttgtatctttctttcctggaacacatctccacctctgaccacttcgtggaattctaagtttctaacggcttgctgaacatcatcacttgaatgtcctgccaatg

SEQ ID NO: 595905 - DNA, 587 bp, Homo sapiens
taggactatgggtgtgtgccaccatgcctggctaagttttaaatacttttgtagagatggggtcttgctatattgcccagggtgatcttgaactcctggcctccagcaatcctcctacttcagcctcccaaaatgctgagattacaggcatgaaccactgtgcctggcctatactatttatcaacatcttcctcccattagcttaattttaattaattatatttaattaaaatattattcataaactctacctttcaaaaatgtacaatcgagtggttttcagtatattcacaggtcatgcagccaccactgccatgtagtcccaggatattttcatcaccccaaaaagaaatcccatacccattaggagtcttttcccattctcccctattcccagctcctggcaaacactaattgattctctgtctccatacatttgcctgttctggatgcttcataagaatgcaatcattcaacacgtggtcctttgttgttggcttctttcacttagcrtactgtcaacaaggttcatccatgtggcagtgtatatcagaacttcattctttcatggttgaatactctgattt

SEQ ID NO: 595906 - DNA, 566 bp, Homo sapiens
cagtaatgggattgctggtttaaatagtatttctggttctagatccttgaggaattgccacattgtcatactactactttctagtcttgactgtgcattggaatcacctgaaaagctttagaaattactgatgcctgggcttcctccctagagggtctgatttaattagtctgggactgagaactattgccctagtgttcatacactttgcagaccagagtgggattttttttcaaaacctaaatttgattacatttgtcctgttgtttaaaatacttcaatgactatgcattgctttaaccaaagaaaagaaacatgcttacatggtttgcagaattctatagtcttgcctctgcctcagttgtcacttctcctggccctcttttatttcctcactgcactccctctccccacatccattcatcccacaaatattattgaacacctacktatgacctaggcactaactgagatattgaatatactgcaatgaacaaaacatagctagtgcttctgcatatggagcttacatttttgttgcagggaagatagacactaaataaacc

SEQ ID NO: 595907 - DNA, 533 bp, Homo sapiens
taatgtcgtctcaacctcccatagtttgtcttcaccaccctagatgccccaatcccctatgtctttctgtggttaaggatgctatataaacctcagtcatcagaccacttcactgagtctcatatttttgtgggactcctgarcatgtgtacatacataaagttattgttcttatgtcaatttaacttgtagaccagccgaagaacctagaaaggtagaggaaagcaatttttcattccctacaaaacaaacaaacaaagccttaatatcagaaagtatcatctgtttaaccatcaaataagtagaatatgaaattattcagaaccctcatcatatataatcagccttgttaatggaagcattgtagttcatttatgtgatagtattcattcaagtaatcattttttagcatttaagttttgttcccattgttaaatatattttaatgtccttcactacccatggcgagttggaggaacaccacgagcactcctgtgtgtcacttgcacatgggtctgtctgcaggacatttg

SEQ ID NO: 595908 - DNA, 469 bp, Homo sapiens
aactgtagagctcctgcaagaaaacatactgaaaaatcttcatgacttagtcttggcaatgaatgtggcaccaaaagcatgggcaacatagacaagtggcatcgccaaagcaatcttaagctccgcttcttcctccgtgttcaccaccttcagtctcttcctctcccagtgtcctccctatccgcgaactccagctaccactacagtagctttcttctcccamattacagccaaagttcctgaaagacacatttttattccctgtgtttaattcttcactttctcttttcccatcagctttctaaaatttgtcctccagccatagcacttcctgaaggtgctctcacaaggtcattaaatatttctacttccttaagttctgtgcatatgtcttctgttttcattttactctatcttttagtatcttttagcatgtatgacctatgatctactcattggttactgtgac

SEQ ID NO: 595909 - DNA, 609 bp, Homo sapiens
atttaaataattcaagttctttttcttcatcgttacaatcactgtgctgtcattctttatgtcacatgtattgcttaaatttaggcatgtatagtacaagtgagttggaaatacaaaatgtgcccaaaatgagctgaaatgattctgcacctttaggcatttactactcaaatgaactcatgtgcctgacttcgtgtgcatgaggtatggagagcagcagtctaactgagaattccaaattaacttccttttacatagacagtaaaagacaaattataaacatgttaatttcaaattatatatatatatataatgttattcatatcctgattatggtaatgattgcctaatatatataatatatatataattgcctgagatatatatatatatatatatacacacacacacaaaaaaaatctttaaattcctctggttactgttgagttttatatatatatatatatatatatatatatatataktaaatatatcatatatataaataaccacagtgtattagtccattttgacactgctataaagaactttcctgagactgggtaatttataaagtaaagaggtttaattgactcacagttctgcatg

SEQ ID NO: 595910 - DNA, 445 bp, Homo sapiens
taaagtctcaagaaattcccaataattcttcaacataaaaagaagaaaacactgtaaagattacaagaaatatgtaaaaataatacataagttttatcttaatacttaatactatataaaaatttcaacttattataaaataccagtgataacttccctttgaaaaatgccaaatataaaactacactgaattttcagggaactgtagtggcctaaatttcattgcttgtgtgtctgtggccttctattaatatatgacctgaaagcaacttacttggatcctatgagactagccttgtacagaaacctctttactgaacattttttaatattataccctcctcattttgtcaagagccaattaaaaaaacatacaaacttackttagcataatctgtaaaaatcatccttgaatagagcatacaccatgtccttacaaaaaaaa

SEQ ID NO: 595911 - DNA, 502 bp, Homo sapiens
aaatagaatttccctggaaagagcttcatttcccatggccaaacttagcatagctttcaccatcaggacacatcttccagggttctgctgagtcccttgaggggccctagggaaacagtgagacagatgtaaggaaaggaaaaaaagcatcttatgtgaaagcacgtccagtatcttctgggtattatgttaaataaacaccacagggtaattcagtatttatagaaggaaaaaaaaacagccttaatgatgatagggcatcagagaaatttaattactccytcaggtctcttttgtgcaagacagtgttcacatgacaacctgggtggcttcttgtttgtggtattgcttctctcttcccaagaaggtgctaaaagaaactagttgtgggtggaggaaggtgctcttcataaagagaccccaacccccatccacaccagctctcctgggataagaagtaaaatgcctcaagttcttgtgcttagccagcaggtactaggga

SEQ ID NO: 595912 - DNA, 414 bp, Homo sapiens
ggagctatccaactctgaaggataaaatcagaattaaatatctgtgcacagaagttaggtccatccgatcttcacttggggagcttcacagttggttccaaagcagacaagactccaactgggagatttccacagctgtaccatgaatggtcatcgaggacacgggcttcccaacagggctgataccaactcaccaaggtgggttgtgcctgctgcctccagttcctctgccctccatcagtccttcatccttgcaactgaatttccaccctctctactctacaggcatccaattcccatggctatcactaataccataattacaaaacccaacagttcttcaggctttatttgycccaagtttctccttcacatttgacaacttggtatttctttcattcttagaattcctcg

SEQ ID NO: 595913 - DNA, 601 bp, Homo sapiens
aggcactaaagaggatgcttgatataaagggccgacaaaaacgcagttacttttcagatgaaagtccagactccatgtctgtttcatctagctcattccttacatacttagaaaacagatgtgatctgaattggtcaaggaactaatgtccaaaagaaaaatgtggtccaagacataaaaccacaagtgggttcttcatcaaggtctgaacatcatcgcccagagagatgggtggctgggaatgccagtacatcattagtatataattttatattttcaaagcattttacagcaagacttttataatcttccctactccaaacatcacattgtcagtgttaagacttcaaataatccctgatgctttggggtttccactgacccatgtggaaacccacctcatttgcttcttgccttgtggttcccatcacgggctgagccttactcacccatggccatatcatggggaccatcatggaggttttgttaaacctacagccattacattttattcaggaagaatgggagggaaagcttgtctgtttaagagctttttcctcmatttatttacttatgtattttgattgatacataatagttc

SEQ ID NO: 595914 - DNA, 543 bp, Homo sapiens
gaattccccccacacattgacttggaagagcctaagagaggcaatcggaacaaaggttgggtctcggcgtgcctcggtcacgttggcaaaggatgccccaggtactcttccgcccagaaatggtgtttggcacctagcaaatcagccggggaaagtacaaaaggccctgcatctcataaaagatgcatttagcacaggtttctatttcagagctaatggcattagctgttttgtagaaagtaagaaagcacaattaccctgttttaataacatggttgacagcacagctctaatcctgggggattctgggtttacattttgaggtttctgtagcaagcgagttcttagtaccaagctagcgtgtagccttatrtgccagtttgcctaaaacactcctggcttatacctcatgtttattaatagcaccctctttcaccttctagtgtcccagtttgggcaataaatgacacaatcaccttagtgacacaaaactgagaacgctaagcccatgcttgatggagcagctccccaccagctccttag

SEQ ID NO: 595915 - DNA, 532 bp, Homo sapiens
gcagaactgtgagtaaattaaaccccttcctttataaattacctagcctcatgtatgtctatagcagtgtgacaatggactaatacaagaagggactcctcccacctcattctataaggytagcatcatgtggggattatggggattacagtttgagatgagatttggttgaggtcacagagataaaccatatcactccttctcagttttttagaatagtttcagtaggaatggtatcagcttttctttgtacatctggtagaattcagctgtaaattcgtctggtcccagactttgttttggttggtaagctttttattactgattcaattttggaactcattattggtttgttcagggattcagtttcctcctggttcagtcttgggaggttgtatgtgtctaggaaattatccatttcttctagattttttagtttgtgtgcatagaggtgttcatagtagtctctgatattttttcctgtgggatcagtggtaatgccctctttgtcacttctaattgtgtttatttg

SEQ ID NO: 595916 - DNA, 532 bp, Homo sapiens
gcagaactgtgagtaaattaaaccccttcctttataaattacctagcctcatgtatgtctatagcagtgtgacaatggactaatacaagaagggactcctcccacctcattctataaggctagcatcatgtggggattatggggattacagtttgagatgagatttggttgaggtcacagagataaaccatatcactccttctcagttttttagaatagtttcagtaggaatggtatcagcttttctttgtacatctggtagaattcagctgtaaattcgtctggtcccagactttgttttggttggtaagctttttattactgattcaattttggaactcattattggtttgttcagggattcagtttcctcctggttcagtcttgggaggttgtatgtgtctaggaaattatccatttcttctagattttttagtttgtgtgcatagaggtgttcatagtagtmtctgatattttttcctgtgggatcagtggtaatgccctctttgtcacttctaattgtgtttatttg

SEQ ID NO: 595917 - DNA, 618 bp, Homo sapiens
ttgactgggctagagtgcagtggcacaatctcagctcactgcaacctctgcctcccaggttcaagcgattctcctgcctcagcctccctagtagctgggattacagtcatccgccaccacgcccagctaattttttgtatttttttagtagagacggagtttcaccatgttggccaggctggtctcgaactcctgaccttgtgatttkcccgccttggcctcccaaagtgttgggattacaggcatgagccaccacgcctggccagatcttgcatgttgtgactttgataaactcactttgtagttctaagagtttttggtagattttttgggatttttctatatattataggaaatcgtgttatctgaaaatagaaactcccttccttccttccttccttccttccttccttccttccttccttcctaccttccttccttctttctttctttttctttttcttcttacatatatgcttttcttttctttttcttttttttttttttggctttattgcactgtctagaacttccagaactatgttgaataagagctgtgagagcatttattcttgccttgtttccaaccttaggggaaaagcattcggtcttttgcta

SEQ ID NO: 595918 - DNA, 618 bp, Homo sapiens
ttgactgggctagagtgcagtggcacaatctcagctcactgcaacctctgcctcccaggttcaagcgattctcctgcctcagcctccctagtagctgggattacagtcatccgccaccacgcccagctaattttttgtatttttttagtagagacggagtttcaccatgttggccaggctggtctcgaactcctgaccttgtgatttgcccgccttggcctcccaaagtgttgggattacaggcatgagccaccacgcctggccagatcttgcatgttgtgactttgataaactcactttgtagttctaagagtttttggtagattttttgggatttttctatatattataggaaatcgtgttatctgaaaatagaaactcccttccttccttccttccttccttccttccttccttccttccttcctwccttccttccttctttctttctttttctttttcttcttacatatatgcttttcttttctttttcttttttttttttttggctttattgcactgtctagaacttccagaactatgttgaataagagctgtgagagcatttattcttgccttgtttccaaccttaggggaaaagcattcggtcttttgcta

SEQ ID NO: 595919 - DNA, 596 bp, Homo sapiens
caaaaaaaaaaaaaaaaaaaaaaggaaagaaattatgctaaatctattccacctgtgctctataaatggaacagcaaagcctgatgacagcacatgtttacagcatggtttactgaatattttaagcccactattgggacctactgctcagataagattcctttcaaactagtactgctcatagacagtgcacctggtcatccaagagctctgatgaagatgtacagggagattaatgttgttttcatgcctgctaacacaacattcattctgtagcccatggaacagggagtgatttagactttcaagtcttgctatttaagatgtacgctctgtaaggctatagctgtcacagatagtgattcctctgatggatctgggcaaagtcaattgaaaccttctagaagggattcatcattctagatgctattaagaacattcatgatttatgagaaaaatcaaaatatcagcattaacgggagtttggaagaagttgattctaacccttatggatgactttgagggttcaagatttaaggggagaaagtaactgcagttgtgttgwaaatagcaaaagaactaggattaaaagtgga

SEQ ID NO: 595920 - DNA, 584 bp, Homo sapiens
  misc_feature 578, 579, 580, 581, 582, 583, 584: n = A,T,C or G
aacctagaattctgctgggttaagttataaaagaagcttgaaagcacaaaaaaaaaaacatttttagattagtagagactcaaatttcattcccatgcacgcttttcaggaagctactaaaaggtagaatccaataaagaaagggaataaaccaagaaatgtgggcccatggaactcctgcttctgagatcctaacacaagaggatatgacatgaatccttgaaatgatagtaaaaggaagaccaaggagagtggcagctgttgagtcacctagggagcgcccagtctagttgataacaaaaggattaggactttaggggaatatctcagagtgagagagagagagagcaagaacaagaaagcaagagaaccagtttgaccatacggaggtgttttacagctctggcaaagactctggggatgggcacagaaaataaggcaaataaataactaagcaaataaaacaaaatgcaggggtggagaaattwaaaaaaaagcaatcacaatttattactggctcagcacagaacatgtttgcatcatcacgacagagactgactactgactattaattcaannnnnnn

SEQ ID NO: 595921 - DNA, 614 bp, Homo sapiens
gttctaagatgcaccaataaacagagttcagtgggaagaatgatrcctacctgattgtagagggatctttatatataagacacaggcttctggctagtgaacaaagagaagttattggaaggaaactgggaatttgcagaacccacatgaagttagggaaacctggagtggaaatcagcagtttggtgggcctgcccacttctggtgcgtggaatccaaaatcagtggccgggtacgtgacccagtcttgcacaccctccatcccacttgacactttgaatctgcagagagtggtagagacaaaaggacaattaagaataatcccaccccatctctactaaaaatacaaaaaattagcccgtcatggtggtgggtgcttgtagtcccagctacttgggaggctgaggcaagagaatggcatgaacccaggaggcagagcttgcagtgagctgagatcacatcactgcactccagcctgggcaacagagcaagactccgtctcaaaaaaaaaaaaaaagagaataatcccaaagtagctatgggggtggcttaatgacatagcagcatgtgtcagcagctgcaaatttgttctggtggactgtttctattaaaat

SEQ ID NO: 595922 - DNA, 582 bp, Homo sapiens
tcaacttctaagctatttttgctctgtattttatttctatatatactttaaatcctacagtgtatcactgacctgttaatataagataaattaatgttaaccattagtaattatgaattcatagtcaacattaagttatatttaatttagacttagccacaattaaccttttcacagctctttsttcgtttccatggctctgagcttccatttggcttcatttttctcctccttgaagaaactccctttagtgtcttcttgatgtgtctgctggtattaaattttcctagatttctttggtctgaaaatttctttatttcacctacattattgaaggatattttcaatgcatatagagttccacatggcaattattctctttgagcactttgaaggtctcattcactgacttctgggttccctagttggcgttaaagtcagatgtgggtctctgttgttgtactgaaagttctttgttttctcctcatcctgacttctacagctgcttttaagactttctctgttattggttttcagcttattactatgataagcctaggtatgattttctttttatttatc

SEQ ID NO: 595923 - DNA, 582 bp, Homo sapiens
tcaacttctaagctatttttgctctgtattttatttctatatatactttaaatcctacagtgtatcactgacctgttaatataagataaattaatgttaaccattagtaattatgaattcatagtcaacattaagttatatttaatttagacttagccacaattaaccttttcacagctctttgttcgtttccatggctctgagcttccatttggcttcatttttctcctccttgaagaaactccctttagtgtcttcttgatgtgtctgctggtattaaattttcctagatttctttggtctgaaaatttctttatttcacctacattattgaaggatattttcaatgcrtatagagttccacatggcaattattctctttgagcactttgaaggtctcattcactgacttctgggttccctagttggcgttaaagtcagatgtgggtctctgttgttgtactgaaagttctttgttttctcctcatcctgacttctacagctgcttttaagactttctctgttattggttttcagcttattactatgataagcctaggtatgattttctttttatttatc

SEQ ID NO: 595924 - DNA, 469 bp, Homo sapiens
  misc_feature 432, 433, 434, 435, 436, 437, 438, 439, 440, 441, 442, 443,444, 445, 446, 447, 448, 449, 450, 451, 452, 453, 454, 455,456, 457, 458, 459, 460, 461, 462, 463, 464, 465, 466, 467,468, 469: n = A,T,C or G
aaggaagtacaatcgtaataccattaagatgcactcaaaatgaaatcacataactgtctaaaacrtaagtgctattttaagttttattccctacctaaaagaatgttagagcacctagctgatactaaatgtcaaatgtcctttattggacaaacaaaacctaatcagcgagaactcccttttctctctccaggtgtcctctttaaaagccatgaccctggaaacccaatccactgtgaggagaagccatttgcagtaggtacatctccagtatcttatcagaggactaaggaggggatcccgccacagaccactacagggtaccaagcgcctcaaccgcagcatgaacgacatctgggccagatcatccttggctgtggggtgggctgtctgatgcactggaagatgtttaactgcacctgtagcctctannnnnnnnnnnnnnnnnnnnnnnnnnnnnnnnnnnnnn

SEQ ID NO: 595925 - DNA, 536 bp, Homo sapiens
tactgttattgattacactatcttttcagaattgttcagtatactrcttatttctggacaattcccaaaatctagtcaagtcatctaccatattgcatctcaaactattcaccattttattttaaataccaagccactgtggaccaatacacctttaaatcacaaaaataaaaaagtattactgggaaaataaaagctgaaaatgcaaagatcaataacttttcatatacccaattttttaaataaattcactagacagtgcaatgtttcaataaatataacaaaaatgagaaaaaagaaaaaatatgtaaaatttgcatgctgtttattaaaagtatccatagaggaaattaatatagataattgctattaaacttataatttttgtcattagaaaattctaacttcaagataggttataggtaaaataatgatttccatattaaatgtccgttctcacagtttgaatgaataccacatatatcaatatttaaaatgcataacctgacaaatatccaggttggattgatgactat

SEQ ID NO: 595926 - DNA, 536 bp, Homo sapiens
tactgttattgattacactatcttttcagaattgttcagtatactacttatttctggacaattcccaaaatctagtcaagtcatctacyatattgcatctcaaactattcaccattttattttaaataccaagccactgtggaccaatacacctttaaatcacaaaaataaaaaagtattactgggaaaataaaagctgaaaatgcaaagatcaataacttttcatatacccaattttttaaataaattcactagacagtgcaatgtttcaataaatataacaaaaatgagaaaaaagaaaaaatatgtaaaatttgcatgctgtttattaaaagtatccatagaggaaattaatatagataattgctattaaacttataatttttgtcattagaaaattctaacttcaagataggttataggtaaaataatgatttccatattaaatgtccgttctcacagtttgaatgaataccacatatatcaatatttaaaatgcataacctgacaaatatccaggttggattgatgactat

SEQ ID NO: 595927 - DNA, 536 bp, Homo sapiens
tactgttattgattacactatcttttcagaattgttcagtatactacttatttctggacaattcccaaaatctagtcaagtcatctaccatattgcatctcaaactattcaccattttattttaaataccaagccactgtggaccaatacacctttaaatcacaaaaataaaaaagtattactgggaaaataaaagctgaaaatgcaaagatcaataacttttcatatacccaattttttaaataaattcactagacagtgcaatgtttcaataaatataamaaaaatgagaaaaaagaaaaaatatgtaaaatttgcatgctgtttattaaaagtatccatagaggaaattaatatagataattgctattaaacttataatttttgtcattagaaaattctaacttcaagataggttataggtaaaataatgatttccatattaaatgtccgttctcacagtttgaatgaataccacatatatcaatatttaaaatgcataacctgacaaatatccaggttggattgatgactat

SEQ ID NO: 595928 - DNA, 541 bp, Homo sapiens
ttccacattcccttaatgacatgtgatgttaacacatttttcatatgcttattttccatctgcatgtcttgtttggcgaagtgtttctacagttattttgcccatttaaaagagggttgtttgtttgtgtgttcctcccatcyggagttgttcattcctcctgatgggttcatggtccccctggcttcaggagtgaagctgcagaccttcgcagtgaatattacagttcttaaagacagcacgtccagggttgttcgttcctcccatccggggttgttctttcctcccgtccagagttgttcattcctcccagtgggtttgtagtctcgcgcttcagagtgaaactgcagaccttcgcagtgagtgttacagttcatagaggcagcgtggacccaaagagtgagcagcagcaagatttattgcaaagagcagaagaacaaagcttccacaccatggaaggggacccgagtgggttgccgctgctggctctggtggcctgcttttatttgcttatttggccccacccacatcctgctgattg

SEQ ID NO: 595929 - DNA, 541 bp, Homo sapiens
ttccacattcccttaatgacatgtgatgttaacacatttttcatatgcttattttccatctgcatgtcttgtttggcgaagtgtttctacagttattttgcccatttaaaagagggttgtttgtttgtgtgttcctcccatctggagttgttcattcctcctgatgggttcatggtccccctggcttcaggagtgaagctgcagaccttcgcagtgaatattacagttcttaaagacagcacgtccagggttgttcgttcctcccatccggggttgttctttcctcccgtccagagttgttcattcctcccagtgggtttgtagtctcrcgcttcagagtgaaactgcagaccttcgcagtgagtgttacagttcatagaggcagcgtggacccaaagagtgagcagcagcaagatttattgcaaagagcagaagaacaaagcttccacaccatggaaggggacccgagtgggttgccgctgctggctctggtggcctgcttttatttgcttatttggccccacccacatcctgctgattg

SEQ ID NO: 595930 - DNA, 564 bp, Homo sapiens
ctacctatgtagaataaaatctatgttacctttctttctccttttgcttatatattatgtacatccatttctaaatatattagctcaatcctcagtagatataaaaatccaatctctttatcatctcttaactgctttctcagtctccattctttgcttctgatacatttatttttgacatagcaacaagagggactgttttgtaaaacaagtcagattgtattattctgtctcaaacyatccaagagctaattattttacttagaataagagccagaatacttacgatcacctgtgaaatctaggtgatcaggcctcagtgtctttctcacttaatgctcttttattgttacaacacaatagctttatattctttttcctctccagtctagccatactggcctttgcattttttaaatatatcaaaatttagtgcctttgtacttgattttgcttctgtctaaatcgattttctcaaaatagctgcagggatttttccatcctgtatcagtaaagtctttcctaatcaatcttataaaatagcaacgcccttcatcccacagt

SEQ ID NO: 595931 - DNA, 564 bp, Homo sapiens
ctacctatgtagaataaaatctatgttacctttctttctccttttgcttatatattatgtacatccatttctaaatatattagctcaatcctcagtagatataaaaatccaatctctttatcatctcttaactgctttctcagtctccattctttgcttctgatacatttatttttgacatagcaacaagagggactgttttgtaaaacaagtcagattgtattattctgtctcaaactatccaagagctaattattttacttagaataagagccagaatacttacgatcacctgtgaaatctaggtgatcaggcctcagtgtctttctcacttaatgctcttttattgttacaacacaatagctttatattctttttcctctccagtctagccawactggcctttgcattttttaaatatatcaaaatttagtgcctttgtacttgattttgcttctgtctaaatcgattttctcaaaatagctgcagggatttttccatcctgtatcagtaaagtctttcctaatcaatcttataaaatagcaacgcccttcatcccacagt

SEQ ID NO: 595932 - DNA, 564 bp, Homo sapiens
ctacctatgtagaataaaatctatgttacctttctttctccttttgcttatatattatgtacatccatttctaaatatattagctcaatcctcagtagatataaaaatccaatctctttatcatctcttaactgctttctcagtctccattctttgcttctgatacatttatttttgacatagcaacaagagggactgttttgtaaaacaagtcagattgtattattctgtctcaaactatccaagagctaattattttacttagaataagagccagaatacttacgatcacctgtgaaatctaggtgatcaggcctcagtgtctttctcacttaatgctcttttattgttacaacacaatagctttatattctttttcctctccagtctagccatactggcctttgcattttttaaatatatcaaaatttagtgcctttgtacttgattttgcttctgtctaaatcgrttttctcaaaatagctgcagggatttttccatcctgtatcagtaaagtctttcctaatcaatcttataaaatagcaacgcccttcatcccacagt

SEQ ID NO: 595933 - DNA, 589 bp, Homo sapiens
gtattcaattgaaaacaaaacaaagcatgccagctgttcaagcaaaaaagtattcgctaatgtaactaaggataagggccaactgtttgtaaacttgacccacttggtatgggcgaagagagaccactgttagcttgacctagaatccagaatcacagagctgatactatatcctagtctctttcattctgaacgttagctttgcttgctgtaggcatatggctgcaaaagtgmctatcacctctggcatagtgccatagtgttactttccttcccagggctccccatccctcaggctagactgatgtatcaaatataacatctagcttagggctgagccataattcttctagttaagaaccaattagtttttcccttttgaaaatgtgaactgcatacagagactccagctgacctttgttaagtattcaagcagaatgataatgtagagtttggatttgagttgttgtgagtgcattgcagattcacaagggactggaataaacagaagagcaagaactgcaagtagagtgctgatagggagagaaatgagcagaggatgaagactcacaaagggaaagagaaatga

SEQ ID NO: 595934 - DNA, 632 bp, Homo sapiens
tcaaactctgtgctgggaaaaacattgctctcttcaaagctgtcagacagggatgtttaagtctgcagaagtttctgctgccttttgttcagctatgccctgcccccagaggtggagtctacagaggcaagcaggcctctttgagctgtggtgggctccacccagtttgttttgtttacctagtcaagcctcagtaattgcagactcccctcctcgagcctcgctgcggcctcacaattcaatctcagactgctgtgctagcagtgagcaaggctctgtgggtgtgggacccaccgagccaggcatgggatataatctcctggtgtgccatttgctaagaccattggaaaatcgcagtattagggcrggagtgtaccaagtttccaggatccatctgtcatggcttcccttggccaggaaagggaaatcccctgaccttttgcacttcccagttgaggtaatgccccgtcctgctttggctcacattctgtgggcttcactcactgtccgacaagccccagtgagatgaacccagtacctcagttggaaatgcagaaatcacccgtcttctgcattcgtcacgctgggagctgtagactggagctgctcctatttggccatcttggaacgat

SEQ ID NO: 595935 - DNA, 467 bp, Homo sapiens
tgctgtgctagcagtgagcaaggctctgtgggtgtgggacccaccgagccaggcatgggatataatctcctggtgtgccatttgctaagaccattggaaaatcgcagtattagggcgggagtgtaccaagtttccaggatccatctgtcatggcttcccttggccaggaaagggaaatcccctgaccttttgcacttcccagttgaggtaatgccccgtcctgctttggctcacattctgtgggcttcactcactgtccgacaagccccagtgagatgaacccagtacctcagttggaaatgcagaaatcacccgtcttctgcattsgtcacgctgggagctgtagactggagctgctcctatttggccatcttggaacgatctttttgcaagttaatttttaagcaagccttcagagggccaagccttggcccctacaataccatttatatacatttttaaacatg

SEQ ID NO: 595936 - DNA, 467 bp, Homo sapiens
tgctgtgctagcagtgagcaaggctctgtgggtgtgggacccaccgagccaggcatgggatataatctcctggtgtgccatttgctaagaccattggaaaatcgcagtattagggcgggagtgtaccaagtttccaggatccatctgtcatggcttcccttggccaggaaagggaaatcccctgaccttttgcacttcccagttgaggtaatgccccgtcctgctttggctcacattctgtgggcttcactcactgtccgacaagccccagtgagatgaacccagtacctcagttggaaatgcagaaatcacccgtcttctgcattcstcacgctgggagctgtagactggagctgctcctatttggccatcttggaacgatctttttgcaagttaatttttaagcaagccttcagagggccaagccttggcccctacaataccatttatatacatttttaaacatg

SEQ ID NO: 595937 - DNA, 603 bp, Homo sapiens
aaaaattactgttgctcttcttaagtgaaataactaaaactactgcaaccatacaggtatgagtattatggaaagttgtttctgttgattattgttggtctaaaaaagagtccgatgataatgttaacagctgctatttcaacttacctagtgaacaataatatttttttcataccatttacaggtccttaaggactaactgacaggcattgtgcaatgcataaatggttcttcttgacactgtaaaaactgacaatcagagagcaagtagttaagcttgtgagtgaagtagtggtacataaatctacagatacacttcaaaagtacttgaaaatctgaagactattgagagattctgtgccaaataattaaggaaaatctgataatttgaaatagttaaaaggcaaatgtgagagcagcgttatcttgaccagaaaattggtttaatatagtccaacaaaaagaagcatcttgcatataatatagtcctatgcactcaargaatttaaatagcagataatacatgtgacatattggtatgactaaatagtgggtggggggggggaagtgaatgaatggcttggaatgttgtgaatttaaggc

SEQ ID NO: 595938 - DNA, 603 bp, Homo sapiens
aaaaattactgttgctcttcttaagtgaaataactaaaactactgcaaccatacaggtatgagtattatggaaagttgtttctgttgattattgttggtctaaaaaagagtccgatgataatgttaacagctgctatttcaacttacctagtgaacaataatatttttttcataccatttacaggtccttaaggactaactgacaggcattgtgcaatgcataaatggttcttcttgacactgtaaaaactgacaatcagagagcaagtagttaagcttgtgagtgaagtagtggtacataaatctacagatacacttcaaaagtacttgaaaatctgaagactattgagagattctgtgccaaataattaaggaaaatctgataatttgaaatagttaaaaggcaaatgtgagagcagcgttatcttgaccagaaaattggtttaatatagtccaacaaaaagaagcatcttgcatataatatagtcctatgcactcaaagaatttaaatagcagataatacatgtgacatattggtatgactaaatagtgggtkgggggggggaagtgaatgaatggcttggaatgttgtgaatttaaggc

SEQ ID NO: 595939 - DNA, 603 bp, Homo sapiens
aaaaattactgttgctcttcttaagtgaaataactaaaactactgcaaccatacaggtatgagtattatggaaagttgtttctgttgattattgttggtctaaaaaagagtccgatgataatgttaacagctgctatttcaacttacctagtgaacaataatatttttttcataccatttacaggtccttaaggactaactgacaggcattgtgcaatgcataaatggttcttcttgacactgtaaaaactgacaatcagagagcaagtagttaagcttgtgagtgaagtagtggtacataaatctacagatacacttcaaaagtacttgaaaatctgaagactattgagagattctgtgccaaataattaaggaaaatctgataatttgaaatagttaaaaggcaaatgtgagagcagcgttatcttgaccagaaaattggtttaatatagtccaacaaaaagaagcatcttgcatataatatagtcctatgcactcaaagaatttaaatagcagataatacatgtgacatattggtatgactaaatagtgggtggggrgggggaagtgaatgaatggcttggaatgttgtgaatttaaggc

SEQ ID NO: 595940 - DNA, 435 bp, Homo sapiens
gatgccttattagagagaatgagggttttctggataagaataagtaaatccagtcattttacagatgaaactgaaattcaaagaaactgtctagctttctagagtttctagataagaataaggaaatccagtcattttacagatgaggtractgcaattcacagaaactgtccagatttctaaagtttccaagcatgtaagagattgatataatcatatgcactcgataaactaattgactgtaaataggatgagaaggtatagctttaaagaaaaattcatatgaaatattaaatagtatgaaatgacaagtttcattagaaactgcattatgaagtgatttcccaataattatatgaagcatatacaacatagaggaattttagatctagaatgtaggttttaagactttctctgaaagcagcattgtcaaac

SEQ ID NO: 595941 - DNA, 563 bp, Homo sapiens
tcttctaattatcaaatgtacagaattgaaggctataataaattgtcattgaaagtagacaaatgaaacttctttcttatcatgactatactcagaatgttcattatctcttgctgctctctgacatattcaaaactaattgcatgaaacaacagcgattactgtctcacacagactacaaggctgtgttgtccaggagctgtttacttgtgtattctggctcttgtctccgatgcttttcagtcaaggtttgactacagctggaggatccacttccaaaatggctcactcccatagctgttggcaggaggcttcagggtctcactacataggcctctcttcagggctacctgcacatcttcatgatttagcagctagtttatcccagagaaagtgatctgagagasagcaagaaggaagttccactgtattttataaagtagctcccaaagtctcacactgccactttccatttattctaatcattagaagtgggttgctaaatcttatccacactcaaggggatgagaatgagaggaattaagctccgtgttttgaaggag

SEQ ID NO: 595942 - DNA, 589 bp, Homo sapiens
tactcttaatatttcatttctggccaggtgcggtggctcacaccaataatctcagcactttgggaagctgaggcaggtggatcaactgaggtcaggagttcgagaccagcctaggcaacatggtgaaaccccatctctattaaaaatacaaaaaaaaattagccaggtatggtggcaggcacctataatcccagctatttgggggctgaggcaggagaatcgcttgaacccgggaggtggaggttgcagtgagccgagattgcgccactgcactctagcctggatggcatgagtgaaactccatcttgaaaaaaaaaaatcatttctaaataaacatgtatttcatgtctaattttgtactcattttctgtttctttaatttttaatttttgtgggtacatagtaggtatatatatatttatggggcacatsagatgttatgatacaggcatgaaatgcataataatcacatcatgaaaaaatgaggtatctatcctctgaagcatttatcctttgtgttgcaaataatccagttatactcttttggttttaggtgtacaactaaattattattgagtacagtcacccc

SEQ ID NO: 595943 - DNA, 536 bp, Homo sapiens
ttgttgcccagggtggagtgcagtggcatgataayagctcactgccccctcagatattttaggctcaagcaatcctccctccgcagccacccaagtaactgggaccacaggcacatgccaccagcaggagtaattttcttttttacttttttagagatgggggtcttcctaagttgcccaggctagtccccagctcatggcctgaagcaatcctccctccttaatctcctgaatttctgggaaaataaggtcaagccactgcacctagccaaatactgtatttttcatccaagtttggttgaaaagaaaaaaatctgcatgtaagtgcaccccacacagttcaaacccatgttattcaactgtatatactcttggcaagaagctatgtgaggtatattactgacctaatgcttgggggtggagggaagaagagagacattgttatctaaatttcatagataacgttgggaaggaagctcagtgagataaaagacgcttgtcaaatgatagagattagcaagcaacacagccattac

SEQ ID NO: 595944 - DNA, 454 bp, Homo sapiens
aacgtattagtgtaaggaatatggctgaagaaggacttactagcttaaggttatatcaataaaacctccaaaactggaaaaaaaaaaaggaagcctgaaaaaacaaacagaatatccaagcactgtgggacagctacagaaggtataatgcaagtttaataggaatactagaaggataagaaaaaaagggacagaatgaatatttaaaacaatgactgagaatttacccacgttaatgtcagacatgaaactacagatccaggaagctgagaacacaaarcaagataaatgccaaagacactacacttagtcatatcattttcaaactacagaaaaatcaaaggtggagaaaaaccctgaaagaagccagcaggggaaaaacacctcacctatggagtaagaagaattacattacacttctcagaaaccatattagcaagaagagaatagatga

SEQ ID NO: 595945 - DNA, 399 bp, Homo sapiens
attcagcaatcaattaatacratccacaacgtcaacaggcttacaaaggaaaaacacatgcttatatcaatagatgcagaaaaggtatttgaaaaaatccatcacagaatcatgatgaaaaacaaaacacaacaaaaaaaccttcagtaaactaggaatagaggggagcttcctcaacttgatattttaaaatctgcaaaaatactactggtaacgtcatatttaatagtgagaaactcaaaggttttccactgtgatcaggaagaagttaaggatgtcttctctcattattccttttcaacattgtgttagacatactagctaatacagtaaggcaataatgggcaatagaaggtgtacagatcggaaggaagaaataaaactttgtttatagattgc

SEQ ID NO: 595946 - DNA, 561 bp, Homo sapiens
tctgtcaccttaatatggataaacgttaacatgattttccaagtgcttactgtattaaaatgcctggtatttattcaaaagctattatggcattattcacagtgttgcatgtgcattaattaatttaatctatacaaacatcctaaaaggaggtagcatgtaataagcactatttatatacaaggaacctgaggcacagagaaactagtcattcatggagatgggattcacactctggcagtttagtttctgacagcagttcctaaactctgaaccactacaatatactaccactcatgtagctcattattctatctttaaagaacatccatcacttttaaaacctacttttggctaagcagttttgttgaaattacattttatcaagcttctgctttttctagggcagcctgcctgaaatttaagatttaattctgtacattttttccagttttctaatttagtctcattttcacatttgcttaataacctgaggctcactctgtctctactaccaatcttggatcttactggcakcttccctatttataggtactttgc

SEQ ID NO: 595947 - DNA, 631 bp, Homo sapiens
gtagcaacaatacagatttatttcatggataaaaaaataaagtattaattgttctatttttgttgagatctaaagttagattgtttatttgaaatcttaatttttttacttgtttattggtataaactctctgggaacaccttttgctgcatgtcrtaaattatgttgtgttttcatttttgtctcaagatacttaccttttgattttttatttgatgcattgttttttaggagcatgtttaataatttccaaatattcatacattttccagtttttctcctgttatttctagtatcacatcattgtgaccaaggacaatatgtgatatgagttcattcttcttaaattttttaagacttgttttgggtctaacatatgatctatcttggaaaatgtttcacgtgcacttgagaagaatgtgtatctgttggatgggatgttctgtacatgtctgttaggtccatttgacctaaagtatacttcaatttcaatgttccttacagattttctatctcaatgctgtaacatagaacatcccccaaaaattaagaaaataattccatttaaaatagcaacagaaaagaaataaaatacttacaaataaatttaaccaaggaggtgaaaaatgtg

SEQ ID NO: 595948 - DNA, 631 bp, Homo sapiens
gtagcaacaatacagatttatttcatggataaaaaaataaagtattaattgttctatttttgttgagatctaaagttagattgtttatttgaaatcttaatttttttacttgtttattggtataaactctctgggaacaccttttgctgcatgtcataaattatgytgtgttttcatttttgtctcaagatacttaccttttgattttttatttgatgcattgttttttaggagcatgtttaataatttccaaatattcatacattttccagtttttctcctgttatttctagtatcacatcattgtgaccaaggacaatatgtgatatgagttcattcttcttaaattttttaagacttgttttgggtctaacatatgatctatcttggaaaatgtttcacgtgcacttgagaagaatgtgtatctgttggatgggatgttctgtacatgtctgttaggtccatttgacctaaagtatacttcaatttcaatgttccttacagattttctatctcaatgctgtaacatagaacatcccccaaaaattaagaaaataattccatttaaaatagcaacagaaaagaaataaaatacttacaaataaatttaaccaaggaggtgaaaaatgtg

SEQ ID NO: 595949 - DNA, 631 bp, Homo sapiens
gtagcaacaatacagatttatttcatggataaaaaaataaagtattaattgttctatttttgttgagatctaaagttagattgtttatttgaaatcttaatttttttacttgtttattggtataaactctctgggaacaccttttgctgcatgtcataaattatgttgtgttttcatttttgtctcaagatacttaccttttgattttttatttgatgcattgttttttaggagcatgtttaataatttccaaatattcatacattttccagtttttctcctgttatttctagtrtcacatcattgtgaccaaggacaatatgtgatatgagttcattcttcttaaattttttaagacttgttttgggtctaacatatgatctatcttggaaaatgtttcacgtgcacttgagaagaatgtgtatctgttggatgggatgttctgtacatgtctgttaggtccatttgacctaaagtatacttcaatttcaatgttccttacagattttctatctcaatgctgtaacatagaacatcccccaaaaattaagaaaataattccatttaaaatagcaacagaaaagaaataaaatacttacaaataaatttaaccaaggaggtgaaaaatgtg

SEQ ID NO: 595950 - DNA, 631 bp, Homo sapiens
gtagcaacaatacagatttatttcatggataaaaaaataaagtattaattgttctatttttgttgagatctaaagttagattgtttatttgaaatcttaatttttttacttgtttattggtataaactctctgggaacaccttttgctgcatgtcataaattatgttgtgttttcatttttgtctcaagatacttaccttttgattttttatttgatgcattgttttttaggagcatgtttaataatttccaaatattcatacattttccagtttttctcctgttatttctagtatcacatcattgtgaccaaggacaatatgtgatatgagttcattcttcttaaattttttaagacttsttttgggtctaacatatgatctatcttggaaaatgtttcacgtgcacttgagaagaatgtgtatctgttggatgggatgttctgtacatgtctgttaggtccatttgacctaaagtatacttcaatttcaatgttccttacagattttctatctcaatgctgtaacatagaacatcccccaaaaattaagaaaataattccatttaaaatagcaacagaaaagaaataaaatacttacaaataaatttaaccaaggaggtgaaaaatgtg

SEQ ID NO: 595951 - DNA, 475 bp, Homo sapiens
ctactacctgaacatttaattttacaattgaaattagaaaaaaacaacaaaaactccaaaatattttcatatgctttccctcatcaatatttttctcatggttataatgacttaactttcttcatttttaattgttgtattttgtttgtaatgcctttttgttgtgtgcaacagagtgtgaactcatgttttgaaagttcacagtttcacattttgtttgcattttctcttacttttctctctgccttgaatgtagtttttctttttcttttcttcttctaatagttccttggtaatggactgacctaaggaaatacagttatgtataacttacagttgttagattagttttgaagttttaggtatgaaattcattaattttagctattgtctaccatctcrtttgaaggttttaaaattaagtgaatctcagtacaaattctgccaaacatacatgtacttatgaaacaagtgt

SEQ ID NO: 595952 - DNA, 559 bp, Homo sapiens
ggctaataatgtgagatgctgtagagaatttgcctctctgggaatgacagggaatgactgggacttaaaaatcagagaggaccgggggcagcacttaatcatcataagtaaggtcagtgcaattattgtaaaaagtggtaagactagaattctagccaaattatactaacccaaagagagatatagacatgttgagagagcaagggtttttctaggaaaaacgtagacaggctaccaataagtatattgatcaatgtatacaatcaaaaaaaaaatcaaggatggatgatcacgaatctgagggcagccaccccaatgaatagacaagttttggcttagttgctggacctacttttctgacctggaaccctttggaaggcaagagtgtcaaataaaacacaaatctggacagaagttgaaaaaattaattcaacagcttattgccataaatgggggggattattattattatagattaataggracttgcagtagagagaaagcttcaaatataggaggtattagtgtctcaataggcaaaaaaaagaggttttctttt

SEQ ID NO: 595953 - DNA, 591 bp, Homo sapiens
ggagttaaggttttttaactcttacccaatatattccatgagagttaatttttccatcgcattaattctatattgggggtaggggaatactgctttgtgaaaaaaaaatccacagaattatcatcttatagtacctatgttgtatattacacatgtacacacaaatggtttttacacattaagcaccataaatttggctacaatattcagtggaagatatcttccttatagtctatttatacaagtatctgtaggttcctttggtgaaggtatcacagagactacttaaaattaccaaattgataatattacttttattggctgtgcatttatcttttggtaaacatatataatatgacactataaactttctagtatactttaccagggaactgacaagtcttttccaaatagaagttaaatttcgtacagcaaggatactaaaggcagctcaaagatgcattaattcaaaaacggtatggtttcattagggaatgagaatgttttttcagtcttttctttttctttctttctttttttttttttctttaracggagtcttgctctgtcaccagtatgaagtgcagtggc

SEQ ID NO: 595954 - DNA, 618 bp, Homo sapiens
tgcatatcttaaaatcattttgagagattggatacttgattttaaaagtaaaaagagtccaattaatacatgattataataaaacaactgagttgtatcttagttaacaatttaaatgtcattttagtgatatgagaaatattttaaattgctacccttgctctgtaaaataagaaatgcatgaaatttgtatatcatgctaaataaaatttccaaagacaggctaatgcaataatatgaaaataaaattttgatacataaattatttattgatagaaaatattccattccaaaaatacctggaatagatctttaattccctataaaccttgtggttcactataacctttgcatgaactttgtgagataattatggtctaaacagtacacaaatggaaaaatggtrtcccctcaggtatattggctgtcataacaaaatgtcttccaaacttgagttttaaaatgattgtcttaatttataccttactctgtttaaattatcgcacactccacattttaaaagaatagatctgcttctgcttcaaaatcatgaaagaggaatatgagaaataacctacctgtcaagtgttaggtgtatcttttgttcttattgacatt

SEQ ID NO: 595955 - DNA, 618 bp, Homo sapiens
tgcatatcttaaaatcattttgagagattggatacttgattttaaaagtaaaaagagtccaattaatacatgattataataaaacaactgagttgtatcttagttaacaatttaaatgtcattttagtgatatgagaaatattttaaattgctacccttgctctgtaaaataagaaatgcatgaaatttgtatatcatgctaaataaaatttccaaagacaggctaatgcaataatatgaaaataaaattttgatacataaattatttattgatagaaaatattccattccaaaaatacctggaatagatctttaattccctataaaccttgtggttcactataacctttgcatgaactttgtgagataattatggtctaaacagtacacaaatggaaaaatggtgtcccctcaggtatattggctgtcataacaaaatgtcttccaaacttgagttttaaaatgattgtcttaatttataccttactctgtttaaattatcgcacactccacattttaaaagaatagatctgcttctgcttcaaaatcatgaaagaggaatatgagaaataacctrcctgtcaagtgttaggtgtatcttttgttcttattgacatt

SEQ ID NO: 595956 - DNA, 563 bp, Homo sapiens
ggttgttctgacaataaaataagagggtatatctacagtacaaatatgaggtttattttcttttttttagatttctaaaaattttttaaatttttttatttttaattttattattattatactttaagttttagggtacatgagcacaacgtgcaggtttctttttttattatgaattgctrttcacacttggaaatgccttgtttgggggacatatatttagcctatatcttttctttgaaattttgaatattgtgctttttattaaaaaataaacacaatgaagagtgatagaatgttacgtagaccgctttacagcactacttgttcatggtcacgtattttcaatgatgactataatgaacaaacattctaactgcaggatacttcagggagtactgaagagtgtcaggtagagttggaactacatagagactgcacagagagggaggttctctcttatgaaaaacaagacagtaatattctggcaggatatgaagataaggttatgtaagacaagaggcttaaagaagagagataataagccaactgattgcatatta

SEQ ID NO: 595957 - DNA, 598 bp, Homo sapiens
agtttacagtcccaccaacagtgtaaaagtgttcctaattctccatatcctctccagcacctgttgtttcctgactttttaatgatcaccattctaactggtgtaagatggtatctcattgtggttttgatttgcatttctctgatgaccagtgatgatgagcattttttcatgtgtctgttggctgcataaacgtcttcttttcatatccttagcccattttttgatggggttgtttgattttttcttgtaaatttgtttatttgtagattctggatagtgagaccttttctttacagaaaatacaaaaatgagccaggcatggtggtgcacacctgtggtcccagctactcgggaggctgatgtgggaggatcacttgagcccaagctgagtcggcagtgagtcgcgttcatgccactgcactccagcctggtgacagatcaagatcctgcggggggcggggggggggracactaaagagttagaaaatcagattgaagaactcttaaagaaggcctgaggaagaaacaaagagatggaaatataaaagaataaatgagatttggaggaaacaagaaacgtaaaaacctgtataaa

SEQ ID NO: 595958 - DNA, 472 bp, Homo sapiens
taaacataatgtgtttctatattatacttcaccaaatgatctgcagaggctaccattgaaatgcaagtactttaggggctcatsattaagttcatgtaagaagtgtctttcagaaagcaatcattatgacttacatctaaaaatccaaatgctgtagggtactgtgattatccaaataagaaagtgggctggagtgcaactgtacccttcttggtttcagtatcaaaatggttttcggaagacatgttaatctctgatatagtttatgactttgcatacatttatcttagaaaaaataatattcttaaaggattctgttatgtataattttggtcattttatcttgaggactaatgggaatttctccatggcttcttttaagacattttattttgtgttgtgaattttgttaaaagagcaggttctgaaaagctctgacagcctcttccgcaaaagatccaagattgtcagc

SEQ ID NO: 595959 - DNA, 588 bp, Homo sapiens
aggaacaaaatctatgataaaggtggcagygtaaaaaatgtgaattatttaatgaatagtgaagaaaactgttcattcaggaaaaaaaagagaccaatactgactttaatcctaaatggattaaatatttagtgaaaaactgaaataatagaagtataaacaaacaaacaaaggtggctaatatacacttgtggtggggaaagccttttcccaacacatgcacacacacacgtgtgctcacgtacgcacacacacacacgaaaatattgaattatttatctataaaaataaaaaaaattcagcatagtaaaaagatttaaaaacccagaagaatctaaaacaaattgggaaaacattttaaacacatatttgaaaatgcatctgaaagtaaaatcagataacaatatagtcctgtgtttttaaggagaacagttctcaatcttttcacacacataacacatatagactgatagtctgtgtcttttctataatttaatccctatgtagaattttcactggctttgtgttttatggtacatagtaaagctatgctgaaatacattaaaatattagattaattcatctggc

SEQ ID NO: 595960 - DNA, 588 bp, Homo sapiens
aggaacaaaatctatgataaaggtggcagtgtaaaaaatgtgaattatttaatgaatagtgaagaaaactgttcattcaggaaaaaaaagagaccaatactgactttaatcctaaatggattaaatatttagtgaaaaactgaaataatagaagtataaacaaacaaacaaaggtggctaatatacactygtggtggggaaagccttttcccaacacatgcacacacacacgtgtgctcacgtacgcacacacacacacgaaaatattgaattatttatctataaaaataaaaaaaattcagcatagtaaaaagatttaaaaacccagaagaatctaaaacaaattgggaaaacattttaaacacatatttgaaaatgcatctgaaagtaaaatcagataacaatatagtcctgtgtttttaaggagaacagttctcaatcttttcacacacataacacatatagactgatagtctgtgtcttttctataatttaatccctatgtagaattttcactggctttgtgttttatggtacatagtaaagctatgctgaaatacattaaaatattagattaattcatctggc

SEQ ID NO: 595961 - DNA, 563 bp, Homo sapiens
tgattttcctgaagcaaatacatccagctgtaaccatgtgaaatcaataagattatctacttcgaaaatacaatgataggactggaataggatagacattcccatgccaaaagggagaaataggaaygcaaaaaggggtaactggtcccaagtaagtccaaaacccgacagcatgaacaacattaactcttaaagctggatgatattcttggttggctgtttcacatcttggacacattagtgtaggggctgggcttccaaggcctcaggcagcactgcaccttatgccttgttgggcttagtccacccagtagctgtcatgggttggaatcttgtgtctgtagcttttctacgctaatgttgcatgctgctggccctagagttctggggtctctgaggtgacctttctcccacagctccattaatcattgccctagtggggactctatgaggtggctccgctcctgtgacaagcctctgcctgggttccctgatggtacatggcatcctttgaaatctaggtaaaggtaggtatggcccccacagctttcatattctgtgag

SEQ ID NO: 595962 - DNA, 567 bp, Homo sapiens
cgctggggcactgattcttagcatggtctggaattctcagcctctttttacaggggttgtctttcagcactgtgctcattcatatcagggacttgccctggggagcagtggttgggccctattcttcccagctgccttatttctccagtcaccaggtcttcaggataccgcgttcccaaccctgaccttgacctacatcccacccttcctccagtagttggtagacaggggtttgtatcaggatgcctttgggagcattttcaaaaatacctgttcaaacctccacccctttctaaattctgactggataagtttggagtggacyttaggaatgcatattttataaaagttccatagataattctggtgcacaacttggtcttccatgctttctaaactgtgaagcaactaataggaaatcaaagagagtaatggaaactcagctgggcctgtatgttaagggggagaaggttgaaaggagaaaagtgttgtctaccacttccctccaccaactaaggcgcttcctttgtacctgtggcacatttaggcattcctaagtgtccttcc

SEQ ID NO: 595963 - DNA, 402 bp, Homo sapiens
catttaaaccatctggaacagagatctctgcaaagtgagatctttcccttccccaaacccagaaacaaggatttyttgggtggtaaaggataataagaagaattgagggagaatgaatccttaccaagggaacacattgccttcgtctctaaactgtcaaactaagatgggcatagcagcacaactttgtaatcccagctactcaggaggctgaggtgggaggatcacttgagaccagaagttcaatactaccctgggcaacatagtgagacccctctctgtaaaaaagaaagaaagtttaaaaatgtaaaaaaaaaaattaataaactatcaaacttctgattccaataaatccattaattccacttgtctcaggacatagttctaaactgaaaaatgtct

SEQ ID NO: 595964 - DNA, 476 bp, Homo sapiens
ctttattattcacatttaaaccatctggaacagagatctctgcaaagtgagatctttcccttccccaaacccagaaacaaggatttcttgggtggtaaaggataataagaagaattgagggagaatgaatccttaccaagggaacacattgccttcgtctctaaactgtcaaactaagatgggcatagcagcacaactttgtaatcccagctactcaggaggctgaggtgggaggatcacttgagaccagaagttcaatacyaccctgggcaacatagtgagacccctctctgtaaaaaagaaagaaagtttaaaaatgtaaaaaaaaaaattaataaactatcaaacttctgattccaataaatccattaattccacttgtctcaggacatagttctaaactgaaaaatgtctgtcccaggggtgtgagggaggttcatggcttagggaaatagccctttctccaatacatggta

SEQ ID NO: 595965 - DNA, 471 bp, Homo sapiens
aggcattggaatacctgtgacttcatccaaagagatatatttatttcaaagttgaagtttgcaaaacttcagcaccccatgctgccctacctttggctgctttgcccctaaatcaaacaagaatagcattctgtcttcacctcccaaggcagctatttagtatctcaaggctattactcagttttaaacaaagcatttaacattttaaacaaagcatttacttaattaaatattttatcattcaaaacactggtttgagtatgtgtttgtgtgtattttctaacattaggtctatatccagggaatgacataactatgartcaaagtcatttgtaagctaaaccctttaagactcactcattattaaggtgagcatgatttgcttctttggacttttctggcatttgaaaataaataaacacaccctggtttggtagacagtaggagtaagaggccttaaaatgacttaat

SEQ ID NO: 595966 - DNA, 578 bp, Homo sapiens
acaatctgtagccccaaggcctagacactggctagctagagtctttaaccaagcaccagcaagcaagagcttttagacttaatcctctcactttcctttccccacttaacctattggccctgtatatatcgccacaaatccccaagagcagrttttacttacctatcttttacctacctacctcccagatagttgtttgaagatgactccctgaggataactgactaggaaaattctgtatcttgaatcatctctaataacttcctcatttttgtctagttttacacatgctccagaatgcatctgagatcttttaccaaagaggttttttatttagcctttaaatcattttatttttaattttatttaattctcatttagtaagaaggcagaggactgaataacaccatttctttacatcactttcaacttcaagattttatgatcatataagaatttgtagtaaaagtattaaggccaacaaagaaaagcaactatgaaagtgaaacagaattggcttgtgaaacacaaagaaggaatttttaaatacctgaatatgttaaaactaggactttgtg

SEQ ID NO: 595967 - DNA, 415 bp, Homo sapiens
tgagtattcctttatagcaacacaaaatggactaagacaaatatgtattgatttcataattaaaaataataaagctgtttaattgggtagggggccctttttggattaaaatgcaaatactcctgggaggaaaagatggtgaaaacctgggatcgtagcttgtgaaggtaggagaagtaggaggaacctttccagggcactgagaaagaaggcttggtgtgggaagaactgcagaatgagaagactgtaagaccctaaagacagagcaagagaaaagcttcacctacttcctggcttaccctaaacctgtacttataatttcctagctaaggtaaatttttttctgacacagaagatatgttgcctagagcycgatgctatccaagattatctatctaggggcagcacagacaga

SEQ ID NO: 595968 - DNA, 418 bp, Homo sapiens
ctcactgtagaaattagtattttgcctgggsgtggtggctcacacctgtaacctcagcactttgggaggctgaggtgggcagatcatctgagcttaggagttcaagaccagcctgggcaacatggtgaaaccctgtctctatcaaaaaaaaaagaaaaaagcaaaaattatctgggcttggtggcatgtgcctataatcccagctacttgggaggatagactgagtccaggaggcggaagttgcggtgagctgaggtctagccactgcactccagcctgagagacacggtgagaccctgtcttaaaaaaaagaaattagcattttgatgaaataggtcactgtcattgagtggctggctgactagcttgctgttacactagaggatgtgagaatattgaaccagttttcactgctgct

SEQ ID NO: 595969 - DNA, 418 bp, Homo sapiens
ctcactgtagaaattagtattttgcctgggcstggtggctcacacctgtaacctcagcactttgggaggctgaggtgggcagatcatctgagcttaggagttcaagaccagcctgggcaacatggtgaaaccctgtctctatcaaaaaaaaaagaaaaaagcaaaaattatctgggcttggtggcatgtgcctataatcccagctacttgggaggatagactgagtccaggaggcggaagttgcggtgagctgaggtctagccactgcactccagcctgagagacacggtgagaccctgtcttaaaaaaaagaaattagcattttgatgaaataggtcactgtcattgagtggctggctgactagcttgctgttacactagaggatgtgagaatattgaaccagttttcactgctgct

SEQ ID NO: 595970 - DNA, 580 bp, Homo sapiens
attaggaagtcaggagcctggatattgcagacccaggaccagggtttacatggatgtggctgctgagaaggacatcaccctgtctctctgagcctcactgtctttatctgtatggtagaattatcattgtacctacctcccaggcttgttgggcttatgtatataaagtcatgacctcaagatcccctgacctctaccccattcctttaatgtcccccttgctttttctcctccctttctaaactctttattggtatggttagagaggaagartatagcagtgattgagaacatgcacattggagtgacctgcttaactatatatttggtccctgactttttcagctatgatatcttgagcacatcacttcacctcactgaagcccaatttcctcatctataaattggagatgatcatcctggaccctccttgtatgattgttgtgattgtaaagtggggcatatagtaagtgcgcgaataattatcctctgtcattatcatgaagcaaatatggggatgcactcttacttctcatttactatgtggatgatagagcaatgttctcttccaggaacctca

SEQ ID NO: 595971 - DNA, 522 bp, Homo sapiens
atgcagcagaagacaggttcttttccaaactggtccagggaaacttaagggtgaaggtggagcttgtatttctttatatccagattttctctctctctctctctctctctctctctctttctctctctctctctctctstctctctcctctctctctttaagacagggtctgtctctgttgcccacactggggtacagtggcatgatccttgacttctcaggttcaagcgatcctctcacctcagcctccaaattagctggaaccataggtgtgtgccactgtgcatagccattttttttttccgaagagacaggtctcactatgttgcccaggctgttcttgaattcctgggctccgctgaagctctcacttcggcttccccaattgctggaattacaggcatgagccaccacatccagcctggattctctgttttgctgagttggttccttttgtggatcaacacttaagcaccttacatgctctcttcttttcccttattatgtcatctcatactgaac

SEQ ID NO: 595972 - DNA, 558 bp, Homo sapiens
tggtacatagacacattcaacaaatgttaggtactggcagctcatcactgcttggcagccgataaaaagaatgagttaaatcaaatgtactgacctggaagatgtccacaacatatggttaaattaaaaaaccaaggttgcaaagcaatgtgaatactatgctcttagggaaaggcccagaaggagttcagggaagcatctgaaggtgatgggtggctgtggtagccacctatggtgaatgaagttcacagagaaaggtctggggaagagagaagagaccaggcatgtaacgtatttgcttaaatatgcttctgtatggtttgaatgtttggcaaagcatattgatacttttacaatattttttaactttaaaagcagataacgccccagagaactactctgttgttasgctgtaacagggaaatgtgttgagcttccaggctgctaaagaaattttgccccagcctgccttgaatttttgtaggtaaaacctgacactacaggaaaagtttgggacaagtttagcaagcatattctactcaagtctggtgagaaaac

SEQ ID NO: 595973 - DNA, 607 bp, Homo sapiens
gaaagaaacaaaacaaaacaaaacaaagcctgggttgccccttttcaacgatccttcctcactaatctaatcctatcggctgctactccttatggggtatcctttttatctttggtttaaactaaaccagatctcataaaaagttggctttgttttcaatcttttgcctcctttttacattttttattttttgcagagacagagtttcactatgttgcccaggctcgtcttgaactcctggtctcaaaccatcctcctgcctcagccttctaaagttctgggattacaggcataagccaccagcacccagtctccccttcctaartaataagtaataagccaagtctacatcacctattataaggagttggccccaaagacactctgtaaaatttttgtggttggtgaaggtaacccagggagaaaataatgggaaacctatccttagctgtctctttagacattaaaaaatatatttttaaaacagagcctgctgttcatttgcagaaaagcctgcccagctcccaaaattcttcaaaacacttctgttcagttccatccagatgtcttacttattactaatctaaaattaagtgcagtgttttgg

SEQ ID NO: 595974 - DNA, 573 bp, Homo sapiens
ctatggaggaataattcagggaaaagttatgggaagtttgggagcaccatattaacaggtagtcattctgaaatctggctggactgaaccctcagatggaatgaggggccaccagcagagccagtcactcagcactctgagcatcttgtgcctttgttgagaaatatgacaaatacagtcataaatttaaatcctaaaacttcaactttgcaagaagcttacctcaattctgttgagttttacaactgttgagcaccaagtgcccagtgctattgctaaataatgtaaagataaatttttaaaatatatatatatatatatataaagttttttcccctgtggaactaagaaatcccagcccattgttctaagaaacattcttcctcagaggataacatcaaggaaacaatttagaaaatttcccatattgagtttccctgagttttccagatgaagagcccataggtgctcagaacagtggargaaaataaaacaacacaaagcacatcctggtaaaatttcagaacactggggactaagagaagatccttaactcttctaggggtgggggaa

SEQ ID NO: 595975 - DNA, 638 bp, Homo sapiens
atcatgttcatagtactctcctgtcatccctcacccatcatgaccttcactgtagagaaaacctagcagggccctcttcccaggtctttggttttgcctcatcctcttccaataactggcaacatttgcccatcgtgtccaccatccttaatgtgggaattgatgaacacctcaatactaagatggaaatgactatgaatgtgttctatctcacataaattattcacattttgacaacaggctcctactaatgagacctaatattccttatgagcctttaacacgaaacaaaatgtctcagtgtcgatcagtgccttaaaactctctcctctcgaggcttctgtggtacccaagtcctcttcctatgagtgagtattctctgtgcctctctctgcacttcacctacttgctctctgtgtctttattttactctctcaatttctcatttcttctccttcaccttagacctccctatacactccagtctygcctgaaaatctttcataggagaacatttccccacctgcaggaagggtctgggattaatcttgttgttataacgcagatagctgctgtaaacccatttatttaacatacatcccctgaggtttatattggagagaagtgcagtctgcagt

SEQ ID NO: 595976 - DNA, 614 bp, Homo sapiens
tttttaaccttatatttattttttatttctaaattgtgaaatatttataacataaaatttgctcttttaaccattttaagtgtacaattcagtggccttaagcacagtggccaaagtacattcacrttgtgaatccatcaccactgccatcactagaactttttatcttgtaaaaaggaaactctatgcccattgagaaataactccccattcccctctctccccagcccctggaaacaccattctactttctgtctctataaatctgacaattttagatgcttcatagaagtggaattatatagtattaagtctcttgtgactggcttgtttcacttagcatggtgtcttcaaggttcatccacattatagtgtgtgtcagaattcccttcgttttttaaggctgaataatatgccattgtgtatacaaacctcattttttgtattcatttatctgtcagtggtcgtttggattgcttccacttttggctgctgtgaataaggctgctatgaatatgggtgtgtaagtatctgttgagtccctgttttaacatttagggtatatatacctggcagtggaattgctagatcacaagctacttctatttcaatgt

SEQ ID NO: 595977 - DNA, 614 bp, Homo sapiens
tttttaaccttatatttattttttatttctaaattgtgaaatatttataacataaaatttgctcttttaaccattttaagtgtacaattcagtggccttaagcacagtggccaaagtacattcacattgtgaatccatcaccactgccatcactagaactttttatcttgtaaaaaggaaactctatgcccattgagaaataactccccattcccctctctccccagcccctggaaacaccattctactttctgtctctataaatctgacaattttagatgcttcatagaagtggaattatatagtattaagtctcttgtgactggcttgtttcacttagcatggtgtcttcaaggttcatccacattatagtgtgtgtcagaattcccttcgttttttaaggctgaataatatgccattgtgtatacaaacctcattttttgtattcatttatctgtcagtggtygtttggattgcttccacttttggctgctgtgaataaggctgctatgaatatgggtgtgtaagtatctgttgagtccctgttttaacatttagggtatatatacctggcagtggaattgctagatcacaagctacttctatttcaatgt

SEQ ID NO: 595978 - DNA, 635 bp, Homo sapiens
gaccccgtctctaaaacaaaaattaaataaaataaaaaaaattagccagcatggtggtgcgtgcccgtagtcccagctactcaggaggctgaggcaggaagttcacttaaacccaggagactgaggttacagtgagccatgatggagccactgtactccagcatgagtgacaaagtgagagcctgtctctaaaagataaataaataaaataaaatgttccctttacagtagtccctctcttatctgcagtgacccacagtcaagtgcagctcaaaaatattaaataaaaaattccagaattaacaacttatgttttaaattgtgttctgttctgagtactatgacaaaatctcacacctttccactctgttccacccaagatgtgaatcctcccttcgtccatcatatccatgctacacgccaactagtcacttagtagctgcttccattcctccagaggcacagcttctccaccccaccacccagtcaccttacttctagccatgatttctccatctttctacatgccccgaccttcagtactaaattttgcttccaccattatgtgtctctcttctctcttacccagatcatgyaagtggaaagccccttccttctttgatggggcccaggtc

SEQ ID NO: 595979 - DNA, 614 bp, Homo sapiens
ctctgagaaatggagggcttgtactctgtcttcctggggtggaggggagaagggagacaaaatccttcttgataagtctgtggatccaaaatcagaaggccttgtgcttacttcccaaatagagccccaaataggcaactggagctcagagaagtgaatgcagtgtgattaagcaaagcagatcttagtgtcagagagcctcagagcctgagctgcctcctgggaccctgggagcagctcggcagccttcccagaatgacctagcagcagccatcaagagctgacgaccaagagtcaggcaggatagcagtcacctgaccattctccactcccattgatatctatttaaagccttggaacccagggaaaacttaggaaaagaagagaggattccagaatagatggagattaagttttcttcacgyggcaggatgagagctttaaaaaataggttgatcaatagaagaataagtgaaggtacatgccccttgcacctgagcacgtggacttagatttccactgccctcattactcttccatgtttatgagttttagggccacataacttgtctttagaatgccctctcccaccctttcaggcaaagccccccatg

SEQ ID NO: 595980 - DNA, 174 bp, Homo sapiens
cctctgctataatttaggttcaaattctggctctgtcacttactaattagccaagttgcrtaatctcactaggattcagtttcctcatcttaagttgtgtatagtaatgtctcttcattcaataaaataatgtatataaataccatagctagttccaggtaagccctcaataag

SEQ ID NO: 595981 - DNA, 603 bp, Homo sapiens
aaactgtcacttttatgggtcaaaaacagtcaaatattagcgatgtcttatggttttacatatgtcatgatggactaacttactatgttcctaagatttgactgattagagcataatttccaagtcttcgaatatttgcagaaytgtcccatataggagcttccaatagcaatttagcaacacgtttgtatcaacccagaaaacaaacagcataaaggtgtggaagcacaaattcatttattcagttacctactgagcactccctgtatgtgccaagcacagtatctgctgaaggctgcacaaaagagactctaaaagttattttggtctcctgggaggttacagtctcatgggacagatttcagcacaagaagaagaaggacttcccaatcaacatcaaaaaaatcaaatttgaatttttgaatttatcaaaaaatttgatggatataagaaatggacttctgttaacagaaaattaaaacagtgggcatttgtactgttctttactacctaatgtttatttattatcttatttgctataacaatcttaaatcaactgagtctaaagaaaacatttttctctttttttcctttttttttttt

SEQ ID NO: 595982 - DNA, 614 bp, Homo sapiens
caacagctctcattattcactaggtctgaagtattttatgatatttattcacaatactgttttaaataatatttgtcacamagaacttttgatttttattaatgtgctttttcaatatagtccataggtacatagaagtggggaaaaagaaaatgccttctttttgaaaagtacttcttaatactgattttatattcctaacagtagtataatctattgcttagggtattaggtaatggttcgagcaatatcatatttgggatgagaaaagtttttactaatatgaaacctacatgtcatttttcatctgtgttaacaacttacacagaagttggaagtcctggaagagaagcttatgaataattgagattgcttaattcctcccagtaccacaggcattccttcaagcactaaaccaaaaatcacaaaacacatacatcagatatccttcaaaaagtcaggtaagggtgcctcctaaataatataacttataactgaagatgaaaattgtctgaagaacaactacttaaaaatatatttacatacaaggacactttgctatataaaagaatactgaaataaacaatttaatagagaaacaacacatttgtaac

SEQ ID NO: 595983 - DNA, 614 bp, Homo sapiens
caacagctctcattattcactaggtctgaagtattttatgatatttattcacaatactgttttaaataatatttgtcacacagaacttttgatttttattaatgtgctttttcaatatagtccataggtacatagaagtggggaaaaagaaaatgccttctttttgaaaagtacttcttaatactgattttatattcctaacagtagtataatctattgcttagggtattaggtaatggttcgagcaatrtcatatttgggatgagaaaagtttttactaatatgaaacctacatgtcatttttcatctgtgttaacaacttacacagaagttggaagtcctggaagagaagcttatgaataattgagattgcttaattcctcccagtaccacaggcattccttcaagcactaaaccaaaaatcacaaaacacatacatcagatatccttcaaaaagtcaggtaagggtgcctcctaaataatataacttataactgaagatgaaaattgtctgaagaacaactacttaaaaatatatttacatacaaggacactttgctatataaaagaatactgaaataaacaatttaatagagaaacaacacatttgtaac

SEQ ID NO: 595984 - DNA, 570 bp, Homo sapiens
gatataggggataagaggataaaatgatcatttctactttggagaaaaaaggcctttatttttaaagtgacacttgaaataagtctctatgaaaggtcagtgatacaatgtgaaaggaaattaagaaaacaattgcatcaacattataaataaaattataaaataattaggaatacaaaaattttaaaatacttaggaataaacttaaccaaggaggtgaaagatgcatattctgaaaactatgaaacattgctaaaagaaattaaagaaaatacaaataaatgaaaagacatcctgcctgttttaatgaaccgaaggacwacatattgttaaaatgccaatactgctcaaagcaatctaatgatttaatgtaaccctatcaaaatcccaatggtattttctgcagaaatttaaaaaaaatccatcctaaaattcatattgaacctcaaggatctctgaatagcaaaacaatcttgataaagaagatcaaagttagagattttacacttctgatttcaaaagttactacaaatctacagtaatcaagacggtgtaatatatgcataaaga

SEQ ID NO: 595985 - DNA, 529 bp, Homo sapiens
agaccctgtctctacaaaacaacaacaacaacaaaaacaaaaacaaacaaacaaacaagaaaacccaaaaactaactggatgtggtggtggtgcacgcttgcagtcttagctactctggaggctgaggtgggaggattgcttgagcccaggaggctgaggttgcagacagccatggtgcaccattgccctccagcctgggcaagagagtgagaccctgtctcaaaaataaaaagcaataataaataaataaataaaactgaggaaagttgttcttgggtgataagacatgaagctgtttccaacaggagtaataactaractaaagacaggcaaaaggatgtgaggccaggcacaggagatggtcaacgtggggagcttctagagactccaatcaggtctgtgagttccagtccccactcctagctctagtcacagtcttcacttgaacaccctacctccattctaaaccttgatggctagagtttgattttattaagagagcttatcaagaggtttcttgtaatatac

SEQ ID NO: 595986 - DNA, 472 bp, Homo sapiens
atttggattggcatttatatcctggcaaatgatctacatgcacattttttaaagccgtgggattaaaaagataaagacccttactagaagactagcagttggttttttaacttagctgctctgtttcatttctttttacagtcagtgataaatggagatcatatattctccttaatggcctgttcgtgatttggcattgtgctaaggctggctggcagtggctctgaggatatgtgggggtgtccctgggcaggagaggagatactgctgaaagtcatgccccatcccttttccctctgccccagtgmtaggggctggctgggccactcagccagcacagacggcccagtgggcacaagttacaggggacttcttccagcttcctttttcctctcccttcctgcctgttcagagacgtgcaacagagtaatgagaaggaggaggcctccttgaaataatgtcacatggaatt

SEQ ID NO: 595987 - DNA, 473 bp, Homo sapiens
atttggattggcatttatatcctggcaaatgatctacatgcacattttttaaagccgtgggattaaaaagataaagacccttactagaagactagcagttggttttttaacttagctgctctgtttcatttctttttacagtcagtgataaatggagatcatatattctccttaatggcctgttcgtgatttggcattgtgctaaggctggctggcagtggctctgaggatatgtgggggtgtccctgggcaggagaggagatactgctgaaagtcatgccccatcccttttccctctgccccagtgctaggggctggctgggccactcagccagcacagacggcccagtgggcacaagttacaggggacttcttccagcttcctttttcctctcccttcctgcctgttcagagacgtgcaacagartaatgagaaggaggaggcctccttgaaataatgtcacatggaattc

SEQ ID NO: 595988 - DNA, 473 bp, Homo sapiens
atttggattggcatttatatcctggcaaatgatctacatgcacattttttaaagccgtgggattaaaaagataaagacccttactagaagactagcagttggttttttaacttagctgctctgtttcatttctttttacagtcagtgataaatggagatcatatattctccttaatggcctgttcgtgatttggcattgtgctaaggctggctggcagtggctctgaggatatgtgggggtgtccctgggcaggagaggagatactgctgaaagtcatgccccatcccttttccctctgccccagtgctaggggctggctgggccactcagccagcacagacggcccagtgggcacaagttacaggggacttcttccagcttcctttttcctctcccttcctgcctgttcagagacgtgcaacagagtaatgagaagsaggaggcctccttgaaataatgtcacatggaattc

SEQ ID NO: 595989 - DNA, 604 bp, Homo sapiens
ccagtggaatctaaaagtatcatttgaagctggacattccaagttgttgcccctcaggtgattgtattgattagaagaaktcatttttaaattaattactataaatgaatagaacttcttgaagctaagggcatcagtttgttcaccttatacgatgttggtctcttgtttttgctgctgctgttgttgttacattgtagtcagtttccaatattataaaaccagtggacttcttaggtagagaaccacttcttcttttacggtctgaagaacagaagcccagcaggatgatgtgactgccctgagtcacacagagctggggactccatcactgctctctgactccctccagaggattctggccctcagattataacactattctagaaaactgtagtacttgtttcttctcatttcaccttcctcaccttctgcctcttcttggtgaacccagtttccaagagccccaggtacccagcaccctcctagtccaccctaagggttgctacacctgctcagaaccttcttccctccaagatgttgcatttcaacctttcccctctcttcctttcaactcctagtccttcagtgcggctggtcatta

SEQ ID NO: 595990 - DNA, 604 bp, Homo sapiens
ccagtggaatctaaaagtatcatttgaagctggacattccaagttgttgcccctcaggtgattgtattgattagaagaattcatytttaaattaattactataaatgaatagaacttcttgaagctaagggcatcagtttgttcaccttatacgatgttggtctcttgtttttgctgctgctgttgttgttacattgtagtcagtttccaatattataaaaccagtggacttcttaggtagagaaccacttcttcttttacggtctgaagaacagaagcccagcaggatgatgtgactgccctgagtcacacagagctggggactccatcactgctctctgactccctccagaggattctggccctcagattataacactattctagaaaactgtagtacttgtttcttctcatttcaccttcctcaccttctgcctcttcttggtgaacccagtttccaagagccccaggtacccagcaccctcctagtccaccctaagggttgctacacctgctcagaaccttcttccctccaagatgttgcatttcaacctttcccctctcttcctttcaactcctagtccttcagtgcggctggtcatta

SEQ ID NO: 595991 - DNA, 604 bp, Homo sapiens
ccagtggaatctaaaagtatcatttgaagctggacattccaagttgttgcccctcaggtgattgtattgattagaagaattcatttttaaattaattactataaatgaatagaacttcttgaagctaagggcatcagtttgttcaccttatacgatgttggtctcttgtttttgctgctgctgttgttgttacattgtagtcagtttccaatattataaaaccagtggacttcttaggtagagaaccacttcttcttttacggtctgaagaacagaagcccagcaggatgatgtgactgccctgagtcacacagagctggggactccatcactgctctctgactccctccagaggattctggccctcagattataacactattctagaaaactgtagtacttgtttcttctcatttcaccttcctcaccttctgcctcttcttggtgaacccagtttccaagagccccaggtacccagcaccctcctagtccaccctaagggttgctacacctgctcagaaccttcttccctccaagatgttgcatttcaacctttcccckctcttcctttcaactcctagtccttcagtgcggctggtcatta

SEQ ID NO: 595992 - DNA, 568 bp, Homo sapiens
caccttttgttgatccattcatacatcaaaaggcacgggttatttccaaaaccttttgcctatcatgaataatgctgttatgaacatggatgtctaaatatctcctcgagaccctattcccagttgttcagggtatatacctataggtggtattgccagatcatagggtacttctatttttcattttttgaggagccatccctactgttttccatagcagctgcaccattttacatttctaccaacagtgcccaagggttccagtttctccacatcctctccaacatttgttattttctattttgctttattaaattgatgaccatcccaatgggtgtgaggtgtatctcattgtggttttgatttgcgtttccctgtagactagtgatgttgagcatatgtccrcatgctgttggccatttgtgtatcttctttacaaaaatgtttgttcaagagatgattcctaattgagagcgacagccccttgtcctgtatccaattgctccataagcttgtagtgtctccttttgtgggatgacccaaaatgcctacacccctttacagcaca

SEQ ID NO: 595993 - DNA, 490 bp, Homo sapiens
aattccagtctccccaagaggctgtgagagagggctgagcatcaggatacagcagattgatgcgatcatctagggaacccccygccgcgtttacacacacacacacacacacacacacacacgtacacacacacactcacacccaggtgctggttgaggagaggagaagagaccatccccatctccccagcctaatgggtccacgctgccagttgcctggcaacaccccttctttgcgcccctgcccccctcccccttcttcctggaccacctccatgtctgtgctccttgtccctttgatgccaattttaacctgttgtaaaatgtattcattgaaaccatttgaaattgccaatatttggcagactttgtcctgctaaggggacaatttcatgtggctcaaacgtaaagggagagagaaaaaaagggagagaagacttagccctccagaacattgcaggtggttgtttcttttactactgagttattt

SEQ ID NO: 595994 - DNA, 517 bp, Homo sapiens
tgtgctcatgtctgcaggccgggttttattttagggaagacgggactaatttgtgtccagagaccggtttcttaggagaactggttaggctgcctggctgcttgtttttttggtttggtttkgttttgttttgttgttggtggtggtttttgttttgttttgttgttgttgttgttttctgagatggagtcttactctgttgcccaggctggagtgcaagggtacaatctcagcccactgcaacctccacctcccaagttcaagcgattctcctgcctcagcctcccaagtagctggaattacagtcacccaccaccgtgcccagctaatttttatatttttagtagagacagggtttcgccatgttggccaggctggttttgtactcctgatctcaggtgatccacccacctcccccgtggcctcccaaagtcctgggattacaggcgtgagccactgcgcctggcctgcttggtgtttttcaaatcagcttacacattcccaaggaggaggacat

SEQ ID NO: 595995 - DNA, 645 bp, Homo sapiens
aaatatcattccatctccatttaaaaaaggtagatttccttatggtgaaaggatctgttatatggtcaacctacaggaacaagttaggctagtcaggactacagggttattttgtctcagtaaatgtgaattacaattgcaagtaaaatttctttttatgaaagccaaaataagacaagccattcatcttctcaaaaccatctaatcattatacaatgcaaatagcaaaatacatgggagtattttacatcacaagaaattatttttaatatatttctttgtgattaattcctgcttttaagattatatttgtgcattaaaaattatccaagttcagcaataatgacaagaaataataaataaaatcaggacgcagttttgtctgcattttacttaattatgagtaatatttaataataaactcaggaagtaatttttgtctgttttaattatgagtaactattttatatatacaaagagtaggtagttaataaaaacacaaaatggacaggtgcagtggctcacacctataatcccagcactttgggaggcagaggtgggcggatcacgaggtcaggagatcaagaccatcctggctaacacagtaaaaccccrtctctactaaaatacaaaaaataaaaaatc

SEQ ID NO: 595996 - DNA, 641 bp, Homo sapiens
catcagaacagtggcagagttacatgtgctggcttttgcatgccagcagccacagtgcagtggcacagtgtggtgtctgcacatcagcttgggcacaatggtggtaaaagtcggttggcagtgtccatgtgtgcatttgcacagatggtggcatggtgggatgccttcatgccaacaggggcattgcaatggcattcatgcacacttaccccagtagtggcagtgtggcagactgcacatcattgggagcagggctgtggaatgtgctcatgttgcatgcacacatgtgtgccagcaggggaggggaggcgaggtctacttgcacttgcatgccctggaaaaacagtgggaaggctgtaggtgagtgcctgctagcagagcaggagcgsgaggttgctgtgtggagaggctgtatgcaggctagtctgctagggctctcggatggtcaggttcagtctgctggtgagggagctatgatgagggcctccaggaagcaccctggttgggcatccaaggctacattaaaagtgggcatggccaggctggagctccagtacaggccagcagacagtcaggtactcagatcagactggccccatcccacaagtaagaccaccctgctttcttcagttctgacagtc

SEQ ID NO: 595997 - DNA, 620 bp, Homo sapiens
ttgagacaaggttttcatttaattttcaaaatcggttacaaatatatttatatgtgaaagatactcaatatagatgtgttgaaggaatggaaactagatttctaaaaccctccacattccaaaatgactcaaaaccagagaaaactggaaacaaatagagttgtcaagaactgaggaccctaagatgtacaatttgtggtctgtttgcttcgtggtgaaaaagggagagctttgattggcaggcaataaaagggtaattttggcccatgtgagaagcatggggaaagtgaaaagaacagagattagcaaaggattcttcagagttgatttgtggcagttagccttggcagtcagaagcacttaaataacagagaggattggtgttccaaacccccaacctccaccctgaaaatacttcatccctattctatactatgttagttaattttactatattaagacatagtagctaaaaartagttttctggtgctcaatcatagtggctactattacatttagtgagcacaagttgtgtaccaggcacttattttcagtacatgcattattaattctttggatcttcacaacaacccagtgagatagttactgttattagccc

SEQ ID NO: 595998 - DNA, 620 bp, Homo sapiens
ttgagacaaggttttcatttaattttcaaaatcggttacaaatatatttatatgtgaaagatactcaatatagatgtgttgaaggaatggaaactagatttctaaaaccctccacattccaaaatgactcaaaaccagagaaaactggaaacaaatagagttgtcaagaactgaggaccctaagatgtacaatttgtggtctgtttgcttcgtggtgaaaaagggagagctttgattggcaggcaataaaagggtaattttggcccatgtgagaagcatggggaaagtgaaaagaacagagattagcaaaggattcttcagagttgatttgtggcagttagccttggcagtcagaagcacttaaataacagagaggattggtgttccaaacccccaacctccaccctgaaaatacttcatccctattctatactatgttagttaattttactatattaagacatagtagctaaaaaatagttttctggtgctcaatcrtagtggctactattacatttagtgagcacaagttgtgtaccaggcacttattttcagtacatgcattattaattctttggatcttcacaacaacccagtgagatagttactgttattagccc

SEQ ID NO: 595999 - DNA, 582 bp, Homo sapiens
aggagacaaagaaacaaattaaatatagtatattaaatgtggtaagtgctgtggagaaaaattaggcaagaaagtggtactaggcctgatttcaaactacattataaggccacagtgacmaaaacagtgtggtactggcacaaaaaaaggcacatagaccaatggaacagaatggagagcccagaaataaacccaaattcttacattcaactgatcttcaagaaagcaaacaaaaagataaagtggggaaaggacatccttttcaacaaatggtgctgggatgattggctagccacatgtaggagaatgaaactagatcctcatctctcaccttaaacaaaaatcaactcaagatggattaagggcttaaacctaagacctgaaactactgaaattctagaagaaacattggaaaaacccttctagacattggcttaggcaaggatttcatggccaaggacccaaaagcaaatgcaataaaaacaaagataaatagctgagacctaattaaactaaagatcatttttgcatggcaaaaggaacagtcagcagagtaaacagataacctacagagtgggagaa

SEQ ID NO: 596000 - DNA, 576 bp, Homo sapiens
aaaggaggatagaaaagtagcttattatatatatatgccttttcatttgaatccatctgccatttgcacaatggaaagataatcaagagagggtctctcttcttctcatccttgtttttctttcttygtttaccttaacccttcatcaaaatatcagtaatcttatttgctttgtaacttaccttcagacttaaaatcagttctacagctggtggccagaaatatcaggaaatatctatcttattaagtttaaatttatcaaaagacaaaggtatttttgaagaggagataaggttttttttttctattttttagagacatttaactttcagtttggaggaaagtcagaaaaagaacctaatactttcttatttttaattatactgtgaacaaagggttggacaattttctagaagttacttgcaaatcaaagaatatttataatttcttatttttaattatactgtgaacaaagggttggacaattttctagaagttacttgcaaatcaaagaacatttataatttcccttattaaggaattagtttattcattcattttcattcaaaaggctac

SEQ ID NO: 596001 - DNA, 641 bp, Homo sapiens
gtggcactgcttttagccagttttgtgggggtggtggcaatgctatctcaatattcttcttgcttagcatcccacctaggttaccagggagcttgccatgaaggccacttgctggacagtagctccaggtttcccatccatgactccagaggcaataagagtcaaacaaataggcatgtggtttctcagytgctgtttaatgaagctccaataatcttttacatatgatctgtttggaccagtagtggtcaccacttcccattacctaagaactatatatagctttccttctttcatgcttaccctgtacactatacaaagaggcaatgtggtagagtaataaaaagtatgggctctagagcaagattgacttcacagcttgctctgctacctagcaggctcatgcctcaatttcctcacttgtaaaaatagaaattaacatagaacttatttcatacatctttgaaactattaaatgagttaatgctagacacttagaatagtacctggcatattattagcactatataaattttatttagctattatttttactctcacctacattatcatcaccatgactgtgcatttattaatttttttctgataattctgctcactgatcccataatttcatatat

SEQ ID NO: 596002 - DNA, 669 bp, Homo sapiens
cagctctattgttctgtccaactgtctttggcctaggtgagaggatatttaacttagatttaactggtcttcagatgtgtctacttgaacttccatgtcacaaatggagcagaaagcaagatatgcacagagcagaaaagacaagtcaatatctgacctccaaaatcaattcagggaaacattttcagtacttaactctgtattgttcaagttcctgtgcaaagaaaataaactaggccttctcctggctctgtaggaggtcataatgcatagagttctagtctctagaataaatctatctattgaagaacaaggtgattgtaatacattagtagttctccccttatatccagggttttgttttttatagtttcaactactcatggtcaaccagagtctggaaacaggwgattacagtacaataatgtattttgagagggagaaacagaccacattcacataacttttattacagtatattaattgttctattttattattagttatttttgttaatatcttaacaggcctaattcgtaaattaaattttatcatagtttatgtatgtatagaaaaagacatcgcatatatagagtttggtactatccacggattcaagaattcactagggattttggactgtttccccacagataaggggagactact

SEQ ID NO: 596003 - DNA, 600 bp, Homo sapiens
atatttactggtgtattaatcaggtccaaccagagaaacagaactagaaggagatatatttattacaaggaactggctagtacaattgcagggactggccaagtaagttcaaagtccataggcagaagacaagctggctggaaccacacaaggcatgaactgaagcttcctgttcacaggtaatggtcagaaagaaagatccacagagaagggagaacaactacagacccagcagctatctggagtccttgacttaggaaaagcctaagtcctcttctaaaagctttccaaataattcagattcaccctgaataatcttcttcttcattaacttaaagtctgattagaaactttaatcacatctgcaaaatatcttcacagcagtgtctagattcrtattttaataactggaagaagttatatgtacgttacaaaatgaccattgcctctctattttctcatgagagaataacctttgtaacctgccctagccagacacatatagggaatcctggggactatagttcagcccagtcaaactaacaagtcaaaaatctatcacactaagcatctagtatataggaaatagagaacgttttt

SEQ ID NO: 596004 - DNA, 600 bp, Homo sapiens
atatttactggtgtattaatcaggtccaaccagagaaacagaactagaaggagatatatttattacaaggaactggctagtacaattgcagggactggccaagtaagttcaaagtccataggcagaagacaagctggctggaaccacacaaggcatgaactgaagcttcctgttcacaggtaatggtcagaaagaaagatccacagagaagggagaacaactacagacccagcagctatctggagtccttgacttaggaaaagcctaagtcctcttctaaaagctttccaaataattcagattcaccctgaataatcttcttcttcattaacttaaagtctgattagaaactttaatcacatctgcaaaatatcttcacagcagtgtctagattcgtattttaataactggaagaagttatatgtacgttacaaaatgaccattgcctctctattttctcatgagagaataacctttgtaacctgccctagccagacacatatagggaatcctggggactatagttcagccyagtcaaactaacaagtcaaaaatctatcacactaagcatctagtatataggaaatagagaacgttttt

SEQ ID NO: 596005 - DNA, 551 bp, Homo sapiens
tcatacctaatcactttcagcaaatatccagggctatataactatcagctatcagtaggatgtggcagcccttttctaatatatccagcacttttagacagtctcttttgagaggcttaattccctgtgataaataaaattattttcatctcaaaatctgagaaacatstgatgtgtatctaattttggttcacaaacacagtgatcaactaacatctctaatctaaatgctgagcattttactttttcctgtgtgtttacttgtttgcctgtttgtttacatatttctttcattcttttcttcctccctaggagtgaaaattggcagctcactaaaactgagaagtcaaagccattaaatgcaacaacaacaacaaaaaggaacaattattcacactaaacaaaaagagttttctctgagagctacattgaacagtgtataatgttaacttttgattgttttcttttcttttcctttttctttttttttcttttactgtcaacttccaggcaagccattagaggaagaaggaggggaatgaaggcaaaag

SEQ ID NO: 596006 - DNA, 586 bp, Homo sapiens
tgggtattgacttagggttgagtttggggtttgtttcttcaatttgcagcaatgtggcttttgagaagtggtagtagtaatggagccaataatgtcccaacaaggcaagttctgagcagcatcactgcaactcaggtattgaggatttagtggcatcttcttgttaaaggtgctaaagactacagcacacagtatctgtgagcttcccatcaacctgccatgagacagaaagtgtttcagaaaattgaagttcagaccttatgctaagcgatttgagtcactgactaccaactacattgtttgtatcaacaaattctctcaacaggctggtggccagggaagcacctgctaccaccacagatgtcactgcaatgaagcattctgctcaacaattacatatccaagacccagaatgaagctctcctgcaaaagtgacattttaattagacttgattctctttgagaaataatgcagtaagctaaattctccctttgccacctaccyttaaagtcatcactctaagccaaaacaacttttaaaaaaagaaaacaaaattagagggctaacattctgatttcaagattt

SEQ ID NO: 596007 - DNA, 512 bp, Homo sapiens
acaaatagaaatatatcccatgcccatggatgggtagaatcaatattgtgaaaatggccatactgctaaaagcaatctaaaaaatcaaagcaattcccatcaaaatactatcaccattcttcacagaactagaaaaaaaamcccctaaaattcacatggaaccaaaaaagagcctgcatagccaaagaaagattaagcaaaaagaaccaatctggaggccatagtcaccaaaacagctgatcctggtgtaaaaataggcatgaagaccaatggaacagaatggagaacccagaaatgaagccaaatacttatagccaactgatctttgataaagcaaagaaaaacataaactggggaagggacaccctattcaacaacaaatggtgctacaataattaacaagctacatgtggaaaaatgaaactggatcctcatccctcaccttatacaaaaattgactcaaaatgaatcaaggacttaaatcgaagacctgaaaccataaaaattctaga

SEQ ID NO: 596008 - DNA, 669 bp, Homo sapiens
gtagctagaaagatcaaaacccagggcaaaggctaaagaagctgtactgaagatacattctaaatatgtcagtatcctgtgttctctagtgaaatgtcaactcctgaatagtgtagcccggccttagatattgtagcaataatatgaaaagcagacttctcaagacagcagccctcaattcccacttaatagtaaataacgtttttcttttgcttcaatggcagatataaagattttcaatttctttaaatctcaagttctttcaataaatgctcttatcattttcccatttcaaatatcttttctcatttctcgctctttgaaacacaactcattttttttaaaaaaaagaattcatcggcataaaataatccaaaaaaagcaaatcacaagaatgcatattcacttcatattacagctttctccaacctgctgatgctaatattgctgactcaataaacattttgcatgttgtatagaatatatttcacaaccttaaaaatctagatgtaaagttatcatcccaaatgaagygtggtttttttctctttctttctggtgtcaaagtaggtagttctcatttcaaatgagctgtgttccagaatttaatttttaaattggctttatacttctctttcccacagaaagagtattaaaaatactgcatgt

SEQ ID NO: 596009 - DNA, 603 bp, Homo sapiens
tatcattttcccatttcaaatatcttttctcatttctcgctctttgaaacacaactcattttttttaaaaaaaagaattcatcggcataaaataatccaaaaaaagcaaatcacaagaatgcatattcacttcatattacagctttctccaacctgctgatgctaatattgctgactcaataaacattttgcatgttgtatagaatatatttcacaaccttaaaaatctagatgtaaagttatcatcccaaatgaagtgtggtttttttctctttctttctggtgtcaaagtaggtagttctcatttcaaatgagctgtgttccagaatttaatttttaaattggctttatacttctctttcccacagaaagagtattaaaaatactgcatgtgttctcaacctaaaccacaaataacttgttcaattaatagtgtgcctacatcrgagtatttttgaggggtaacggaacataacaaagtgaattctttagagtcagaaccagattggaatcctggctctgccacttcccagttaagcaaatcatttaaagtcagtgatcttcagtttcctccagtgaaaaatagaaatcatagcatttatt

SEQ ID NO: 596010 - DNA, 504 bp, Homo sapiens
aagtgagtgaagccccagtatgtgagagaggcagagtctccctcatgactcacctttacagtggggatccaagcaacccaagccaaaagagagcactttgtttctcccaagccctggagctaacttgggaagaggcttggagatgctgtgagggaaagaaactgggaaaagctgcagacatttttgcagacccagtacttatagcrtaatgccatttttaatccaagtgcatgcaaagtcagccattccatggctacccagcagcacggccatgcaagcattttagtctcaggccagaggttggagtacctgctcttgagtggggtaagggcctccacaaccagaactgtagaaagtgcctcagaagtaggtgctagagttgtgctctcccagttgcaagcctggggtgggaggagagctgctacagctgcagtttctcctagacagcaagacttgcagccagagccagcttgatgaactggaactcatttgagttctagttcg

SEQ ID NO: 596011 - DNA, 622 bp, Homo sapiens
tttttaatccaagtgcatgcaaagtcagccattccatggctacccagcagcacggccatgcaagcattttagtctcaggccagaggttggagtacctgctcttgagtggggtaagggcctccacaaccagaactgtagaaagtgcctcagaagtaggtgctagagttgtgctctcccagttgcaagcctggggtgggaggagagctgctacagctgcagtttctcctagacagcaagacttgcagccagagccagcttgatgaactggaactcatttgagttctagttcggtgggtgaaatggactgcaactcagatcagtttggtgtcccaccgccacaccctgctcccctgagattatgatgyaatgaggccctctctgctccatacttacgtagatctccaggcatttggagcacccattctcctggattaggagttgagggcacccctgaatccctgtgagcttggagctgaggaggtttccagctcatgtctagtcactctctgggcacttggtggctgcctactggattctccctaagtgctggtgcctgtgcctgccatcgggggacctatgggtggacctttgtggtccctgcccctctggagctgagcaggga

SEQ ID NO: 596012 - DNA, 393 bp, Homo sapiens
agtttcaagtcagatccacagagcaaatttcgcattttcatcaccaagaagagagctaaacagatatattagttatttgcctgtgggaacatacaccctttcttgtgggcagggagcctgggaaatcccctcgtatttcaaaaattcaattgtcaaaaaacaaaagccaattttgagtaatctttgagattttactataattctgtgtcaaagcagagtattgaggaaaagtttagtttgctatattagcctaagatattgagcttaaattaaatatccagaataatrgatccagaaaagctattcttattttagagagtttttggcgtattacttttttttttaaagaaatgttgtattcagttgctaatgcccaggataaaaattagatct

SEQ ID NO: 596013 - DNA, 549 bp, Homo sapiens
tgaggctttgtcactgctatatcacccccacctggtggcccgccattcctgaaacaagctgcttctacaccttatcctgtgggggcaagttgctgtgccctacccctcttagttgctgctgcactctcccctcaggcagaaattaaacaacatgctctggaacaatcaatgagttaaagaagaatttttttaaaaaagaaaaatatcttgaaaccaacaatagaaatacaacataacaaaacctacgagatgcagcaaattaagttataagaggaaagttgatagcaataaatacccacattaaagaagaaagatcccaaataaatttcctaactttatcctcaaggaacaagcaaacaagagacaaacttaactgaaagttagtaaaagacaaaaaataaggtaagagsagatatatatatcaaataaaccatctgatcttcaacaaacctgacagaaagaagcaatggggagacaatagatgttggcaaggctgtggagaaataggaatgcttttactctgctggtgggaatgtaaattagttcaac

SEQ ID NO: 596014 - DNA, 617 bp, Homo sapiens
ttcagtcttggttggtgtcatttctcacaggccaattacctacagtctgggtggactagagaatagagattaacatcagtcaaatcccgtggttaaagcgttaactagaatgtccattcatttctcaagaagtgtggcagagagcaaaggagtgtacctatcagctgttcctaagaaagtaaacactcccaacatgcactgaggcacagggagtggctcaggtttcttgacacttccctgctgtggcgaaaaggagaaataattaacagctcctggggctcyaggatcgctgatcgcgtcgggggcactgcaagcgcccagctgagccatgctctgggaggagacaggcgccgccctgcgccgcgcgggcctcggacctcccctacaggtgagtgactcgcggagtcccagcccggcagagacagggcactggtttccctctaccagagttcctgacccagccgagaacaaaccgcgaagcaagttcagccgaacaacgatggtgaaaagggtcctcctgctcacagtgtgaataacaggtaaaaaatggggatggggaaaaaaactttctaatccactccctggggtcatgttgagggcaagttattagaaagcag

SEQ ID NO: 596015 - DNA, 630 bp, Homo sapiens
cagtcttggttggtgtcatttctcacaggccaattacctacagtctgggtggactagagaatagagattaacatcagtcaaatcccgtggttaaagcgttaactagaatgtccattcatttctcaagaagtgtggcagagagcaaaggagtgtacctatcagctgttcctaagaaagtaaacactcccaacatgcactgaggcacagggagtggctcaggtttcttgacacttccctgctgtggcgaaaaggagaaataattaacagctcctggggctctaggatcgctgatcgcgtcrggggcactgcaagcgcccagctgagccatgctctgggaggagacaggcgccgcccctgcgcccgcgcgggcctcggacctcccctacaggtgagtgactcgcggagtcccagcccggcagagacagggcactggtttccctctaccagagttcctgacccagccgagaacaaaccgcgaagcaagttcagcccaacaacgatggtgaaaagggtcctcctgctcacagtgtgaataacaggtaaaaaatggggatggggaaaaaaactttctaatccactccctggggtcatgttgagggcaagttattagaaagcagaatccataggcag

SEQ ID NO: 596016 - DNA, 617 bp, Homo sapiens
ttcagtcttggttggtgtcatttctcacaggccaattacctacagtctgggtggactagagaatagagattaacatcagtcaaatcccgtggttaaagcgttaactagaatgtccattcatttctcaagaagtgtggcagagagcaaaggagtgtacctatcagctgttcctaagaaagtaaacactcccaacatgcactgaggcacagggagtggctcaggtttcttgacacttccctgctgtggcgaaaaggagaaataattaacagctcctggggctccaggatcgctgatcgcgtcgggggcactgcaagcgcccagctgagccatgctctgggaggagacaggcgccgccctgcgccgcgcgggcctcggacctcccctacaggtgagtgactcgcggagtcccagcccggcagagacagggcactggtttccctctaccagagttcctgacccagccgagaacaaaccgcgaagcaagttcagccsaacaacgatggtgaaaagggtcctcctgctcacagtgtgaataacaggtaaaaaatggggatggggaaaaaaactttctaatccactccctggggtcatgttgagggcaagttattagaaagcag

SEQ ID NO: 596017 - DNA, 630 bp, Homo sapiens
cagtcttggttggtgtcatttctcacaggccaattacctacagtctgggtggactagagaatagagattaacatcagtcaaatcccgtggttaaagcgttaactagaatgtccattcatttctcaagaagtgtggcagagagcaaaggagtgtacctatcagctgttcctaagaaagtaaacactcccaacatgcactgaggcacagggagtggctcaggtttcttgacacttccctgctgtggcgaaaaggagaaataattaacagctcctggggctctaggatcgctgatcgcgtcgggggcactgcaagcgcccagctgagccatgctctgggaggagacaggcgccgcccctgcgcccgcgcgggcctcggacctcccctacaggtgagtgactcgcggagtcccagcccggcagagacagggcactggtttccctctaccagagttcctgacccagccgagaacaaaccgcgaagcaagttcagcccaacaacgatggtgaaaagggtcctcctgctcacagtgtgaataacaggtaaaaaatggggatggggraaaaaactttctaatccactccctggggtcatgttgagggcaagttattagaaagcagaatccataggcag

SEQ ID NO: 596018 - DNA, 563 bp, Homo sapiens
cactgtgtatgtcttcttttgagaagtatttcttcatgtcccatgccccccttttttaatggagttgttttttcttgtaaatttgtttaagttctttatagatactggatattacacctttgttggatgcatagattgtaaatattttctcccattctgtaggttgtctgtttatgctgttgatagtttcttttgctgtgcagaagccatttagtttaattaattagtttagctctatttgtcaatttttcctttcttataattgcttttaacgtctttatcatgaaatctttgcctgttcttacgtccagaatggtatcgcctaggttgttttccagggtttttatagmttcaggttttatatttgtctttaatccttcttgagttgatttttctatatggcgtttgaaaatagtccagtttcaatcttctgtatatagctagccagtttcccagcaacatttattgaatagggagtcctttctccattgctcatttttggaagctttttcaaagatcagatggttataggtgtatggtcttatttctggaggctatattct

SEQ ID NO: 596019 - DNA, 551 bp, Homo sapiens
tgggagtatagacataaatatggtggattttgacactgccttcatggaactgtctgcttttgaagaagaaaaagccatgcctttcatctgtgttcctccatatgatggcataaagtggttttgcacaacttgtgcttgtagaatcgaacaaaagaaaatagcaaatacggttaagaagaaaacaacacacgtgctgttggcagctggatccactaggcctaacatagtcccagagtgtgagatctgggrtcttttctgtcttctctttttcaatttcttgtaattaaaaaatgataataatatccagaaaggtagtgagagattctacctccctctctggaagacataaaaaaggcagggaaatgttccaattttaagccattaaacactctggcttgaatcaaatcaaaaacattatctaaactgtcatacactaaatacccttgactctactagggctatttatcactgaaaagcactggattagtggtgtgtttctttgcttcctaaggattattgatgataagagcatacaagacagccagtgtaga

SEQ ID NO: 596020 - DNA, 551 bp, Homo sapiens
tgggagtatagacataaatatggtggattttgacactgccttcatggaactgtctgcttttgaagaagaaaaagccatgcctttcatctgtgttcctccatatgatggcataaagtggttttgcacaacttgtgcttgtagaatcgaacaaaagaaaatagcaaatacggttaagaagaaaacaacacacgtgctgttggcagctggatccactaggcytaacatagtcccagagtgtgagatctggggtcttttctgtcttctctttttcaatttcttgtaattaaaaaatgataataatatccagaaaggtagtgagagattctacctccctctctggaagacataaaaaaggcagggaaatgttccaattttaagccattaaacactctggcttgaatcaaatcaaaaacattatctaaactgtcatacactaaatacccttgactctactagggctatttatcactgaaaagcactggattagtggtgtgtttctttgcttcctaaggattattgatgataagagcatacaagacagccagtgtaga

SEQ ID NO: 596021 - DNA, 600 bp, Homo sapiens
cagaactatgggatatttcatttcagtctttaatgggctccttggtttctatcaccttacttcctagacacttctaaggtcccaggaaacgtgtacaaaacaaacaaacaaacaaacaaaatcacaaaaaacatttggagaatgtccccgttgtcttgctattcytaaaagacacattttccaaacccacagtgtccattgaattgcagagctgcatgtttggagcaccgaaagccaaagcatggaacacagatcaggagaccacagttggagttcagaaatttttgccaagttgaaaactccaatcttgggtctaactttcctatgtataaaatacaaccattttcccagaatcctgtcacctctctagggacctgacaggagaggtccatggtcctcattctgagtagaaagtcatatgtttatgtacttcttttctttttttcttttttccttcttttctgaaatggagtctcgctctgtcgcccaagctggagtgcaatggtgcgatctcagctcactgcaacctccgcctcctgggttcaagcgagtctcctgcttcagcctcctgagtagctgggattataggcgtgagccacc

SEQ ID NO: 596022 - DNA, 454 bp, Homo sapiens
aatttgatagacaaatagaatatggtcacttccctacccatactgtaagtaaaaaaacaccactgacgttattcaaatgtacacctgtccagtttgtgctctttatgttattctgtcatgacttgtccaaaatatgcaaaagctgagttttgaaagatattaaaaacagatgtgaaaaatagcataagcawacacaaccttaacaaggctgttcttctcttttgttatgaaagatttccaaaacacttgtgccagatatgagagatcaaagtactgcccatagaattgtttccataaagaataacaagtggtcagagctcaaaaaaactgattttttaaaagcttcttcactccaattaagctgatacttcctctgtgtgactcatttcaaacataattaaactaatgtgacaagaccaatgattccgtcaaagagagaactgaaagacacaag

SEQ ID NO: 596023 - DNA, 398 bp, Homo sapiens
atttttgtataaagtgagatataagggcccagatcattcttctacatgtggytatccagttttccctgcaccatttattaaataaggtgtcctttccagaattatgtttttgtatgctttgttgaagatcagttgcttagaagtatttgactttatttctgggttttctgttctgttccattagtctgtgtgtccacatttataccaataccatgctgtattggtaattatagccttgtagtataaattgaaggcaggtaatatgatgcctccagattatttcattttgcttaggagtgctctggctattcaggctctttcttggttccatataaattttaggattgttttttccacctctgtaaaaaaaaaaatgtgtcggtatcttgataggaatt

SEQ ID NO: 596024 - DNA, 408 bp, Homo sapiens
tctagaacaaatggacctaacagatatttacagaacattctacccaagaactgcagaatatacattcttctcatcagcacatggaatattctccaagatagaacatatgataggccacaaaacaaatctcaataaattaaaataaattgaaatcatcaagtgtcktctcagaccacagtggaataaaactagaaatccactacaaaaggaactcctaaaactatacaaatagatggaaattaaataatctgctcctgaatttttgggttaacaataaaatcaagatagaaatttaaaaattctttgaaataaataacacaagttataaaaacttctgggatacagcaaatggaatgttaatggtaaagtttatagtgctacgcacctacattaaaaagtctgaaagag

SEQ ID NO: 596025 - DNA, 593 bp, Homo sapiens
actctcaaatgatcttttgtatttctgtattggcatttgtaatgtctccatttttatttctaattgagcttctttgaatcttctctctctttttcttggttattctggctaacgatctatcaattttatttactattacaaataatcagttttttatttcgttgaacttttgtwttttttctttcaattttatttagttctcctctgatcttcattatttcttttcttctgctagctttaggtttggtttattcctgtttctctagattctaggttgtcaatttgtgctctttcagactttttaatgtaggtgcgtagcactataaactttaccattaacattccatttgctgtatcccagaagtttttataacttgtgttatttatttcaaagaatttttaaatttctatcttgattttattgttaacccaaaaattcaggagcagattatttaatttccatctatttgtatagttttaggagttccttttgtagtggatttctagttttattccactgtggtctgagacgacacttgatgatttcaatttattttaatttattgagatttgttttgtggcctatcatatgt

SEQ ID NO: 596026 - DNA, 539 bp, Homo sapiens
atgcagccccatgaccccctgtagtttaatgcagggactaaggaattatcaagatgtgaatggaacattcaggcagatgagttcaccaggctatctagaaacyaggcgtggaaatggaaataatgatttcaagtcgcctgaacagaacatactttctgactcaagcaggaactcaataaaataccttgcaaatctcctctgagggggtattctatcaaggatcattcaggagactaaaacttgggaatgctcccagaatgttagtcacttgcatccaaacccaagagggaaggatcaagtcaacatgatcttcttcctcttctcgttttattctctttgggatctctcaagctaagaaattacactgcacatttcttgtgacctccagcagagcttgaggaagagaagaatatctaaataactgttagatttattcatattttgaaagttttatcaagcttcctgaacttgaccagttaagctagactgacaaaaccaaggttggaattttttataaaggagggatggagagatgcagg

SEQ ID NO: 596027 - DNA, 425 bp, Homo sapiens
ataccttacttatccgtaataacattgaatgtaaatagactaaactctccaatcaaaagacatagagtggatgaatggatagaaaagtacgacccaatgatttgttgtctgcaacaaacacaaactataaagatacaaatagactgaaaacaaaaggatggaaaaagatattccacatcaatgaaaaccaaaaaagaggagtagctatacatacatatatatgtataaatatatatgaaatatatatakagagagaaatccactttttttttgatttgggtcttctttctttttttcttagtctgtctaatgattcgttaattgtgtttatttattcaaaaaaacaactttttctgccattaattttttgtatttttttcatttaaaatttatttccactctgatctttattatttctcttctat

SEQ ID NO: 596028 - DNA, 592 bp, Homo sapiens
ggattaataaccagaatatgtaataagctcaaacaactctattgggaaaaatctaacaatctgatttaaaattggcaaaagatctgaatagacatttctcaaaagaagacacacaaatggcaaacaggtataggaaaagatgctcaatgtcactgatcatcagagaaatgaaaatcaaaattacaatgagacataatctcacttcagtttaaatggcttttatccaacagacaggcaataacaaatgctggtgatgaaatggagaaaggggaatccttgtacactgttggtgggaatttaaattagtataaccactatggagaacagtttggagcttcctcaaaaaagtaaaaatagagctactataggatccagctatcccattgctagttatatacccaaaagaaaggaaatcagaatattgaagagrcatttgcactctcatgtttagtgcagcactattagtaggcaagatttggaagaaacctaagtgtccatcaacatatgaatggataaagaaaatgtggtacgtatacacaattgagtactagttagccttaataaagaatgagatccagtcatttgcaacaac

SEQ ID NO: 596029 - DNA, 552 bp, Homo sapiens
aacattgcatgttctcatttatctctgggagctaaaaattaaacaattgaattcatggagatagagaggagatagagagtagagggatggttgccatgccagagcgtgggaggaatagtgagggtgggagggggcaggaagtggagatgattaatatataccaagaaatagttggaaagaataagaccccgtatttgctagcactacagcgtgactattatttttgaaaaaactatgcatttaaattagctaaaaatttataatmtgattgtttgaaactcaaaggataaatgcatgaggttatggataccccatttgccctgatgcgattattgtgcattgcatgtcctgtatcaaaatatatcatgtaactcataaacatatacacctactatgtacccataagaattaaaaaattttgaaaagagatatacaatagtttgctttccttatttcctattttttgtttggtttctgtgagaacttgccttaagaattgaactctgagacaatgcgtattcagtgtcaaatatccaaatgaaaatttaataa

SEQ ID NO: 596030 - DNA, 552 bp, Homo sapiens
aacattgcatgttctcatttatctctgggagctaaaaattaaacaattgaattcatggagatagagaggagatagagagtagagggatggttgccatgccagagcgtgggaggaatagtgagggtgggagggggcaggaagtggagatgattaatatataccaagaaatagttggaaagaataagaccccgtatttgctagcactacagcgtgactattatttttgaaaaaactatgcatttaaattagctaaaaatttataatctgattgtttgaaactcaaaggataaatgcatgaggttatggataccccatttgccctgatgcgattattgtgcattgcatgtcctgtatcaaaatatrtcatgtaactcataaacatatacacctactatgtacccataagaattaaaaaattttgaaaagagatatacaatagtttgctttccttatttcctattttttgtttggtttctgtgagaacttgccttaagaattgaactctgagacaatgcgtattcagtgtcaaatatccaaatgaaaatttaataa

SEQ ID NO: 596031 - DNA, 463 bp, Homo sapiens
ctgcaaccctcacctcccaagttcaagcgattctcctgcctcagccttccgagtaactaggattacaggkgcgcaccaccacgcccggctaaattttgtatttttagtacagacggggtttcaccatgttggtcaggctggtctcgaactcctgacctcgtaacccgcccacctcggcctcccaaagtgctgggattataggcacgagccaccgcgcccggccaagattcccatcttttaagtgaattgagcagatggcagaccctgccctctacctgctggactggtgtccacaacagatttaacaatgaaaactgatcagtgaaaaggccgtctcgctgtaccctaaagagctgtttaggaaacactgaaacctcagtgatttgcttatctgtatccgtgtctgatttagccagtgaacacgtgatggttttaaacacacatctttagagcactatgttga

SEQ ID NO: 596032 - DNA, 634 bp, Homo sapiens
atgtaaaaaattttcagttacctaacacctgaaaacatgtttgatttaaccagttgacttctaaccatcactgtgtaatgtgacctgctaaagtaatctttcagctgtcaatttgatgtcttttttttcttttttttttttgagatggagtctcactctgtcacccaggctagagtgcagtggtgccatctcggctcactgcaagctctgcctcccaggttcaggccattctcctgcctcagcctcccgagtagctgggactacaggcacccaccaccacgcctggctaattttttttttttttttttgtatttttagtagagacggggtttcaccgtgttagccaggatggtctcgatctcctgacctcataatccacccatctcggcctcccaaagtgaacagtgatatgcacagaatgatttgaaactgtcagtgtctctctccctctttttttaactttggttctgtgttaaccagatcatrtctaacaaagtgcttcaaaagttatttctaaccaaataatatttaaatcacagtgtatctcatttaagtacaagtattttaagttaacagtttcctcaggaatattctgtcttctgacaccatcatttgaatatcacagtttgcaaag

SEQ ID NO: 596033 - DNA, 628 bp, Homo sapiens
  misc_feature 79: n = A,T,C or G
caggattcagagagagtagattatacaatttcttatcagactcagggtctgtgttgatgtaaatgctgtcggcttttcntgaatccaaaagggaggagagcataatgaggcatgtctgacacacccacccttcccatcatggcctgaagtagtctttcaggttaactctggggtcccctggctgaggagggagtccattcagatggttgggtagggaggtgcttagaattttatttttggtttccacctgaatctttagtgttgtccaaagggaccatggagtagaagcagtgaaagaataacatataggtgcagccataaaaawaaaatgagttcatgtccattgcagggatatggatgaagctggaaaccatcattctcagcaaactaacacaggaacagaaaaccaaacaccacatgttctcactcataagtggaagtcaaacaatgagaacacatggacacagggaggggaacatcacacactggggcctgtcaggggttggagggaagaggagggagagcattaggacaaatacctaatgcatgtggggcttaaaacctagatgatgggttgataggtgcagcaaaccatcatggcacatgcatacctatgtaacaaacctgc

SEQ ID NO: 596034 - DNA, 628 bp, Homo sapiens
  misc_feature 79: n = A,T,C or G
caggattcagagagagtagattatacaatttcttatcagactcagggtctgtgttgatgtaaatgctgtcggcttttcntgaatccaaaagggaggagagcataatgaggcatgtctgacacacccacccttcccatcatggcctgaagtagtctttcaggttaactctggggtcccctggctgaggagggagtccattcagatggttgggtagggaggtgcttagaattttatttttggtttccacctgaatctttagtgttgtccaaagggaccatggagtagaagcagtgaaagaataacatataggtgcagccataaaaataaaatgagttcatgtccrttgcagggatatggatgaagctggaaaccatcattctcagcaaactaacacaggaacagaaaaccaaacaccacatgttctcactcataagtggaagtcaaacaatgagaacacatggacacagggaggggaacatcacacactggggcctgtcaggggttggagggaagaggagggagagcattaggacaaatacctaatgcatgtggggcttaaaacctagatgatgggttgataggtgcagcaaaccatcatggcacatgcatacctatgtaacaaacctgc

SEQ ID NO: 596035 - DNA, 504 bp, Homo sapiens
gaattctgctaggtgtagacataaacaattaccaaccattatttcggaagtcacaagacttgcaacttcactaattactcctgcaggtaacatcatttttgtagaacctaagattggcctttgagatgtcttttcaggtttttgcatttttgcacctgggccaaccaatggttacacccagaagcaaacttagcacatacaagaaccattttccatatgcctatgattgcatccccagctgatcagcagcccccaacccctgcctgccaaattgtccttgagaaaccctagcctctgaattttgtggggagattgatttgagtaatgactctatctcccacatggcatggttggccttatgtcagttaagctatttctcctttgcaatgccatgrtcttagtgaattggttttgtttgtgcagtgaacaaagagaagctgccagacagttaagagttctagttacatttttgatgctaacaaaatgagcagcctgtccccgcag

SEQ ID NO: 596036 - DNA, 587 bp, Homo sapiens
  misc_feature 583, 584, 585, 586, 587: n = A,T,C or G
tgaattattcatagaaagtaccagccagtatgggtgttttgtacataagggcaatttgtagtctctgggaaccctgaaaccacgaagtaccaacattagcatcccatgtcctgcttctgggtctcaggattcctgtggttgatkcaggccagcacctctcctccccgcttttctctttataacaaagtctgaaattgtcccaaagcacaaaagttcccagtacactaccggaagtgactacatttaagtgtttgaggaaaaataaaaatgatcatgattcaaggagccagcttttccttggcctgagaacttgacattaattaaaatgaactgtcttaatctcatctaactttcatgaagggacagtgtcatgctactttagcttttgctttgacagactttcctgaaaattctgatcaagtcacttactgtagactgagcatgaagaagagtattcaaacagcaaaaaattccagtgggtggcgagagaaaggttactctcggacaaattccttttcataagtcctgactgtgatttccgtgtgactacagctggccctacagccgtgtgtgggttctggcnnnnn

SEQ ID NO: 596037 - DNA, 587 bp, Homo sapiens
  misc_feature 583, 584, 585, 586, 587: n = A,T,C or G
tgaattattcatagaaagtaccagccagtatgggtgttttgtacataagggcaatttgtagtctctgggaaccctgaaaccacgaagtaccaacattagcatcccatgtcctgcttctgggtctcaggattcctgtggttgattcaggccagcacctctcctccccgcttttctctttataacaaagtctgaaattgtcccaaagcacaaaagttcccagtacactaccggaagtgactacatttaagtgtttgaggaaaaataaaaatgatcatgattcaaggagccagcttttccttggcctgagaacttgacattaattaaaatgaactgtcttaatctcatctaactttcatgaagggacagtgtcatgctactttagcttttgctttgacagactttcctgaaaattctgatcaagtcacttactgtagactgagcatgaagaagagtrttcaaacagcaaaaaattccagtgggtggcgagagaaaggttactctcggacaaattccttttcataagtcctgactgtgatttccgtgtgactacagctggccctacagccgtgtgtgggttctggcnnnnn

SEQ ID NO: 596038 - DNA, 607 bp, Homo sapiens
tcagcctcctgaatagctggagctactggcatgcaccaccacacccaggtgattttttatatttatctagagataaattacagagagatgaagtctcactaccttgcccaggctggtctcaaatcctggcttcaactgatcctcctgcctcaacctcccaaagtgctgggattacaggcataagccaccgcacccagtcttgggtgaatacttcaaagctgacctgtcatgacttctacattgtaaattttgaatattttcatagaagcatttttttaattaactagaagtccatcttatatgttacaatttaagtaaaggcaaatcttgatacaagctcgtctattaaaagcaaatgactctcagctataatcacagggtacaatccaaatttatgcagatgttcctgaaaaatatttcaaacagaggaatgcaataatattgagaataaaaaggtctgcaaagcatagcaagcaaatgaagacaagcagcaggagtgctaagcttaataccagaacaagttattttcagagccaaaagcacactgagacaaagaaagataacctkttaataatagaatgcataatctaaaagaagtgtcattgtt

SEQ ID NO: 596039 - DNA, 670 bp, Homo sapiens
aagtatcttcttttcaaatacatatgggacattataaaaataattgaccataaatatgaggctgctaataaaacttcaataaattccagaatgtagatatggcacagaggatattttccgatcacagtacaataaaagaagcaatgaataacgaaactagaaaagaaacagacaaaacccacaataatgaggtaaaaaacaaaaacttcctcataaaactgggtttgggtttaggagaaaaataaaacccaaatgacagaatcctaacaataataaaagcattacatatcatacttatggaattcagctacawtaaattgttctgcaaattgcagaagaaaactcatagttccaaacatttatcttaatgaacaaaataaatgaaatatctactcaagagattagaaaaataacaaataaatctaaacgacacaaaaacataaaaaccacagagcaatgaaagcagaaaatcaatcccaaaacactaaaaaggactaataaataaaaaaggagaaatgtacaaaaatatcaaatgagtatatgattggttaacttaatcatacaaaaaactacacaaatttataaaataaattccctaataatattagggaaattaccacagattataagaaattaaaataatgataagtaatcaacagaaattacttta

SEQ ID NO: 596040 - DNA, 670 bp, Homo sapiens
aagtatcttcttttcaaatacatatgggacattataaaaataattgaccataaatatgaggctgctaataaaacttcaataaattccagaatgtagatatggcacagaggatattttccgatcacagtacaataaaagaagcaatgaataacgaaactagaaaagaaacagacaaaacccacaataatgaggtaaaaaacaaaaacttcctcataaaactgggtttgggtttaggagaaaaataaaacccaaatgacagaatcctaacaataataaaagcattacatatcatacttatggaattcagctacattaaattgttctgcaaattgcagaagaaaactcatagttccaaacatttatcttaatgaacaaaataaatgaaatatctactcaagagattagaaaaataacaaataaatctaaacgacacaaaaacataaaaaccacagagcaatgaaagcagaaaatcaatcccaaaacactaaaaaggactaataaataaaaaaggagaaatgtacaaaaatatcaaatgagtatatgattggttaacttwatcatacaaaaaactacacaaatttataaaataaattccctaataatattagggaaattaccacagattataagaaattaaaataatgataagtaatcaacagaaattacttta

SEQ ID NO: 596041 - DNA, 236 bp, Homo sapiens
tcccttttgattgttgacttgtattctattgtctgtgccacagtttatgtatatattcatcacttgatggacatatagtttcaatttttgatactttttaataaaagtgctatgaatattcacatacacgtatgctctttaataaacacaaaaagtgagattgctgcgttgtttggtaagtgtttgttggaatacaaaaggcacttgcagattrttttctgggttagttttcccac

SEQ ID NO: 596042 - DNA, 611 bp, Homo sapiens
atctaattaaaaaaagaaaaaaacgtattacggagtaaatcaggcagtaatatttctctagactttataattttgcagaatttttaaaatttataatttattatgacttcttattctgtaaatagctgttggtttttaccactaatttcgtgatggttatttttcttaaagagtttcgctctccctaattacataaacttcaggcccccaaccatggatctgtgtgggaatgtacagtctcccaaacataccttctgattatctgcctctgagaccacattctttttcaaggagtattaaattagaagtcaatacttctactcttaatagactaacagggattagcaccatgtatgataattatgagataataaggcagagactgctggggtttcaaggagtggggaggaataaaatggaatcagaagatatgtgttcgcttagtgtrcatggatggctttgtgcacaatgaagactatttgtggctactttgaacaaaaataatttttaatttattactgtaataattttaaatcctagttctctttaagccccctagttgatattaaactttaaattcattttattctaattataaatacagtaagctt

SEQ ID NO: 596043 - DNA, 513 bp, Homo sapiens
agtatactcattcttgtcatcagcatatggaatattttccaggaatcaagaaaccatatrtgaagtcacaaaataattctcaacaaattttcaaaaaccaaaatcttatcaagtttattcctagactacaattgaataaaattagaaatcaataattaaaggaatgttgaaactatacaactacatgaaaattcaacaacatgctcctgaatgacgaccaatgggtcaaaaaagaaattaagaaggatattaaaaaattttttgaatcaaatgaaaatagaaacaaagcatactaaaacctctgggttacaagttttgtatcataatactgcttttgtaggattaagcagcattaccatgcaagtttataataaatgcctacaacaaaaaggtagaaagattttcaataaacaacctaacagtatacttcatgaaactaaaaaagaaagaacaaaccaaaccctaaattagtaggaggaaataagaaataaacatgagagcagaaataaatgg

SEQ ID NO: 596044 - DNA, 531 bp, Homo sapiens
tctattcactgccatccagatcaaaagtgacatgggcttatctctgtccttgtcatgttcaatgtgggcaaaatgcactgcagcaggtggtcagtagttagttttcccagactgtgctrttaggccccaggcatttggatatacaagctccctcattaaataggtgcaccaatcaagtcacataggacttccatggcttctgccatatctagctctcagattttgtattccactctcagagaagaacctcattttaacagtttcatttgcagcaataccatcaatgattttgccttgagtgaaaactggctttacttgaggtctgcaagtgacctggattggttggagctccctgaaggtcctctcaattccctaagatattgtctctgatccttgctgatgtggtttggctgtgtcctcaaacaaatctcatcttgaattcccacgtgttgtgggagggacctggtgggaggtatctggatcacagggccaggtctttcccatggtgttctcctggtggtgggtgggtct

SEQ ID NO: 596045 - DNA, 531 bp, Homo sapiens
tctattcactgccatccagatcaaaagtgacatgggcttatctctgtccttgtcatgttcaatgtgggcaaaatgcactgcagcaggtggtcagtagttagttttcccagactgtgctattaggccccaggcatttggatatacaagctccctcattaaataggtgcaccaatcaagtcacataggacttccatggcttctgccatatctagctctcagattttgtattccactctcagagaagaacctcattttaacagtttcatttgcagcaataccatcaatgattttgccttgagtgaaaactggctttacttgaggtctgcaagtgacctggattrgttggagctccctgaaggtcctctcaattccctaagatattgtctctgatccttgctgatgtggtttggctgtgtcctcaaacaaatctcatcttgaattcccacgtgttgtgggagggacctggtgggaggtatctggatcacagggccaggtctttcccatggtgttctcctggtggtgggtgggtct

SEQ ID NO: 596046 - DNA, 548 bp, Homo sapiens
aaaaagaaggcttaaaaaaaaaaagtcccagtgattcatgatgcattcaagagaaatacagactgaagatggttggttacccaactggaaagaggaagaaaggcatcccttactttctttctgttcccagcgaacacccagggtaggtgagggagaggaaataaaaagcttcccctttttttcttctgtccttctatccctgagttctggcamtgcttggcaggtgcacccatgggtgccaatgcagccttcacccatgtaacagggatgcctaaagggtagaaatatttgcactcacctctgttctggtctatcctccctgccatcagtaacctttgagttctctagacctcatctatgctatgaatatgggcaggaccttcgtccatgaaatggagggagtgtaactggaaggaattagtcatgcttatctgccctgtgcccttagacttctgctgttttcctttctagggcttcaacctgaagcttggaattgagtttgggacaaaaagttacctaaggaaggtgcatggactcactaagttaag

SEQ ID NO: 596047 - DNA, 548 bp, Homo sapiens
aaaaagaaggcttaaaaaaaaaaagtcccagtgattcatgatgcattcaagagaaatacagactgaagatggttggttacccaactggaaagaggaagaaaggcatcccttactttctttctgttcccagcgaacacccagggtaggtgagggagaggaaataaaaagcttcccctttttttcttctgtccttctatccctgagttctggcaatgcttggcaggtgcacccatgggtgccaatgcagycttcacccatgtaacagggatgcctaaagggtagaaatatttgcactcacctctgttctggtctatcctccctgccatcagtaacctttgagttctctagacctcatctatgctatgaatatgggcaggaccttcgtccatgaaatggagggagtgtaactggaaggaattagtcatgcttatctgccctgtgcccttagacttctgctgttttcctttctagggcttcaacctgaagcttggaattgagtttgggacaaaaagttacctaaggaaggtgcatggactcactaagttaag

SEQ ID NO: 596048 - DNA, 548 bp, Homo sapiens
aaaaagaaggcttaaaaaaaaaaagtcccagtgattcatgatgcattcaagagaaatacagactgaagatggttggttacccaactggaaagaggaagaaaggcatcccttactttctttctgttcccagcgaacacccagggtaggtgagggagaggaaataaaaagcttcccctttttttcttctgtccttctatccctgagttctggcaatgcttggcaggtgcacccatgggtgccaatgcagccttcayccatgtaacagggatgcctaaagggtagaaatatttgcactcacctctgttctggtctatcctccctgccatcagtaacctttgagttctctagacctcatctatgctatgaatatgggcaggaccttcgtccatgaaatggagggagtgtaactggaaggaattagtcatgcttatctgccctgtgcccttagacttctgctgttttcctttctagggcttcaacctgaagcttggaattgagtttgggacaaaaagttacctaaggaaggtgcatggactcactaagttaag

SEQ ID NO: 596049 - DNA, 548 bp, Homo sapiens
aaaaagaaggcttaaaaaaaaaaagtcccagtgattcatgatgcattcaagagaaatacagactgaagatggttggttacccaactggaaagaggaagaaaggcatcccttactttctttctgttcccagcgaacacccagggtaggtgagggagaggaaataaaaagcttcccctttttttcttctgtccttctatccctgagttctggcaatgcttggcaggtgcacccatgggtgccaatgcagccttcacccatgtaacagggatgcctaaagggtagaaatatttgcactcacctctgttctggtctatcctccctgccatcagtaacctttgagttctctagacctcatctatgctatgaatatgggcaggaccttcgtccatgaaatggagggagtgtaactggaaggaattagtcatgcttayctgccctgtgcccttagacttctgctgttttcctttctagggcttcaacctgaagcttggaattgagtttgggacaaaaagttacctaaggaaggtgcatggactcactaagttaag

SEQ ID NO: 596050 - DNA, 507 bp, Homo sapiens
aagttgttgttccatatccaagaagaatgaggacacactgataattgaagagtgagaagggcagagaataattttattgggtgacagagcagctctcagtggtgaggggacacaagggtggtcctccaccsaagtcaggtggtttctctcaatgtgtctgagtccagggcttttataggcacagaatggggatgagtgggccataggtggcattggaaaagataccatttgatgggttaaaaagcgtttctcaggaagaaccagttgggaaagagtgggcaaatggaaacagaagtcctcactccaggttgtgggtttcagactgttttttggcttgaagatggagtttcaccagggacccacttctgtctgcctaggatttgtctgcctcctgcctctatcattattaaatgaacatcctactttttaatgcatatttatatacagttttatttcttgcatccttattactgatcattttaattgtatatattaattaaaattttt

SEQ ID NO: 596051 - DNA, 507 bp, Homo sapiens
aagttgttgttccatatccaagaagaatgaggacacactgataattgaagagtgagaagggcagagaataattttattgggtgacagagcagctctcagtggtgaggggacacaagggtggtcctccaccgaagtcaggtggtttctctcaatgtgtctgagtccagggcttttataggcacagaatggggatgagtgggccataggtggcattggaaaagataccatttgatkggttaaaaagcgtttctcaggaagaaccagttgggaaagagtgggcaaatggaaacagaagtcctcactccaggttgtgggtttcagactgttttttggcttgaagatggagtttcaccagggacccacttctgtctgcctaggatttgtctgcctcctgcctctatcattattaaatgaacatcctactttttaatgcatatttatatacagttttatttcttgcatccttattactgatcattttaattgtatatattaattaaaattttt

SEQ ID NO: 596052 - DNA, 435 bp, Homo sapiens
caatcaaaaaatgtatctcattgtttctgaggttttgggggtcctttttttctaatgcacccatacaaaaataatttcataaggagtaaaacctcttccttgttgctactgtaattccttgtcttcctgaggtacaccaatttctttagaaagacctargtctgggtccaagacttctgaacataaaattagctggagttccagattaaagtgtcctagactccttggattctgatgaaccgataatactttgccttaaattttgcttatcacaggtctccaactgaaccgagtccagttcctgctgaacacaatttgacttctggatggcagtctggattctgaacctcgcccttctaacatggaagcacatgcactagactggaccttgtccagttttgtcaggcccagtctaacctctaaaataaaaattgc

SEQ ID NO: 596053 - DNA, 622 bp, Homo sapiens
gctaagaggaaatttcataaygttaaatgcctacatcaaaaagtctaaaacagcacaaagagacaacctaatatcatacctcaaggaactagagaaacaagaacaaacaatccaaatccagaagaaaagaagtaacaaaaatcagaacagaactaaatgaaattgaaacaacagcaacaacaacaaaatatatataaaagataaataaaagaaaaagctagttctttgaaaagattaacaaaattgatggatcattagtgaaattaaccaagaaaggaagagtgtagatacaaataagctcaattagaaataaatctggagacattacaagcaataccacagaaatacaaaagataattcaaggctactatgaacatcttcacatgcacaaactagaaaatgtagaggaaatggaaaaattcctggaaatatacaaccctcctagattaaatctgacaaaaaatagaaattctgaacagtccagtaaaatgtaacaagattgaaagagcaattaaacaattgccaacaaaaaagtccattaccagatggactcacaaccgaattatatcagacattcaaagaagaattggtaccagttttactgaaactattacaaaagata

SEQ ID NO: 596054 - DNA, 542 bp, Homo sapiens
gacgaatataaaataaaaagccctctttgagagtgttaccttttcaatactatagaatttcagaggaggatgacacttttaactgaaatttttatggaaagtttcacagaccagggtttttggactactttcctgcacctaaattcagaacaataaagagacaacaaaaacaaggcgattaaggcagatttatacttttattaaagcaaaagtctagactacagtatagttcatgtatgtggcatcaatcaactaccaagtgccacacatcaaaattagatggattggagaagtggagcaagatggtagaatggagcgttccaccgatcatccctcccagtaggaagactaagtttgacaactayctacacaaagggagcacattcataggaaccaaaaatcaagtaccaactaggtcactgtggggtagggcaccaagtggactcttggggttcttgattccaggctctggctcccattagacagcacttcttgacctgcactggactggagaggagcccactgtcatgaagggtgagtcc

SEQ ID NO: 596055 - DNA, 542 bp, Homo sapiens
gacgaatataaaataaaaagccctctttgagagtgttaccttttcaatactatagaatttcagaggaggatgacacttttaactgaaatttttatggaaagtttcacagaccagggtttttggactactttcctgcacctaaattcagaacaataaagagacaacaaaaacaaggcgattaaggcagatttatacttttattaaagcaaaagtctagactacagtatagttcatgtatgtggcatcaatcaactaccaagtgccacacatcaaaattagatggattggagaagtggagcaagatggtagaatggagcgttccaccgatcatccctcccagtaggaagactaagtttgacaactacctacacaaagggagcacattcataggaaccaaaaatcaagtaccaactaggtcactgtggggtagggcaccaagtggactcttggggttcttgattccaggctctggctcccattagacagcacttcttgacctgcactggrctggagaggagcccactgtcatgaagggtgagtcc

SEQ ID NO: 596056 - DNA, 606 bp, Homo sapiens
gtgcatatatatttaggattgttaaatcttcctgttgaattgaactctttatcattatattatgacttctttttttttttgctgttgctgatttaaagtctgttttatctgatatgaaagtaactactcccacttatttttcattctttaactttgagtctgtatctatacctattagttgagtctcttgtgggcaataaatggttgggtttgcytttttatccaatttgctggtctgcatctttcaagtggagcacttaggccatttacattcaaggttaatattgatatttcagggtttgttcctctcatggtattgttgtctagttgttttgtagtctcacttgcataattgctttatagagtctatgtgctttgtatttatatgtgattttattatggtcagtatcattgtttctatgtttagaattcctttgagtatttcttgtaggtctggtctagtgatgatgaatttcatttgtgtttgcttgtctgagaaagactctacgtctcctttttttacgaagcttagtttggcaggatatcaaattcctgggtggcatttttattctttaagaaggctaaaaataggcccccaatctcttc

SEQ ID NO: 596057 - DNA, 529 bp, Homo sapiens
ggttcagaaattagaattttgaaagtagatgggataggatttaatgataaattcyacgtgggatatgacagagagtggaatcaagcaaggatctaatgttttggtctgagcaattggaaagtgagaattgctattaaatgagatgggaaatgtttgggcatagtatatttaggggatgtgaacaaaagcagtctagaactcctgtcatttgcccgttaggtttcctagacttcagggtttccatttctctgtgttttgagctatttctttacttgatcatttaagacacaaatccccatcttgatagaaatcgttctcctcttcaattcatccttgtattatacttttctttcattataaaatttcatttatatttgtcaccacttaataagaaagtcatgactacttactacacttaagagtaagtgcccatttgctcttcccaggttctttattctctgcctttttattctttcttgtcatggtccagcaaacaaagggtaaaaatccagtgcagtatgatatactg

SEQ ID NO: 596058 - DNA, 529 bp, Homo sapiens
ggttcagaaattagaattttgaaagtagatgggataggatttaatgataaattctacgtgggatatgacagagagtggaatcaagcaaggatctaatgttttggtctgagcaattggaaagtgagaattgctattaaatgagatgggaaatgtttgggcatagtakatttaggggatgtgaacaaaagcagtctagaactcctgtcatttgcccgttaggtttcctagacttcagggtttccatttctctgtgttttgagctatttctttacttgatcatttaagacacaaatccccatcttgatagaaatcgttctcctcttcaattcatccttgtattatacttttctttcattataaaatttcatttatatttgtcaccacttaataagaaagtcatgactacttactacacttaagagtaagtgcccatttgctcttcccaggttctttattctctgcctttttattctttcttgtcatggtccagcaaacaaagggtaaaaatccagtgcagtatgatatactg

SEQ ID NO: 596059 - DNA, 529 bp, Homo sapiens
ggttcagaaattagaattttgaaagtagatgggataggatttaatgataaattctacgtgggatatgacagagagtggaatcaagcaaggatctaatgttttggtctgagcaattggaaagtgagaattgctattaaatgagatgggaaatgtttgggcatagtatatttaggggatgtgaacaaaagcagtctagaactcctgtyatttgcccgttaggtttcctagacttcagggtttccatttctctgtgttttgagctatttctttacttgatcatttaagacacaaatccccatcttgatagaaatcgttctcctcttcaattcatccttgtattatacttttctttcattataaaatttcatttatatttgtcaccacttaataagaaagtcatgactacttactacacttaagagtaagtgcccatttgctcttcccaggttctttattctctgcctttttattctttcttgtcatggtccagcaaacaaagggtaaaaatccagtgcagtatgatatactg

SEQ ID NO: 596060 - DNA, 582 bp, Homo sapiens
ctggacactggaatggatagggacagtggtccgtgaggaatggacaataggatcagattctctgagtgggagcacgcaccaggggatgccagttagggtagaggctgaacaagggtaaatgcctctcctgaagctgggaagctaatatataagagaaaaggcaaagagccctcacagagaagaggtaaggggatgaactatgtatatatttatgtagaattgactgmattttccctcagttaagataaagcttttttgcaactgcctgtaatggcagcttgagatagacattatatttaagtataaaacagtcaatttacagattcaaatatccaatatttgtgtgttggcaaaagaccccgcccccatccaacacacacagtattgcagactaccaaccagggatgtggtcactcatgcagtgggttctcatcctgtatggagaggagctgttccatagagaagggtttgagagcaggctgcatggaaagcctgggtgaaactgtgactgaggaaaccccacccaagtgttctcaccttcttcaggaggcatggaaaggctcctagctcaagagttgtagc

SEQ ID NO: 596061 - DNA, 649 bp, Homo sapiens
ctagagtggttttctaggctggggatttcacttgtttcacatttcatatatcatgacttatctaagtatccagtgcctaaaacttctgctacactggtcaaacaaagagctctggggcaggaatacccttcacttacttaatgtttcattatcctggagatgcagcactgagggttttaattttctttcattttctttattttatttttagcatgaattagctgagatcacttgcctaccagatgtgtytccaacaatttattataagacatttctattattttttcttgaaattattattgatgtttgctgtgaaggtattttttaaagccgatgctgtgaaagcatctggttaagttagctaggctggttcaagaggtgattctaaggctcattaactcagcactcccatcatccaataatgggcaccctagagtaactgtggaagaaatgaacacagtgcttcctgcctggtgcctttatggagaaatgttttaaaatcaatttatgaaagactgcttaaaaagtgttattgtttacctgctatttgcatattccagggtttttataaatgttttgggtaccgagaaaataaagttgttatgtatcctataaaccttacccaccaaaaacattttaaggaaaagct

SEQ ID NO: 596062 - DNA, 439 bp, Homo sapiens
tagaaattatttttactcaagacagcctgctttggaagcatatatcctrtgcacaggattagaattgacaccctccccctacccgaaaatttaccaaaagcatatgaaaggcttatgtttttcaactctggagcatctccctgtgagtcattgaaagtaattgatactgtactatcctaaagttttataatattaggctgatactatagattgatactatgaaacataatgctataccatgtttcttactcaactgaccttcacttaatcaactggctggcttaactcaagttctgtagtcttcccttgaaacttactgattgccacccacagcatgctggatcttgtggctagaagcctaatctttatattcctgtgcacttctgctcccatctgttgagttgaatgcttgccagaaatcagttttatttattcccaa

SEQ ID NO: 596063 - DNA, 439 bp, Homo sapiens
tagaaattatttttactcaagacagcctgctttggaagcatatatcctgtgcacaggattagaattgacaccctccccctacccgaaaatttaccaaaagcatatgaaaggcttatgtttttcaactctggagcatctccctgtgagtcattgaaagtaattgatactgtactatcctaaagttttataatattaggctgatactatagattgatactatgaaacataatgctataccatgtttcttactyaactgaccttcacttaatcaactggctggcttaactcaagttctgtagtcttcccttgaaacttactgattgccacccacagcatgctggatcttgtggctagaagcctaatctttatattcctgtgcacttctgctcccatctgttgagttgaatgcttgccagaaatcagttttatttattcccaa

SEQ ID NO: 596064 - DNA, 565 bp, Homo sapiens
ttcactttgggacagggttttgacattaaaatgacgtggaatttggttctttatatcaaaargtgaactgttgagcaccaagtcatttagacattttgtgcgcagtctctgtaagccagctggagctgttgacacttctaaataaagacaaaacacttctaatattgaatattaactaagtgtaggctatatatacacttaagaatgattaatccaaacaactaagataattatttatcttcttattccagttcagggttctgggtggccagatcctatcctggcttctcagggcacagtgtagacaccaactctggacaggacaccattccattgcagggctcagtcagacacacccacatcactcaggcacatcagacactccagttcatttaacgtgcacagctttgggatgtgggaggaaacggaaatacccaaagaaaatccacactgacatggagcgactgtgtagactccacaagacagtggccccaggtaaaattcaatattttttcttatcgatgtcataagaaatgatgttgtttgaggacctgctgtatggcct

SEQ ID NO: 596065 - DNA, 331 bp, Homo sapiens
gtggctgcacgcctataatcccagcactttgggaggtcgaggcaggcggaccacctgaagtcaggagttcgagaccgacctggctaacatggcraaactccgtctctactaaaaataaaaaattagctgggtatcgtggcacgcacacgtaatccctgctactcgggaggctgaggtgggagaatcgcttgaacccgggaggcagaggctacagtgagccgaaatcatgccactgcgctccagcctgtgcgacagagtgagactctgtctaaaaagaaaaaaaagaaaagaaatagaaaattcaccatctttgaaggcaagtattattact

SEQ ID NO: 596066 - DNA, 449 bp, Homo sapiens
accctgaaaattatcttcctaatccaaggtgagctctttggagttaagtgggatcattcaytgggcaccatagtcaatagttttgctcatgtgactactatcttcttccaggcactgggaaaatggaacttcgtgccctctgtggttgagtagggccatgcaactagtttgggccaataagttgtgatttagctcgtacttgtaattttcaggaccaagtatctccccttaagagtctggagttgttactgttgcatactttaccctttctgactaatatactgggcaagatgaagtgtacaggtcttgagagttcataaacatgtagctctgtttcagagacctgtgtatatagtcaactgatatacagatatctgaagccacataatatcttaagatcacctgagccctcagcctgactgggaggcatgttcatggatgaatttaca

SEQ ID NO: 596067 - DNA, 566 bp, Homo sapiens
gggactgtttagaagggataattgtattttgcaatgtagcttgggttgtattgcagggctcccaggggagctgaagaggctcaagaaaggacatgagatttggaaggggccagggatggaataatatggtttggatttttgtctctgcccaaatctcatgttgaattgcaggaggggccaggtgggaggtgatcrgattgtaggggcgggtttccttcctgccattctcgaattagtgagtaaattctcatgagatctgatggtttaaaagtgtttggcacttccccccttgctctctcctctgccaccatgtgaagatggtttcccttcatcttctgccatgattgttaagtttcctgatgcttcctagtcatgtttcctgttaagcccatggaattgtcagtcaattaaacctcttgtcttcataaatcacccaatctcaggtaattcttcatagcagtgtgaaaatggactgatacagcattcctcttcctaagcaagagactttttcagaagctcacactcatacattagatacacacagatcattttattaccttctgtct

SEQ ID NO: 596068 - DNA, 582 bp, Homo sapiens
cccttcatcttctgccatgattgttaagtttcctgatgcttcctagtcatgtttcctgttaagcccatggaattgtcagtcaattaaacctcttgtcttcataaatcacccaatctcaggtaattcttcatagcagtgtgaaaatggactgatacagcattcctcttcctaagcaagagactttttcagaagctcacactcatacattagatacacacagatcattttattaccttctgtctcctttatattgcataggaaaatgtacccagaagctattgtggtgactacaccaataaagcaattgcattaatgagttttctgttgcattgcattcatttttagctttggatgttgtctaacctgtcacatcacctttcccccggccgccaccatctctactcctgcctgtgcccttagtgagtccttttggtggcaggcagatatattatgccatagatggagcgtgattcacacacacagcatttgctccaccaagctgtcggtctggagtttattaggtgtgggtcttagggagtygctgtatgaatatcttagagggaaaaaaggagaatgatgaat

SEQ ID NO: 596069 - DNA, 556 bp, Homo sapiens
ctccttgctagctttcacatgagcactatcttaccccgttgtattaccactgctttgctcaggcctttctctctaagctggcctccaggcatgctcctgtccctctatcctctcccctgcctcctgaatcatctccctaacttgaaatctcaccctgtcccttcgttgtttaaaatccttcagyaggtcccatcatctaaaagtaggacaaagatatttcttattaaacctgggcacttttgagagtgaaagagggacaccgttcatcattgtaccaggataacaggcataaacaggcataaagcgtgacacagtgagatgtacagtcatcctacccatgaagagcgagcctcagccaggctcccaaggcactttgtgacctagcttccacctgtgagggcaaccacacctccctttctctctcaaatgcaatctgctctggacttctccctgcatcccctgtgtcatgctcttccccacctgacacatccttctacctctgcctagatgctccccctgtccaccaggcagttgcctacatccaaccctacatcac

SEQ ID NO: 596070 - DNA, 652 bp, Homo sapiens
  misc_feature 644, 645, 646, 647, 648, 649, 650, 651, 652: n = A,T,C or G
gtgctgtaacacctacacagcctgagctattatcaacatccctgcaagtcacacattcgttacagttgatgaacctacactgacacatcattatcatccaaagactatagtttacattactacagtcactcttggtgttgtgcattttatgggtttggacatgtgcatactgacatgtatacatcattatattaatagtgtcctacagactagtttcactgccctaaaaatcccctgtgctcatacagtattgtaagcctttgcacactggcttctttcatttagaaatatgcatttgaagttcctccatgtcttttcatgsgttgacagctcatttctttttagtgttgaaaaatatcccattgtctggatatatcacagtttatcacctactgaaagatatcttggttgcttccaagggttggcaattatgaagaaagctgctgtaaacatccatgtgctggtttttgtgtagatatacattttcaattcctttggaaagataccaaggagaaagcacttgtgctagattgtgtggtgagagtgtgtttacttatataagaaaccaccaaattgtcttccaaagtggctgcaccattttgcagtccaccagcaatgcatgagagttcctatcagcatttggnnnnnnnnn

SEQ ID NO: 596071 - DNA, 652 bp, Homo sapiens
  misc_feature 644, 645, 646, 647, 648, 649, 650, 651, 652: n = A,T,C or G
gtgctgtaacacctacacagcctgagctattatcaacatccctgcaagtcacacattcgttacagttgatgaacctacactgacacatcattatcatccaaagactatagtttacattactacagtcactcttggtgttgtgcattttatgggtttggacatgtgcatactgacatgtatacatcattatattaatagtgtcctacagactagtttcactgccctaaaaatcccctgtgctcatacagtattgtaagcctttgcacactggcttctttcatttagaaatatgcatttgaagttcctccatgtcttttcatgcsttgacagctcatttctttttagtgttgaaaaatatcccattgtctggatatatcacagtttatcacctactgaaagatatcttggttgcttccaagggttggcaattatgaagaaagctgctgtaaacatccatgtgctggtttttgtgtagatatacattttcaattcctttggaaagataccaaggagaaagcacttgtgctagattgtgtggtgagagtgtgtttacttatataagaaaccaccaaattgtcttccaaagtggctgcaccattttgcagtccaccagcaatgcatgagagttcctatcagcatttggnnnnnnnnn

SEQ ID NO: 596072 - DNA, 437 bp, Homo sapiens
gttgcggggaattatttcagccagggacttcttttggaaactatctgaagagctgaccggaacaccaagaaatttaagcaatgctactccatctttccggactatttcatggggaatatactcccaccctgacctgaaggaggtgcrtttggtttccagcttgttcacagattctcaccatctctgaggcttttctcgacaccatcaataaaccaagtgccctgcgctccaggagctgacggtacactggaggagataaaaaggtaaaataactacatggtgaggccattacagacaaagactgtaagcactagagccattcagaggtatatgaaagatactcatgaattaaagcaactggggaaggctgccagaggggcaggtttggaactggaaattgaaggtgttcctggagtgctaggataatggaaaaggta

SEQ ID NO: 596073 - DNA, 533 bp, Homo sapiens
gctggacaaaggctccagaccaggtccagagtcatgacaaggctggctgactcagatgggaagtgaggccttggccagatgaaagtactgacacaagccaaccacgtccacagaagtcacagggaatcatcatgtccaataagcatggaaagatccagaaattccccatattcccctaacagtggaacaatggaaagacctccaaatagccacaacagtctgtccaacagacttaactattttcttcctcttggcaattttttttaatcaattttaggtgcyatgaatttaccattaattaaaggaaattcaagcagctggggaaaagaacatttgagagtttgttcagtgggaatagaatgacttcagaatgaggaatactgccaagtctggttgatgctcataaattttctaaactttgatgagtccttttttagggggcaggggagtggatgccttctgatctttcaaaaaaaaaaaaaaaaaaaaacctctggccaaccaagaaaagaactgactacaccaaaaagaga

SEQ ID NO: 596074 - DNA, 505 bp, Homo sapiens
agggaatcatcatgtccaataagcatggaaagatccagaaattccccatattcccctaacagtggaacaatggaaagacctccaaatagccacaacagtctgtccaacagacttaactattttcttcctcttggcaattttttttaatcaattttaggtgccatgaatttaccattaattaaaggaaattcaagcagctggggaaaagaacatttgagagtttgttcagtgggaatagaatgacttcagaatgaggaatactgccaagtctggttgatgctcataaattttytaaactttgatgagtccttttttagggggcaggggagtggatgccttctgatctttcaaaaaaaaaaaaaaaaaaaaacctctggccaaccaagaaaagaactgactacaccaaaaagagagtatcaggtaatgtcaccatctagcccctgtgtctcagactccctctgtggttccgactatcagtatctgcatctcagtgcccaagagtaaa

SEQ ID NO: 596075 - DNA, 562 bp, Homo sapiens
tatcatttcttaacaaatgagtcagtggcccagagatgataaataatctgagattgctttaagttaaatgaactgtgtaagttttttatggggggagggcacaatgagagtgtgcatgtagaccagaaacctgcgagagtgccagactgctcagttgcttggascatgtcttttctctccatccaccaatggaaggtggagacaggcaagtagccttgctgcagccccttcccttcatggtgagttcatttcttgtttacctctacacagtgtagccctttggaattccagctttatccagaggtctattaaactcttcacactgggcactgtcttactccttgacggttcattaaaatggtgcatcttaccattggtggcatctcacaccgaatgaaacatgatggacaaatacttataaccttaagtgaattacataatctcttacaggaaatttattttgtttgtaactatctcacctggagagataagaccaagtataatctgggtcttatgaattttccaaggaccacaggcagtcacctcaccacaggaaaggtaa

SEQ ID NO: 596076 - DNA, 602 bp, Homo sapiens
agtgtcaggtgactccatacagcacataaaatgggtgatgaatgaagaagtttgggatttttttgaacatttttagatgttttaatggcatgctggattaaattatcattttttaaatatatgctgctaaaaatattagtttaatgtctaaaaccgctccaaaaacaaaaacaaaaaaaaatagtgtattgggacataaaagcttttctttttgttatgtcttggacatttttatactatctaaaggcagtatttcctaaacattagaataacctagtatgtttgcttaaaatatggattccctgcactcaccccagaaatgtaaagtcagattctccagggtaggaccatggatgctataatttaacaagcacttcaggtgagcttcatcctcagtcaggtttggaaacacactgttccaaagatctaaaaatgtcaccaccatccataayaaagatgggaaatgaacagaagcccaattttaaaaaatttaaagctaagcaggaattcagaatatcatgcttatgatacactgagactagaaaatcttgaacaggcatgaaagcacagtaaacctttccataacccaaagatccaaaaaa

SEQ ID NO: 596077 - DNA, 594 bp, Homo sapiens
ctagagcaaagattagtgagctggagtcacccaccaacagatcagataaccaagcatgagggcctgagacacaatctcttgtagcaagattcaaagtctccaggagacaagcctggcattggtatcccaaaaaggtgagaaattactggatttaaagtaaaaatcacatctgagtcccacatgtcagagacattcagatttgaaataatcacyggttttactttaaatgcaacataaactaaatgacccaataaaatgtttgtttttagaaattaaacaagctttccccccagcccctagtacatttgaacagaaaaagaaatttgtgttcagtaaaagttccaccaaaataagctaggccacaaatctaaaggattttaaaattggtatatattagtaagatttcctatttatcaataaactactacgtttccaagcagagagttaggtctcttataccagactctattgtttaaatgggactttgtattcaccaccacccccaacccaaatttgactaagaccaaagttcaacaccaaattcctgactattctaaaaataataataataaggaagataggggtaggggggca

SEQ ID NO: 596078 - DNA, 624 bp, Homo sapiens
ttacttgaagtaaaaactgaaacttctcacgaattcctttggctggtggatgtgcacctgtgaatggaactttaagcaaagccctggctgtgtgaggctctgaggtttatttgggtgacagattcttctgcatcattctccccctygccctcttcctctgatacttctccaaaaggcatttcacaattcagagcagatgccttctctctctctgcaagcctctctgacctctccactgggattgtatgaccctccctgaggctcccctggtgtcctatgcttcccctcacatcaacttgtattacagctatttacctgtttatccaagtatagccttagctccttacagccaagatttagtcttgaatttcacacccctgagcctggtaccatgcctagcacacaagtattcagcaattaagacagtctagcatctctcaaactcaaaattttactaggtcaaaaatatgggaagaaaatgattatctacttcccttgtcccataaaacataaaccacatttcttgcctgtgcatcaacatctgtgttatttctgcagaagctcaaccattctgctggtcagtcttacatgcatttcacataaacactaactctgtagtgggga

SEQ ID NO: 596079 - DNA, 624 bp, Homo sapiens
ttacttgaagtaaaaactgaaacttctcacgaattcctttggctggtggatgtgcacctgtgaatggaactttaagcaaagccctggctgtgtgaggctctgaggtttatttgggtgacagattcttctgcatcattctccccctcgccctcttcctctgatacttctccaaaaggcatttcacaattcagagcagatgccttctctctctctgcaagcctctctgacctctccactgggattgtatgaccctccctgaggctcccctggtgtcctatgcttcccctcacatcaacttgtattacagctatttacctgtttatccaagtatagccttagctccttacagccaagatttagtcttgaatttcacacccctgagcctggtaccatgcctagcacacaagtattcagcaattaagacagtctagcatctctcaaactcaaaattttactaggtcaaaaatatgggaagaaaatgattatctrcttcccttgtcccataaaacataaaccacatttcttgcctgtgcatcaacatctgtgttatttctgcagaagctcaaccattctgctggtcagtcttacatgcatttcacataaacactaactctgtagtgggga

SEQ ID NO: 596080 - DNA, 676 bp, Homo sapiens
ttccttctcattatcggttgcatttttttcttgtgtttcttctagtttaatcttcatttctaagatggttctttctagttcttttttatatctgtcaactcacttctgtcaactcactttctaattgtaatttatgttgttcttttgcatctatgtcattttcttaatgcttttagcttttttcaatacattctaatatagcccccgcctgtgtatctgccatgcataattcctttcccttgagcatgggcaggacctattgaatatgaaagagtattattgtcagaattaggttacattatatggcaaaaatgaggggagcttgcagatgtaattaagactcttaatcagctggctttaagttaatcaagatggtcagagtgggactgacctaatcatatgacttcttttaatgagagcctagaggtcagagacagagaagtcagagagattcaaagcagcagagacactctcctgttggccttgaagaagtcaactgctgggccatgaaggggctatgtggcaggaactagygggcagcctctagaagctaaaagtcttagttctataatcacaacaaactgaatccttccaataaccagtgagcttggaaaaggcccctgagccccagtgaaattgcagcctcagccttgtgagaccctgagcagagaaccca

SEQ ID NO: 596081 - DNA, 426 bp, Homo sapiens
tgcatcactgctagtaagcctttacttatatgattctaattacattttcttgcaggtacagattttaaccatacaaacccagaacttcataaagaacttttaaaatatggatttaatgtgattatcagtagaagcttgggcatcgaaagagaagtgccagataccaggagtaaaatgtatgttgtctctctctttctctcattctctagatagatagatagatagatagatagatagatagatagatagawagaaaacagttactaaccagattttaatttgatcatactagaaatgttatagattcctatttttaggacttgaagtcagataatgtcaagattctatttcaagattctaatgcttatagtgtagagaatgtcttcttcgtgggcacaaaatgtgttctagaggcttccaagaatt

SEQ ID NO: 596082 - DNA, 572 bp, Homo sapiens
ttcatcacacattgtggtcccctttatgagagactagrgggtcgctgctgccaacatgtgggtgtgcttcccaaccagacacctctgcttctcctcctctatctgagcctttgacccacacagagccttaaacacaggactagggtgttctaggctctgatggagctcaggttgacaccttcctcctttaattcacggtgacttcatcatgggtttaaggacaatttcttcaacaaaaccctgtctgtcccagctgacacctataggtatggccgatagactcctcagcttgggggagacagccaggggcccagggaactgctcccactgagctacacaaatggcctgtccatgacctgctgccatccacttttcccatagtcctggtccctctagactgcaagccaacaacatgaccatcttctgaaaaacccacaccctccacttcatgtcagtgactgctgctgccttaactgcctttatctcctccagggcctggctcatggcgtcccacttttccctcctcttgctgccttctacatcctggatgtgagtgaggtgtctggagatct

SEQ ID NO: 596083 - DNA, 573 bp, Homo sapiens
attcatcacacattgtggtcccctttatgagagactagggggtcgctgctgccaacatgtgggtgtgcttcccaaccagacacctctgcttctcctcctctatctgagcctttgacccacacagagccttaaacacaggactagggtgttctaggctctgatggagctcaggttgacaccttcctcctttaattcacggtgacttcatcatgggtttaaggacaatttcttcaacaaaaccctgtctgtcccagctgacacctataggtatggccgatagactcctcagcttgggggagacagccaggggcccagggaactgctcccactgagctacacaaatggcctgtccatgacctgctgccatccacttttcccatagtcctggtccctctagactgcaagccaacaacatgaccatcttctgaaaaacccacaccctccacttcatgtcagtgactgctgctgccttaactgcctttatctcctccagggcctggctcatggcgtcccacttttccctcctcttgctgcctyctacatcctggatgtgagtgaggtgtctggagatct

SEQ ID NO: 596084 - DNA, 570 bp, Homo sapiens
cattgcaagctgatgaaatgtccctgctccttagcaggaaacacctccttaaggaatggaaggacaaaagaaaaaaaacaaaattggactctctttttccatgttgccctggtcggtggacacattctcttatttaactgcaaagataatacatgttcattgtccaaaacccaagagaaaccaaacacaatatggagagcatcttttcagacccgcgtttttatgcatttatagatatatacatatatatgcacgtgtrtatacacagggttaaggatttttatttattttacttttttttttttttgagacagtttccctctgtcacccaggctggagtgcaatggcacaatctgtaacctcctcccactgggctcaagcaattctcctgcctcagcctctcaagtagctgggattacaggtgcccgccaccatgccggctaatttttgtacttctagtagagacggggttttgccatgttggccaggctgctctttaactcctggcctcaagtgatctgcccacctcggcttcccacagtgctgagattactgtcgtgagccaccacg

SEQ ID NO: 596085 - DNA, 610 bp, Homo sapiens
cttctgctccatgcactcatgggcatattcactgcactggggtttgtaacctggatgagcttccaaattagccctggagcttttaaattgaccaattcttggagtgggctttagaatctacataattaaggaatatctgaagtgattatgatgatcaacctggtttaggacccactgtgttaaggtaaacagaatatcattctctcaccaatcagtacaaattcttctttaccctggggatataggcaagtgggtattttgaaggccagcagagccacacctgggaagcgttagaatccacctaaccacgcagcctgccacaatgtgggattagctggtttggcttgattactaactactgtctggaaccgtgttatgagaaaaagctagaccataacagcacaaarcaaagtttcccaaccttttcctaggcaatgatatacctgtaaaagtgttggggcacatcagggggctgccagtgtcaaagatgtagaggcacaggttaggagtccctgaacatacttccaccagcaaatggatccaaacaaaattggaggaaccagggagactaccaccaaaatataatatgcttcatctttcagtttctgca

SEQ ID NO: 596086 - DNA, 547 bp, Homo sapiens
cacactgtggcagatgagaatttaaacccaagtcttctgctccatgcactcatgggcatattcactgcactggggtttgtaacctggatgagcttccaaattagccctggagcttttaaattgaccaattcttggagtgggctttagaatctacataattaaggaatatctgaagtgattatgatgatcaacctggtttaggacccactgtgttaaggtaaacagaatatcattctctcaccaatcagtacaaattcttctttaccctggggatataggcaagtgggtattttgaaggccagcagagccacacctgggaagcgttagaatccacctaaccacgcagcctgccacaatgtgggattagctggtttggcttgattactaactactgtctggaaccgtgttatgagaaaaagctagaccataacagcacaaagcaaagtttcccaaccttttcctaggcaatgatatacctgtaaaagtgttgggrcacatcagggggctgccagtgtcaaagatgtagaggcacaggttaggagtccct

SEQ ID NO: 596087 - DNA, 573 bp, Homo sapiens
gcacctgttcttttcacccccttcgtgttacaagaagtgtgctctcccaagtcctctgctggaacaatctactctccatcctttagagaaaaccctgtgaattcctgcttctgtaattttgcttattattccttctatcttgtatatatcttccttctcctcttcaactctccaatcctttgacggcttcactagttgcttttctggagggctgggatgctttcccctttctcatctccttagtcagtcatggcatttggtacccattgcagtgcactgcctcgtgttgttcatatgcatgtgcctttcaatcatctcgatcatatccctccagcatcacttcttttgtcagcatcaccttttttgttgggtccttcatggtgtccttttaatatcagcaaatcgaatgtagtagatgctcatttaataatcgatatttggattacaaatcatctcaatgagtttagtaagtkgccctagaaccttccttactatgcaatgctttgttaattctatttggattcctttgcaaaatgtttgtttcttttaaagttttttttagaaaaaagaaag

SEQ ID NO: 596088 - DNA, 581 bp, Homo sapiens
atttctttacaaaattttatcattttgtgtgcatttttaaagacttaacaacttacatgtggaagaagggaaattattttaaagcaaagctagttatttattttgacaaaagataaaaaatcaaagagggattttttcttttttttaattttgttattgttcttcttaattttttkgggccaaaggcaggaattttttttcttatctatgaatagaaattctgtgcaatgttatagctaacaaatagagtgttggctttttccccctttccacttttgcaacgtgcttttggaactgccttttatgtattctaaatatggaagtctgcgttacatttggggaaacatacatatactgaaaatatattctcccaaatgggcctaggtatttcagttgccagaaatctatttcacacacgttagtctagcatcagtctaactgtgatgcctgtaaaaagaataagttgaaattggagaattcagcaataactgcccaataaaaaagattgattttataccagaaataaagttaacctgatttttaattaaaggcaaaagatacatggagatgaccaagaatac

SEQ ID NO: 596089 - DNA, 621 bp, Homo sapiens
cgttttttattatcacatctctaaggaggcttttaaaacatttttttcctaatctcttctcccctgttttataccacaaatacatggcatagctgtttctgtgctacagttgatccttgaacaatgctagtttgaactgtgtgggtccacttacttgcagattttcttctgtctctgccacccctgacacaagaacaccaggcccctcctcttcttcctcctcctcctcctcagccttcaacataaagactgttataatgatccatttttacttaatgaatagtatgtatattttccttatgattttcttaataacattttcttttttctagcttactttattgtaagaatacaatctgtaattacatgtaacatttaaaagtatatgttaatagactgtttatggtatgagtaaggcttccagtcaatagtaggctattagtagtaaagctttgggggactcaaaaattatactcagatttttcgctatgcgggaggtcaccacccctaaaattcaagttgttccagggtcaactgtatatctatacctgttcttcaygcataaaaaaagaaagacttctttcacccactaagaactaatttatatccccttgggggata

SEQ ID NO: 596090 - DNA, 564 bp, Homo sapiens
aggggatgtaaaagcaatggagaaaaatcagtgaaaccaaaagttgaatctttyagaagatcaataatacagacaaatctttagctagactgactgtatcagtccactagggcttccatagcagaatgccctagtctgggtggcttaaacaacagaaatttattttctcacagttctggaggctataattccaacatcaaggtgccagcagggttagtttctggtgagttctctttccttggcttacagaggactgccttcttgctgtgtcctcagatggccttttctctatgtgttcctagtgtgtcttcctcttcttacaaggacatcagtcttaatggattaggatatcaccactatgatctcatgtaaccttagtcacttccttaaaggccctatctccaaatatgatcacatggaagttagggattcaacatataaattttggagaagataaaattcagtccataatacttaccaagaaaaaaagagacttgaattactaataactggaatgaaagaggggacagcactatcaattttacagaaatgaaaaaaggattg

SEQ ID NO: 596091 - DNA, 559 bp, Homo sapiens
tctgctaagggacagactgcctcctcaagtgggcacccccaccgccctgtgcctcctgactgggagacatttcccagcaggggtcgacagacacctcatacaggagagttctggctggcgtctggtggctgcccctctgggacaaagcttccagaggatggaacagccagcaatctttgctgttctgcatcctctgttggtgatactcaggaaaacagggtctggagtggacctccagcaaactccagcagayctgcagcagaggggcctgactcttagaaggaaaactaacaaacagaaaggaatagtatcaacatcaacaaaaaggacatccacacaaaaaccccacctgaaggtcaccagtgtcaaagaccaaagttggataaatccacgaagatgaggaaaaaccagctcaaaaaggctgaaaattccaaaaaacagaatacctcttctccttcaaaggatcacaactcttctcccacaagggaacaaaactggatggagaaagagtttgacaaattgacagaagtagacttcagaaggtgggtaataacaaact

SEQ ID NO: 596092 - DNA, 550 bp, Homo sapiens
cctgactgggagacatttcccagcaggggtcgacagacacctcatacaggagagttctggctggcgtctggtggctgcccctctgggacaaagcttccagaggatggaacagccagcaatctttgctgttctgcatcctctgttggtgatactcaggaaaacagggtctggagtggacctccagcaaactccagcagacctgcagcagaggggcctgactcttagaaggaaaactaacaaacagaaaggaatagtatcaacatcaacaaaaaggacatccacacaaaaaccccacctgaaggtcaccagtgtcaaagaccaaagttggataaatccacgaagatgaggaaaaaccagctcaaaaaggctgaaaattccaaaaaacagaatacctcttctccttcaaaggatcacaactcttctcccacaagggaacaaaactggatggagaaagagtttgacaaattgacagaagtagacttcagaaggtgggtaataacaaactcctccaagctaaaggggmatattctaacctaatgcaaggaagcta

SEQ ID NO: 596093 - DNA, 617 bp, Homo sapiens
gcagtcttttcacagaggttaacagtatggtttctggagccagatggccagatttagtactgcctcttcctctagctatgtaatctctaattgcagtttttcatatctaaggtggttaaaataatagtccttcccccataaagattaagttatgcacatgaagcgctttggacaatatagttgtgcttattttataatcagaaagtgcatgttactttttaaatattatgaaaggagatgatttttacctcagataattactgtctgtagtgcctggtatatccttaaggcctcagctccaacagagagggtgcataggttaacagctgcaatggagacaggcaagcwagtaggatccagtggctaagcagccacagcatttataagaatgctatcactacaccctctgctttgggcccaagttgtttgctctttgctctatttgtcattgtcagctgatcacagaaggccttggaaaaccaagttttgatcgaggcgcaggatcacaggcttccaatcacggagccatggattttcaaatcttgccctcaattgagttacatatggaagtgcaaggactgctttatggtgtttaggtttttaaagttgtctctgag

SEQ ID NO: 596094 - DNA, 588 bp, Homo sapiens
tattcagtgcagctgttgttgtggctcttgagatgttagactcactaataagttattttccagtcttttggcaagaatgaggctataagacaaatggcttgtctcgatgtgttccagctggaagtaaatacgtttttccattgaaaaacaggtcattgcctgaaggtttccaaattttgcctaactgagcactggattaggagttagtaaggaacccaatggttttacgcgattaaggaaatagagrggcgtagtgatccaagccccaggaagaagcgaagaactcttcatttcagtcccaggtttccttgctaacacattttacaaccttgaaaacaccacttagcctttggctgtgcttccttagctataaccctaattatttaatatttgttgaatactcataaagaactggttcctgaagagaacataatgcaaaaacaactagctctattactctagtgtttattttataaggaccccattagcagtatttcacaacctaccgttttgaaaatgcattctgcactagcctagaaaaagatcattcaatatttagataatattcgttagtaatttttcaaatgg

SEQ ID NO: 596095 - DNA, 434 bp, Homo sapiens
atcctcatctaacaaactgtgtttgcatagatatcaccagagttgctaagaactatttgcatctacaaccatgactagtcactgaaatttgcgatattcaatgtggtaccacgcttctgcagcttattcatggatgtgtataaccgatcggttttccctgcagtgaggaactgttttcaaaagcaaatcatatatgccaggatcttyaaaacagttatgctagtgtgggtttttttttctttctgttttgcttgcaatccgtgttttaaaatgaggttccatgattatttatcctagcctcagaagccatggtgaactgttatatttgaagacaacgacacaagttgaaaatcacttaatcagctagggagaatcatttttacctgtttttggattcagtatgtaagtacctccaccacactacaatttacaga

SEQ ID NO: 596096 - DNA, 578 bp, Homo sapiens
caatggaagatggggatacccccatcttatcttagaccttggtcccctgcagccccattatctgcatcctccctcaatagttgtagccttcttacatctctggtataatatagtgagcaatgaaaacttgcctctctattgaatctcagaaaagagttttactgtcatgatacacacacgttctggcagaaaatttgtagatgtctacatgaaaatctgtgactgtgtatatcattttttwaaaaaaactatgttatcctgcatattttacatgcaccatagttgaaatttaaatgccaaattgtctaggtagcacatactgccaaatgtgccttaaatagacatagaactatgttatttataccctacaaaacaccatgaaaaatctcattttcctaagtgtaaagtgtggaagctaggatgaaagagagtgtttcacttgacttataagctttaaaaatattaaaaataagtcacccaaaactaaagatttgtgaatgtgtacacaatttttaaaaattctttcaggggatacaaaagcaaaatatttgaagaacatggaattttgccctactgtg

SEQ ID NO: 596097 - DNA, 632 bp, Homo sapiens
ttgaaagttatgtcattccagctgtcaaaggaggagtcttgggaaatcactaactttgcattctgggcctgatagtctgggatagtgatctgagccaaaatggcctggactggtgctgggggtgagccttgttggggaaaaggctaaagctacctaaaagtttgctcttttaaatcagggttgcctgatgaaccagggtcaagctgaggctgactttggtgggaagtttccctgcttgtcttacccttttaaatgcaggatctttaaaggcaatgactgggcatgtgcacagttattttctactacttacccagggtctgtcataatttatagttgattgataaacaattgttgaatgagttggaaaagcaaggaagaaggggagttgaagtaagtgacttaggcagagactaaacagcaattaggcctgaagcctgatacttagtcagctgaggtgcgcaagatcagcactttctaaattatgggatgctagatagacttctggtgatgcctgggtgcaatggcgcataaggaaataaaaatggmttccaatttctgtaggaaaaactcataaagacatctttcaggaactgagtcaatgaacatagttttaaaaatgtatacctgtgttg

SEQ ID NO: 596098 - DNA, 632 bp, Homo sapiens
ttgaaagttatgtcattccagctgtcaaaggaggagtcttgggaaatcactaactttgcattctgggcctgatagtctgggatagtgatctgagccaaaatggcctggactggtgctgggggtgagccttgttggggaaaaggctaaagctacctaaaagtttgctcttttaaatcagggttgcctgatgaaccagggtcaagctgaggctgactttggtgggaagtttccctgcttgtcttacccttttaaatgcaggatctttaaaggcaatgactgggcatgtgcacagttattttctactacttacccagggtctgtcataatttatagttgattgataaacaattgttgaatgagttggaaaagcaaggaagaaggggagttgaagtaagtgacttaggcagagactaaacagcaattaggcctgaagcctgatacttagtcagctgaggtgcgcaagatcagcactttctaaattatgggatgctagatagacttctggtgatgcctgggtgcaatggygcataaggaaataaaaatggcttccaatttctgtaggaaaaactcataaagacatctttcaggaactgagtcaatgaacatagttttaaaaatgtatacctgtgttg

SEQ ID NO: 596099 - DNA, 621 bp, Homo sapiens
cgttttttattatcacatctctaaggaggcttttaaaacatttttttcctaatctcttctcccctgttttataccacaaatacatggcatagctgtttctgtgctacagttgatccttgaacaatgctagtttgaactgtgtgggtccacttamttgcagattttcttctgtctctgccacccctgacacaagaacaccaggcccctcctcttcttcctcctcctcctcctcagccttcaacataaagactgttataatgatccatttttacttaatgaatagtatgtatattttccttatgattttcttaataacattttcttttttctagcttactttattgtaagaatacaatctgtaattacatgtaacatttaaaagtatatgttaatagactgtttatggtatgagtaaggcttccagtcaatagtaggctattagtagtaaagctttgggggactcaaaaattatactcagatttttcgctatgcgggaggtcaccacccctaaaattcaagttgttccagggtcaactgtatatctatacctgttcttcatgcataaaaaaagaaagacttctttcacccactaagaactaatttatatccccttgggggata

SEQ ID NO: 596100 - DNA, 610 bp, Homo sapiens
ttgaccttctgcactagtttgggttctcagaatcaggcaccaagacatgtttgacatgcaagaratttactgggagaaatacctgtgaaagataaaggaggaaaagaggcagtgttaggggaaacttcagattcgacacaggtctggcaactgtgaacagattcgacacaggtctgacacagggagaaaagcgggggatcaggaaggaagagtttcagactgcagtgaggttctaagaatggggagtcctggagctgaagggactgtgcgggtccacagccctcacatgggtcagcaggagcaactctttccccaccccatgctcacagctctgccaggagcagccagggcaggataacacagcagagaattgagatgggtagctctgagctgtcattcaaatacactcctcagagcagcatatttctctggctgcaaaacccactgaaatccctttctgcattgcttaatttaagcaattatttaataaattatttatttatttattatttaagcaataatttaagcaagttgctgacttcacagttcactaagagccatgttataagctttggattttgtgcttgaatgtgcccatcctgcactattc

SEQ ID NO: 596101 - DNA, 610 bp, Homo sapiens
ttgaccttctgcactagtttgggttctcagaatcaggcaccaagacatgtttgacatgcaagagatttactgggagaaatacctgtgaaagataaaggaggaaaagaggcagtgttargggaaacttcagattcgacacaggtctggcaactgtgaacagattcgacacaggtctgacacagggagaaaagcgggggatcaggaaggaagagtttcagactgcagtgaggttctaagaatggggagtcctggagctgaagggactgtgcgggtccacagccctcacatgggtcagcaggagcaactctttccccaccccatgctcacagctctgccaggagcagccagggcaggataacacagcagagaattgagatgggtagctctgagctgtcattcaaatacactcctcagagcagcatatttctctggctgcaaaacccactgaaatccctttctgcattgcttaatttaagcaattatttaataaattatttatttatttattatttaagcaataatttaagcaagttgctgacttcacagttcactaagagccatgttataagctttggattttgtgcttgaatgtgcccatcctgcactattc

SEQ ID NO: 596102 - DNA, 556 bp, Homo sapiens
gctcttcctctggagcactgtgctgtgctgtatgttgtcctcctgcatcgcttcctgtttcatttccatatggtttccaaagacaatttccattagtgttactattttcaaataccattaggttgccaaaaatattataccatcaaaaactggtgtgttgatgttttgacagtcaggcctattactaatttagcaaaatgtgctaccatcctctaaattagcaaccattagcattttctagagaaactagatgcactagctagggagagggwaaaagcttgagataattcctgaggtaaaatgaggtaaaacagtaatagtaattaataattgaacactgaccttactaaatactcacttttattgttgttgttgttgttattaaattgtcactataatcttgtgatctaggtaaatatttcaactttatagataaaagttattaagattgaaaagttaaatagttttgcataattttaatactaataaagaaaaggacaaaaattctagcccagctctgcttaaattccaactgagttttaagagggaatcagat

SEQ ID NO: 596103 - DNA, 661 bp, Homo sapiens
aagtttcaaaagtagtattaaaaatcattagatacattccttaccttctctgtattcttctcttaatttgtgtcttattttagaaagaagtatgattttaaaaaagacagagaacaaatcctaaacatctctctggatatgtattatttaatttagtatatctctcatatactataaggcagatcttgtaaagaaagaagacacaaaaggaggagatatggaatgataggcagtatttttaaaaagatattaagtaatgtatttaaatgttcttatatatatttcatttgtttctcacaatatccctatgatgtagccattttaatatgacttttgagaaatgcaataattaggttgtatagagattatgtgattgctcatgattctattgacagaaagtaatgggaacaaggtttcaatgtccttgacttctgccttctgtyatagaggacccattaagaagattgcagaggaccacaatttaaagaaaagataaacatcatatgctatggattgtattgtgccagctccacccaaaatttatgtgttaatgccctaaccctcaatatgactgtatgtagatagggagatttcaaagtaaataaggttaaatgaaatcatcactgtgactcataagcttaatcagacatgtcaccagaag

SEQ ID NO: 596104 - DNA, 614 bp, Homo sapiens
agtcattcacttacattgcatttactgagcttcaattttggtcagactgaaggtatatgatgagattccaaggaaatcttggatataattaaaacaagtctgatgtaatttttaaaaatattatgatttgtggctttttccaatgtaggaaatgacctttccctaaatactctgtagtgtgacttcaaaatttctattccctgatttcaatacaatacaatatgtaaacaataaaatttctatttgaaccctaacatcttatttaaatgtttatgtgtagatccaaaatgttactgtatgggtttctacatctatgagacagttacttaccccattcttgtcatccagcaataggtgtaacagtaaaactactgcacagaattattcacagattaaagatgtacagatggtgtaaatagtatctggcccacagcaaacactcaagaaatgttggctatttatgttagatattwtaattttaaaattccatatcttgataaaagctagggcagggtagagtaagaattattttatagctatgaaaatatctctttattcagatcagctcttttcagagcattaaaaaatactgaagaagagaaataatataattt

SEQ ID NO: 596105 - DNA, 590 bp, Homo sapiens
  misc_feature 570, 571, 572, 573, 574, 575, 576, 577, 578, 579, 580, 581,582, 583, 584, 585, 586, 587, 588, 589, 590: n = A,T,C or G
gcttcgactctggagccaatcacctaactcctctgtgcttcaattttcttatctgtaaaacagagtcaataatcatcacagcattgttatatggattgcatgagttgctgtttgtaaagtgctcagaacactggcacatagtaactacttaaagcttcgtaagacaaaaaaactgagctgacaaagtccaccgtcacaactcagttctactcctctgccaacacggagtagaacaccatggccttttaagagcaagtggcttctagagaacaacctccgatatatgcacttcccattgcccacaattattaagagatgaaaactaccaagacatctaaaaattaactaagggaaatactaccgccagaaactcagaggaatttgycctaagtacaaagccaaggaacagaatgggacctactgacctacttagtcttcactgcagaaaacagagtcctcacttcttggattgtctaaggcatcctgggtcaaatgtagctagagaaccaggcagctgctctctactgaggaagcagtgttctttcaaacagttcactcattattctaacnnnnnnnnnnnnnnnnnnnnn

SEQ ID NO: 596106 - DNA, 504 bp, Homo sapiens
atttatttttccaccaaaacgaaggagacaccctccctgtctgccagagagcacaggcaagctagaaatcacgtgattgttctcatgtagatgtgcattcagaagaaattatatctcatttttattcaagcacgcacacagcaggcaaaccaaataaatgtattacaacatatgcctaaggaatgtgggacatccttccagtaaaactcaagctggaaatcctatgaacttcctcatgtggcaatgctttcwaaagtaccagttgtcactgaccatcagactgtcagtgaataaaccttacaaatgtagtaagtgtcagtagtctttcagtcaaaagtaaagcctcattgtccatcagggaactcacaaagcaaaaatagtaaaaatatagtaagttatgtcatttttttgtgatggctttgcaacatattgaatacctttattgtaaaaaaaaaaaaatctggaatcatccaggaaaccactacttccatgccattataacaa

SEQ ID NO: 596107 - DNA, 606 bp, Homo sapiens
ctcttttttctattcccttccctcatcccaatccctgtcttcactcccaggcaattaacaacaaacatcacaggtaactaggaggagagcaaggaagggagtccacctagagagacctagaacagattcaaaacagtggggcaatatttccaatattgcaggtagttctttggcaacactttactgacaaacattctttggaaaatcatctacttttttgctctctattttttaaaatattttaactttcattttagctgaaaggtgtatgtgcaggtgtggtatataggtaaacttgtgtctgagggttcatcattgtgcagattattgtgtcacccaggtatcaatcctagaatgcatttcttttttctgatcctctcccttcctccaacctcctgtaggccccactgtctgttgtgtctgcccctcttatgtgtccacatgttctcatcatgragctcccacttctcacttataaatgagtacatgtggtatttggttttctgttcctgcattagtttgctaaagataatagcctccagctccttgttcctgcatctgtgttcctgcaagggacatgatcttgttctttttatggctgcatag

SEQ ID NO: 596108 - DNA, 558 bp, Homo sapiens
cagcaaaatggcttattttttcctgtatttatcaggttaaaatagggataatgcctttatctggttagctctaggcactaaccatatataaaggaaaataaaattacccacctgtggtctccattatgtgaaartttgatttttttgcattaggagagtaacaataactgttaagaaagattcatcttggcatctgttgccagaatactgggagcagtaacttacaagacacctgtgagccatgggaggttgagtggagtgttggataccacagcctatacagcctctgtaagactgtcagtgttactggatgaatgctggactgatgttactgggaaatgacattggaataatacacatcccacatgacagtaaacattttcttgattgattgatgtagaccttgccaattaaaatagctcaagggagattcagaagtgagcagacagagccacacaaaagatcaaatcttagggctttagcatgtcatttccaagtacatacattgttttcaaactatatgttgttttcaaacaaattcagtactataaattttcc

SEQ ID NO: 596109 - DNA, 602 bp, Homo sapiens
agtcttttttttcctttggtttttttttttttccattcactctgacaagttctgtttttctgttggtaacaactgatgtttagagtaattattaatttagttggtttacatctcccttatttgttactattttttctgttttctatttttcgctcttgttatttttttgttttccactcttttcttgccttctctagttttaattattttatatgattctatttttctcctctcttaggatatcaattatacttattttaaaatattttttattggttgctatgccttcgaactacacatttacaatgaatccaagtttcatttcacataatgttgtatcacttcaccagtcgtgaaagtaccttggaatagagtattcctaatctctctcttgcatcctcctgtaacattacggtcatttatttcattttccataaactatcattactgagagtttgaatactattaaaackaatgagaatagaaaaagtagaagatgctattttaccccacttattccttctctaatgctcttcctttctttatgtaaaactgaatgtctgacctatagtctttttcttctttctgaagaatttcttacc

SEQ ID NO: 596110 - DNA, 618 bp, Homo sapiens
cttttttatttccctcctctggttttcaagattttgtcattttctttgattttctgcagtttgaaaattatatatctatgtgtaaattttgtggtatttagcyggctttctgttctctgaaattcctggatctgttgtttcatatttatcattaatttgggggaaattctcacttattattacttcaaatactttttctcttcctttcttctcctccttgtattcttcttctgcatacctcacagcttttgtgattctccttcattcttgaacattttgtcctgccatttcattcttctttctctttgcctttttgttttggaagtttctattgacattacttggagatcactgattctttcttctgctgcgtacagtcttttgatgaacattattaacatgtatttgatttctggtatttcctttttattctttcttagagtttcaggcactcttcttacattatctatctgtttttgcatgatttttgacttttaaaattagagcccttagcatatttatcatagttgtttaaaattctaggactagtaatcccaacatgtctgtcatatctgggtctggtttggatgcttacctgtctcttccaactgattttgt

SEQ ID NO: 596111 - DNA, 597 bp, Homo sapiens
aaggtcaattttcagacaccttatttttttttaataattattttcttctttttgagacagagtttggctcttgttgcccaggctggagtgcaatggcgtaatctcggctcactgcaaacttcgcctcccaggttcaagtgattctcctgcctcagcctcctaagtagttgggattacaggcatgcgccaccatgcccagctaattttgtatttttagtagagacggagtttctccatgttggtcaggctggtctcaaactcctgacctcaggtggtccactcacctcggcctcccaaagtgctcggattacaagcaggaaccaccacgtctgacctcagacatcttattaatacattatttcaaagtattttactcatcaaagtacacttgatccccttagaacctcaagacagagaatgcaaactagtgaatgatccttggttaacagttgtctttatttacagggacgttgtcctgaaaaattgctttcagaatcttaagacaaagtgatycattttttatggagggattttataagttgtattttaattttttttaacaaattttacttaatgtgttctttcaagtgaaaacac

SEQ ID NO: 596112 - DNA, 541 bp, Homo sapiens
aggaatgatttaaaagatatgctttgaaacttcatagtgtcttagataagttagatagataggtgttgctattatcctaatatcacagattggaaagtgagacacaggagttgaagtaacttgccaaaggccacatagtaagtaagtggcagagctgagactggaggctagactgccatgtttcagagcccaggcatcagacactgcagagcctcggatgagctgacacaataagagatgttattgaaagcaataactcaattgttcagatgaaaacttgactagaacattatggagaaraagtcaatagtaactgacatttttaacaatgattcttgcaggaaattctcttctacttaagtgttttgttttcaaagtacaagatttgcctttcagattatgttcaaggtctgagctgacaggatctttggcttagcaggaagaatttcagaaaagaaatgttcctgtaacaagacttgaaaacagaaattggagctaggagggcccattgattctgagaaagcctgggaagctcggaacc

SEQ ID NO: 596113 - DNA, 579 bp, Homo sapiens
actgtgaaatacagtttatcagtctcttgaaaagttaaagatagaattaccatatgatgcagtaattccactgtatgtatatactcaaagtactgaaagtaagttcatgctcaccactaccatggacctgttgtttctctactggatttctcagaaccaccaaccaagctccactcatggctgctgcctgccctgagcctcacacacccaggcacctagagctcatctcattcttgttggaggtaaaggagggcttaaagcccattttattttgttcagtcactgasagaaagcagtctttgatcctagagttaacaaccttccaatttcccctcaggactgagtgacttctggagaaaatattcagttctaaaactggcaaaattttgggccaatcaggattaattggtcaccatattttggtccccaaaagaaatacagctcttaagtttaaaatttgttgctattgtttatcatttggttctcaatcacaccattcttttgcctagggaacagtcccttgtcagaaatgtatcttgaggagagatgagtttaaaaagtcagccacacatgatacct

SEQ ID NO: 596114 - DNA, 579 bp, Homo sapiens
actgtgaaatacagtttatcagtctcttgaaaagttaaagatagaattaccatatgatgcagtaattccactgtatgtatatactcaaagtactgaaagtaagttcatgctcaccactaccatggacctgttgtttctctactggatttctcagaaccaccaaccaagctccactcatggctgctgcctgccctgagcctcacacacccaggcacctagagctcatctcattcttgttggaggtaaaggagggcttaaagcccattttattttgttcagtcactgagagaaagcagtctttgatcctagagttaacaaccttccaatttcccctcaggactgagtgacttctggagaaratattcagttctaaaactggcaaaattttgggccaatcaggattaattggtcaccatattttggtccccaaaagaaatacagctcttaagtttaaaatttgttgctattgtttatcatttggttctcaatcacaccattcttttgcctagggaacagtcccttgtcagaaatgtatcttgaggagagatgagtttaaaaagtcagccacacatgatacct

SEQ ID NO: 596115 - DNA, 592 bp, Homo sapiens
ttttcatctgacttcttttgctcaatataatgtttatgaggttcattcatattgtcgcaaataattactatttattcatgctcatatttctataatattccattttaaaataacaaattttatttaataatcctcttcttattgggaatttgactcatttccagatttcagttattacaaaaagtgctgctatgtccatttttccacatgcattttagtaaaccctatatatatgtatatacaattctgtttggtttattcataggaagggaatgatagggtcatgggacttgcrtacgttcagcttttgtaggtaaagcttttgtcttttgaaggtcagtttgcatagtctgaagatgtttctaacacctccacacttttgtttgatcaatgactaagtcatcgtgtaggttgcaatcatatctaatgagtaaaatgtccataatacaaacaaggaatgccatttggaggtggagttgcatgaatatttacttacaaaatagataggctttttatgtaacatccatggaatttctccttatgtgcatttctttttgtaaacatcttctcatttggttgaagtgtaaaagta

SEQ ID NO: 596116 - DNA, 592 bp, Homo sapiens
ttttcatctgacttcttttgctcaatataatgtttatgaggttcattcatattgtcgcaaataattactatttattcatgctcatatttctataatattccattttaaaataacaaattttatttaataatcctcttcttattgggaatttgactcatttccagatttcagttattacaaaaagtgctgctatgtccatttttccacatgcattttagtaaaccctatatatatgtatatacaattctgtttggtttattcataggaagggaatgatagggtcatgggacttgcgtacgttcagcttttgtaggtaaagcttttgtcttttgaaggtcwgtttgcatagtctgaagatgtttctaacacctccacacttttgtttgatcaatgactaagtcatcgtgtaggttgcaatcatatctaatgagtaaaatgtccataatacaaacaaggaatgccatttggaggtggagttgcatgaatatttacttacaaaatagataggctttttatgtaacatccatggaatttctccttatgtgcatttctttttgtaaacatcttctcatttggttgaagtgtaaaagta

SEQ ID NO: 596117 - DNA, 599 bp, Homo sapiens
  misc_feature 430: n = A,T,C or G
taaacagacaatctacaaaatgggagaagatayttgcaaactacctatgcaacaaagaactagtatccagaatctacaaacaaacggaaacaagacatcaagaaaaaaatgattccttcaaaaagtggacaaaggacatgaatagacatttcaacaaagaagatatacaaatggctaacaaatatttgaaaaaatcctcaacattactgatcatcagggaaatggcaattaaaaccacaatgagataccaccttactcctgcaagaatggccataatttaaaagtccaaaaataataactgttggcatggatgtagtgaaaagggaacatttttacactgctggtaggaatgtaaatagtacatcttctattcaagacagtatggagattcctttaataagtaaaagtaggatttacattttgatctagncatcctactactaggtaactacccaagggaaaataagtctttataagaaaaagacacatgaacacgtttacagcagcacaactcacagttacaaaaacatgtgcccatccaccaatgaatggataaagaaaatgtgatatatatacaccatggaatactactcagcaat

SEQ ID NO: 596118 - DNA, 634 bp, Homo sapiens
tgaccacacagggagtgcttggggtggttcggggccctgaccttgctgctccataatgaatgactcatttcatcttctctgcaataatagaaatggggaaactgagactcaaaggtcgagaaagttcacagggttgacatgacccgtaactggcagaaaggtaatttgaagactcattaataccatcctaaagctatgccaaaaagctcartgccactctgacttggctgtttgtgtactagaaaaatttgtattgcttagtattcaggataccaaggagacgttgtgatcttgttaggcagaataactgcttatctcacctaaatctaattattttcaaaagaaatgtaggaggtaaggtttctcctccataattcagctgctgtttgcattggggtttacatctttttccactaaacaactttagacagacaagtcacagcttgggagcattcctcttagcctttattttcaaggtgatttgcatatagtttacataaatctgcataattgccatctttgagagtccagaaatggatttctctaatcaggaagcaattctcacgatctctctgttagtggctccaggtaaacgtgtaccctctgtgaaatcacttttgaaaagaaaaacaca

SEQ ID NO: 596119 - DNA, 519 bp, Homo sapiens
gtcatgcttcccttgtgactctacacccttctttttagcacctatcgcaatctaaattacagttttaatttgtttgagatattatttacccttactcaaaactttattttgcttttattacccatctacattctcaccctgatcccaagcaccacagaaatgtgggtcttgtcattctggttctttgctgtatcttccatcccctttccttatcctcaggacacacaycattgtctgacccaaagggcacccaccgtcaatttggatgaatgataaattatattgagttcctaatcagaatctaaatacaaagggagtgtggtgaggtggacagaagaggataaaactaagagaaaaaaacatgcagacagaaatacctggaatcagatgtggaggcagtgataaaagattccaataaatgtgaaactacagttctggccaccaaaaccaagtctcagacaaagtaaatgagaagtctggatagtcagcagtcattttcaatgacttcaatgaatttca

SEQ ID NO: 596120 - DNA, 538 bp, Homo sapiens
aaataaaagttttgtatgcaatcaaatttactttgttatcagcttaaaatagagagttataacyataagttgttttatgtaagcccccctatgatatgaaaaagacaaaataactagtagatagacaaaagataaagagaggaagaaaattaaaacacatcactacaaaaatctaaacgtcaaaaagaaagacagcaagattgaaagaaagtaacaaagaaactacagaacatttaataaacaattaacaaaatgtaaatactaagtcattacatcaataattaatttaaatgtaaatggattaaattatctaatctaaaaccacaaggcatccaaatagatagtaaacaagatcaaacaatatgctggctacaaaagaaacactctagccttaacaacctacacagatcaaaagtaaagttatgaaaaaaccatattccatacatttgacaaccagaagagatcagggatggctatacttctatcaagaaaattagattttcagttgatactctcacaagagacaaagaatgtcact

SEQ ID NO: 596121 - DNA, 538 bp, Homo sapiens
aaataaaagttttgtatgcaatcaaatttactttgttatcagcttaaaatagagagttataaccataagttgttttatgtaagcccccctatgatatgaaaaagacaaaataactagtagatagacaaaagataaagagaggaagaaaattaaarcacatcactacaaaaatctaaacgtcaaaaagaaagacagcaagattgaaagaaagtaacaaagaaactacagaacatttaataaacaattaacaaaatgtaaatactaagtcattacatcaataattaatttaaatgtaaatggattaaattatctaatctaaaaccacaaggcatccaaatagatagtaaacaagatcaaacaatatgctggctacaaaagaaacactctagccttaacaacctacacagatcaaaagtaaagttatgaaaaaaccatattccatacatttgacaaccagaagagatcagggatggctatacttctatcaagaaaattagattttcagttgatactctcacaagagacaaagaatgtcact

SEQ ID NO: 596122 - DNA, 538 bp, Homo sapiens
aaataaaagttttgtatgcaatcaaatttactttgttatcagcttaaaatagagagttataaccataagttgttttatgtaagcccccctatgatatgaaaaagacaaaataactagtagatagacaaaagataaagagaggaagaaaattaaaacacatcactacaaaaatctaaamgtcaaaaagaaagacagcaagattgaaagaaagtaacaaagaaactacagaacatttaataaacaattaacaaaatgtaaatactaagtcattacatcaataattaatttaaatgtaaatggattaaattatctaatctaaaaccacaaggcatccaaatagatagtaaacaagatcaaacaatatgctggctacaaaagaaacactctagccttaacaacctacacagatcaaaagtaaagttatgaaaaaaccatattccatacatttgacaaccagaagagatcagggatggctatacttctatcaagaaaattagattttcagttgatactctcacaagagacaaagaatgtcact

SEQ ID NO: 596123 - DNA, 538 bp, Homo sapiens
aaataaaagttttgtatgcaatcaaatttactttgttatcagcttaaaatagagagttataaccataagttgttttatgtaagcccccctatgatatgaaaaagacaaaataactagtagatagacaaaagataaagagaggaagaaaattaaaacacatcactacaaaaatctaaacgtcaaaaagaaagacagcaagattgaaagaaagtaacaaagaaactacagaacatttaataaacaattaacaaaatgtaaatactaagtcattacatcaataattaatttaaatgtaaatggattaaattatctaatctaaaaccacaaggcatccaaatagatartaaacaagatcaaacaatatgctggctacaaaagaaacactctagccttaacaacctacacagatcaaaagtaaagttatgaaaaaaccatattccatacatttgacaaccagaagagatcagggatggctatacttctatcaagaaaattagattttcagttgatactctcacaagagacaaagaatgtcact

SEQ ID NO: 596124 - DNA, 680 bp, Homo sapiens
aaggaaataacaaatgtcccttgacagatagattttttaaatgtgatgtgtatgtacactggaatattatttagccttagaaaaagacacttataacatggaagaaccttgaggacattatgctaagtgaaataactctattaagaaaacaggagccaaggagctgaatagatgtttctataaagaagacatacagatggctcacaggtatgggaaaagatgcttgacttcagtaatcaccacccaaaacaaaatgactttatttttttcctttgtttttactttgaaatagaagtaaacctatcagctgatgagaagatcaaagagatgagaagatcaataagaaacagaagcattaagccacctctgaaactaataaactacctaaagtagaactggarggtaatggctattggcaagaaccaggaacatgtgagaccttgggaagcggaagctggaccacacagaacacctatgtggactcactcatatgtggaatataggatatttgcatgttcttgtcaatgatgccttgagctgctcctttgaagtactcactacactcagaattatacattcaatgtatagcacctgctccactgtgaacttaatgagggcatgactgtgtctcatccagcaccccatcctaggcacagtgcattatctgccagggagttagc

SEQ ID NO: 596125 - DNA, 359 bp, Homo sapiens
gtgaagccccatctctactaaatagaaaaaatagccaggcatagtggtgggtgactgaaatctcagctactcaggaggctgaggcaggagaatcatttgaacccaggaggygggggttgcagtaagcccagaccgcaccactgtactccagcctgggcaacaaagcgagactctgtctcaaaaaaaaaaaaaaaaaaaagaatgtcaatctggcgccccaggtaagaccctcaggggctttgcccaaggtctcacacatgccctgagaatgccaggtaatgactcaagattggcagtgaccccatgctggggtctgatctgaaagccagcgtgcttcctgtatggcatgaggatgtgat

SEQ ID NO: 596126 - DNA, 302 bp, Homo sapiens
aatacgcgatgggagagcaagatgactttttctggagacctgctcatccctgttcttctctaataccattaggaatccttcattctgaacctcccataggatgggctgggaaccaggggatagagacaaggtagacagagcagtgtttaaaccagaaacaaaaagagctgaaacaagagcattgtgcagcagaacagagtgtagtgtggggtagtgtggaggagagaccaaggggactgaccggacgccatagccgggwtggaatatttcactaggagagccaatgattttgttctagatct

SEQ ID NO: 596127 - DNA, 537 bp, Homo sapiens
tctgagcccctcttcctgcatgacaaagaccgaatagtggccacccccatacaggggctggggctcacatgttgcccatccctcaatgcctttcaagtgtcttcccacctgcccagcccctgcaggcactggaagctgcaagccacggtgtacattgtacattgtgagttagatagcttgatgcccactctgcagatgaggaaaccgaagcacagagagtttaagcgactcccctgaggccaaatgcacaggcgattgcagggcccagattcaggactccttctcccttttctccacaggcactgccgcctctgagtggtcagcactgcccctcagagagaggcctacctgggtcatttcccagwgaagcacctgaatgatgctcctccctgtttgtctcttcgaggggctgggctatttcagggccaacttcctcaccatcttcacctgcaaggcatttctcctacaagctgggagaagcctgtttcacagaagattcaagagacagagcagatcctgcttaatgagcagtgggca

SEQ ID NO: 596128 - DNA, 619 bp, Homo sapiens
aatgtctgtaaggacatgattgtgagagagagagtagtgaatactaggaaggtgcctcttacaaagtggagcctaagccaggacctaagcaaagattgagagttgagggctcaggctctgcaatgagtgtcagtgaggagctccagcaaaagactgaaatcactcatgctttccttaaacccctaaggaaagggaaggaaagtagccagytcccaatgagctgtcatttcaggcactctcttggcaataagagtaatgttagtttgaatttattgaatcttgctgtgcactcagctggcccattgtatgtatactcatcttaatgattacataacttcacaattcaaacatcagctaagtaaggcctttcctggctgcccatcttacggaactggaggtcattattctaagtgaaataagtctggcacagaaagacaaatatcccatggtctcactcatgtgggagcttaaaaagttgatctcatggagtagagataagtaccagaggctgggaaggtggagttgggggagggagggaagagattggttaatgggtacaaacgtagataaaaaaaataagttcaagtgtttgatagcacagtagggtgactatagttaa

SEQ ID NO: 596129 - DNA, 619 bp, Homo sapiens
aatgtctgtaaggacatgattgtgagagagagagtagtgaatactaggaaggtgcctcttacaaagtggagcctaagccaggacctaagcaaagattgagagttgagggctcaggctctgcaatgagtgtcagtgaggagctccagcaaaagactgaaatcactcatgctttccttaaacccctaaggaaagggaaggaaagtagccagctyccaatgagctgtcatttcaggcactctcttggcaataagagtaatgttagtttgaatttattgaatcttgctgtgcactcagctggcccattgtatgtatactcatcttaatgattacataacttcacaattcaaacatcagctaagtaaggcctttcctggctgcccatcttacggaactggaggtcattattctaagtgaaataagtctggcacagaaagacaaatatcccatggtctcactcatgtgggagcttaaaaagttgatctcatggagtagagataagtaccagaggctgggaaggtggagttgggggagggagggaagagattggttaatgggtacaaacgtagataaaaaaaataagttcaagtgtttgatagcacagtagggtgactatagttaa

SEQ ID NO: 596130 - DNA, 590 bp, Homo sapiens
tcagctaactgcaacctccgcctcctgggcttaagccaacctcccacctcagcctcccaagtagctgggactacaggcagacaccaccatgcctggctaattttttgttgttgtattttttgtagagacggggtttcactatgttgcccaggatggtattaaactcatgagctcaagtgatctgcctgccacagcctcccaaagtgctgggattacaggcatgagctaccacgcctagcccatcaaaatagttcttattaagcattggcaaggggctgaaaatcatctgtagcatgtttamccccaagactgcttttaaaattgaatgtaggagattcccagcctctcccagggtcatagcaataaggccaggtgatcactgccctgtggaactagctcttttcaccagcttggatttgccactttcaaatcagtggatctcatctgttagcaactgattaaaatcacctgggagtttcaaaacagtgctaatacctgttgaccctgaatatctgggcttgtggccaggacactgatatttttaaaagcttcccagttagggttgctaaattttttagtataagtatatc

SEQ ID NO: 596131 - DNA, 523 bp, Homo sapiens
gattaggagtggcagcagcagaggaagggacgagggaatttatccctctgatcttcccaccacactacacttcactccacccctcaaatggaggacatcattgtcatcagtgataatcaatacatggtttttgatgtcagctgaagatagttaccaaggaccagctgtgtattctcaatcaccttgagagactggccttgccaaccggcatgagcctggctgtgaatatttccaggttttataaaatgctttgcagagctttcatgttgatgatgttgktgcgccatattgtaattagcaaatattgggcgatcatctgcatggaagagcttcctgcttgccaggcagatctcatatatgtgtcactccctcagagaggccttttctgaccatgtggtctcagtgtggtctttgtctttgtctagcacatcaccatgtcttaactcttggtgtggcacttggcattgactgacatgatgttgcttatttgacttgtcttttgtctgtcttccctagctggaat

SEQ ID NO: 596132 - DNA, 617 bp, Homo sapiens
tgcttaaataattttttttccttctatgtcttcggtttgataagagttctacagagatggaagaatttgtaatgatgaagcaacagctccaggagaaggaagaattcattagcactttacaagcccagctcagccagacacaggcagagcaagctgcacaggtagggacctcacaaaattaggataaagagctatgaagtccagtgggttattacgcacaagtcaattcagtgagtcactttaaaaaatcctagtagataaaagtatagtagcatgggtgttgcactagaaattagaaggatatgtagtagaagagattaggagatgtgtggtaggtaagtgtgtcattagggaacaccagaaaacctcacaatgtgttatttrccttgatgaattttctatagcctaattgatgactgtttcttagttctgcatgtccagaaactttattttatgacgaacagagattcagtctttttgggactggactcatgctgagttcaaaagagaccaataagtaaaccaaaagaaataaaaataattaggtttattctttcccaaaatatatctatcctaatagaggaataattataggtagattacttagtgagccctgt

SEQ ID NO: 596133 - DNA, 455 bp, Homo sapiens
accccatttctccgtcttcacagcactcaccctatctgaaactatttgttcatctgtctattgcccatctcccttctagaatgcaaactccatgacgtgtgtcccatcttacttgtcttattcacagctgaatccccattcctgataactgtgctcaacacagtaaggactcaataaagttcatgaatgactgactgmctcattttgcagatgaggaaactgaggctcagggaaagtaagtgattatcttaaagtccaccacaaactatctgcagactctgaagtccttattcctttctttaggttatacttttcccctcatctgtaaaatggggacaatgatggctcctgactctaatgagaaagttacaggacctagaaataccccttcctctaggtgggaactcgaattagaacaacacaagcccaggtttcttctccctcttcaggtggga

SEQ ID NO: 596134 - DNA, 596 bp, Homo sapiens
cacaaaaaaaaatttaaaaaaaattagctgggcatggtattgggcacctgtagtcccagctactctggaggctgagataggatcgcttgagcctgggagttagaggctgcagtgagttgtgattgtgccactgcactccagccctggtaacagagagataccctgtctctgaaagtaataataataaaaataacttttagtatgtgctagataagaggggaataaacatttatgtatttaccatcattgtttttgggcaggaagagagaaaagctgctgataacaaaattaaaaaactaaaacttcatgcgaaggccaaattaacttctttgaataaatacatagaagaaatgaaagcacaaggagggactgttctgcctacagaacctcagtcagaggagcaactttccaaggtatggtgactgggtgtagtgtatatttcctaagttgaaaaaacctaccaatacagcagatcttcaccaatcacaaacatttaggatgctaaaatgatacagcactaaataatgttttgttttkttttttcttatagagcttgtagttcagctggactgtaggccacacacagggagaatgaa

SEQ ID NO: 596135 - DNA, 600 bp, Homo sapiens
  misc_feature 276: n = A,T,C or G
gtggtagcaccaacctctctcctcatattgctttgttccctccagcttctyctcagctatgatgtcagatttttaaattatccattttatactctgctttttaatttcatttttagctctgagaccttaaagcagtaatgtcttagagttcattttctttctctgttaaagaaatgatttctaagtttcagcaatcagtcatagcaaccctttaactattatatactcaatacagagctaggtattctgtggaaagtatagttgaagaaatgacancagtcctcaggtgcttgactgacttatgtgaaagtataaaagtattctttgtaattccagtaagcagaaatagctttgtttagggggttgggagggactaaatttacaaagaggcagaatctcagtctaagggagagcttttggaaaaaaaaatagattattgaaaaaattggatttcccctcactggctcttttctgatgtgttgcttctcacttagcaacagctatagtttcctgagctctctccttgattcttcaaggcaacaagacttcgggttttctattaaggtttagtcctgcatggcactgactggttttgccctc

SEQ ID NO: 596136 - DNA, 558 bp, Homo sapiens
actttgcattgcacactggtagctctatagttctggtatggcagtggtagtcccacaccgtgattccactaggcattactctagtggggactctgcagggcaattccaacccctcatttccccttggcattgctctagtggggctctctgtggtggttctgcctcaagacaagcctctgcctgagccccctggctattgatgacatccttcgacatgtaagtggagactaccaagcctccacagctcttgctttctgtgagcctgcagaattagcaccatgtggatgttaccaagttttacaactcgtaccttttgagctgtgrcatgagccatacctggggctgctttgcactaaccagaacagctgggctgcaaggagcagtatcctgaagtggcacagagcagtggtatctcagggcctattcacagaaaccattctgtcctcttagggctttgggcctgtgatgggggctgttggggcagccttaaagatttctaaaatgcattctgaaatgcctttagggctttttcccattgtcttaactgttagaaactgg

SEQ ID NO: 596137 - DNA, 558 bp, Homo sapiens
actttgcattgcacactggtagctctatagttctggtatggcagtggtagtcccacaccgtgattccactaggcattactctagtggggactctgcagggcaattccaacccctcatttccccttggcattgctctagtggggctctctgtggtggttctgcctcaagacaagcctctgcctgagccccctggctattgatgacatccttcgacatgtaagtggagactaccaagcctccacagctcttgctttctgtgagcctgcagaattagcaccatgtggatgttaccaagttttacaactcgtaccttttgagctgtggcatgagccatacctgsggctgctttgcactaaccagaacagctgggctgcaaggagcagtatcctgaagtggcacagagcagtggtatctcagggcctattcacagaaaccattctgtcctcttagggctttgggcctgtgatgggggctgttggggcagccttaaagatttctaaaatgcattctgaaatgcctttagggctttttcccattgtcttaactgttagaaactgg

SEQ ID NO: 596138 - DNA, 478 bp, Homo sapiens
tgacaaacctccccttggggagatgtgagtgctcagctggtctagctctgtggataggatccacagccttgagatcttggcagagggagaccagacggctggcaaggcaggaccccagcactgggaaaccactggctggagagttcctgcctcccaccctggggtggggctccgctgcatccttgggtcctgtgcatcctcctgtcctggcccaaatctacctcttctgaattggtgtttctcagagtctttccagggaggacccgttgtcccagaatcacctgcagtgtttggtagagctcggggggtttactctgcagatttctggtcttctcctgaaccatacccactgaattgccatctctggggatggggccctggaacctgcattttttttgagacagactatcgttctgtctcccaggctggrgtgcactggtgtgaccttggctcactacaacctccgcttctagggttc

SEQ ID NO: 596139 - DNA, 495 bp, Homo sapiens
tgtgtaacctactacagagtgaggctgattaatttgatagatttrtgggactactggtataaactaagctgcttcggggtgaagatgaaaagtgttgtgtggagtgagaatttttttttctactgttacatggaatccagtagtcatctgggggctggtggcattgctgacataaggaggtaattgcctttggtatggacgttggtgttctttcagtggccagaagctggaaactcctgatgttcctttcagctgcttcacagggagaggacacgggtgaacaaaagtttgagtagcgaaagacaccccgagagactgtagctgagagaggtttctggggagtttctgaaatgacagggtgacagcttgaatgaggatattggtgaactcagatccactagggatggggaataaatttaagggtgaacctagtttcatccacagcctggtaagaacaggtgacatttaggttacagctataattcacataaaaat

SEQ ID NO: 596140 - DNA, 567 bp, Homo sapiens
aaagtgttcaaaaattttcctggctgcttctgacagcctatgctcagatgtgggggcaaaggaataacttaatgttggaactgattttaaaagggtagcagagcataaaatggcaaatttgcagcctggctatgtggcagagaaagaaaacgtttttatttggcacaggaattcaagaaggatgtgaagtaaccacttgctagagatatttgcataactaaaaaggagccaagtgctaataactaagacaatggggaaaaggcttcaatggcatttccaagaccttcgcagcatatcctcctgtaacaggtccaggggcccaggaggactgaattattttgagggccagggccctgctgccctaagcagcctcaagacactgctcccagcatccaggctgctctagctcctgccrtggctcaaaggggcccaggtacaacttaggctttcattttggagaatgtaagtcacaagtcttggcagcttccatgtggtggtaagcacataggtgcacagaatgcaagaataaagaaagcttggcagcctctgcctagatttcagaaggtg

SEQ ID NO: 596141 - DNA, 532 bp, Homo sapiens
cagaaatcagtagtgatttttcattgttttaatttgcaattttctagttacatatgatattgatagttgatatgcttacttccatctatatatcttctttgatgagggatatccgttcaggtctcttcttcaatttttaatccagttgttcattttcttactggtaaatttttagaattctttgtatattttagataactgttctttatcagatgtgccttttgcaaatattttttcccaatctatggtttgcctcctcattataaaataattcacctttataaatgaacattttaggggtacttacatgtattattaacagaaatctaggtaaataagtagtgtaaaccaaaaactaaattccgaggcrcttcaaccatgtgaatggaccccccctctcagccaagagtattccagagttatcattaaaaaactagttcagaccatgatggaagaggggttcagacatgcctcattatactcctccagcattaacatcaagacagaccttaattctgataagaaacactta

SEQ ID NO: 596142 - DNA, 597 bp, Homo sapiens
ctttgacctcccaaagtgctgggatttcaggcatgagccgccagctggcccacacaaattcttaatttgtttgtttgatgatactttttactatataattcctagccaagactttgttactttgagaaaaaaaaatcaaatgctctttcttcaacatttgcataattttaaaatttgctgtaatattaagtttcacgtagttaaggttttgtgaagacagaataaatttgtctttctcgaagtatcatagtttttaaatttatgatttatagtttaatgcttgttataaagaaatataaatgtcccttaaaaattataaatggatttctaaacttcaaatttacagttgcttgaactatgtattgtagggcattaatacaggataattttcaaaaaagtagttgtctctgtatcttttcctaaaatcacataagattcaattytaattaatattatctgccttattaaagaaaataattgcattccaggtgtaaacagttgtattaatttacttaatgtgaacttactgcttatgttattttctgttaatactttaacaatgaaacacaagtgctagtttgaattagttatgtttca

SEQ ID NO: 596143 - DNA, 544 bp, Homo sapiens
tagtctacgatagtcacttctggtatccttagaatccagctatgcatggctctgcctacatgccttgtgtgtgtgaatcccagaacacagctagagacagctagtggtgcactggagtcagcgcctaccagcttgttaggaatgattgtgagcatctctttccaattccacattcagtgactttaatttggtagcttgaaattgttcatggtagaaatatttacacccagaaattaacaaatgctacaagtcgtatttcccaacctcactcctctaccctgagagctggttgttaaacatttaccagcactctactgtaggaagcacacagccttcctgggcacagcatgcagctattcctttctgaggattcccatttgaaaatggctctgcagtagagtggctcatggtcagagcaaaccacaaatccaggtttggttaggacaatcttgtgctagtgtcctgttctgtttagcatttgaacctgaaatatacacttttgkaataatggatggaatacaagtaatacaattaatggttgcat

SEQ ID NO: 596144 - DNA, 628 bp, Homo sapiens
attttgtgtagagatggagtctcatcatgttgtccaggctggtcttaaactcctggcttcaagacatcctcccttcttggcctcccaaagtactgggatcgtgtgagccactgcacctggtgtcatcatttaaattttatagttttctactaatttataaaatatgtttttctttaagctgctacaaataaatacattaaataagtaaataggctccctaactcattattaaatgagttaggcttcctaacctattattaaacaaataataggcccagtattgttcccaggattatatgacaagataggaaccctagcacccagtctccttaggcacactatgcaactatgtttttctgaggtattgccgcttaccaagggtrctgtgatagtgtggtacgtggtcagaatgaaacataccttctggtttgcctggtacaatccagtgaacacctgttatgttcacttctgcagcatttgtcctgaattgcttattttgtaatgaggtatgaattacaaataaacacatgaaaataaaccagaataggttcggtagactttgatgttataattccaccttctgccaaagtcttgtaatctagggcatgaagctcataaatagcagtta

SEQ ID NO: 596145 - DNA, 432 bp, Homo sapiens
agtcattttccaaatattgaaagtcttcagaatgatacaagaatcctccatgtgggcacaatgcaatgttttacaaataagckttatcagtcacttttttagaaagatgtcaatggatattttaataatttaatgtccttcttgattggattctaatttgtaatgcacacactacaaaaatattagggtcagagttacacaatgctgctaaaagcattctataatttatcaagatatgtgtgcatgtatacataaatatgtgtgtgtatccaagtaatataattatgtataacatttaatattcaacttcagactcatatttagttgccacaccctggtacagaagtctaattggactggtgtctgctctgataaaattaccctaaacagatgtcaaaaatttttaaaatattactctctgtaaaacaaggt

SEQ ID NO: 596146 - DNA, 571 bp, Homo sapiens
gatccaaacatgctattttcagtatgtattagagtttccttactttggtttttccatcaaaatcatacactagaattcgatattctcctttcaaataaagcaaattccccgttgtcttcaagaaagttgttcttagccaccttgaatttaaagaggaaaactccaacagcagtcaataaataagaaacwcattggttacttaaaaattctctcttgggtattgtccaagagactctagggacctggggaaatagagtattttaagagaaacagaaacatacttcagagaaggaggtattgaatttcttcatgaatgtttttatgtttaggctctgttgaactagggaatagggatttaaacagcctgtatcttcttttaatggtgtatcttggttgcatacccatcaaatgataagaattacaggaacactgggtgttctatttgattctaaaaaaaataagactatgaaaacagtaaaagtagatgaatgatgggcaaaatcttgtctagaaactaagttcccagtgagaggtgcatcagataaaatcaaggtccaaagacaactaggtg

SEQ ID NO: 596147 - DNA, 442 bp, Homo sapiens
agagtaattctcttaagagcactttcctttctaaagtgatataagcacagctaattggccggggatgggatgttagagagctttgcaatagagaaaacaaggttatcactgcccgcttctagcactaaaactgcagacgtgagggtagtggagcccaagcaaaagacttttcgtggtcgaatggtggagactgcaggtctatgacagttttcacatacaacccaatatctragtgctgtatgagccacggcaagagaagtgtctatgtagaaaatctcaagaatgccacaatagtgcagggaaaatagcttccttagtctcaggttagaaagaaattaaaacatgctgagaggatcagctaactagtagaggactgaaattgtgactaggccaactcagagaacaagggttttgagatcacaaggcataacgaggccatgga

SEQ ID NO: 596148 - DNA, 593 bp, Homo sapiens
aagagaaatttaagatttgcttgctggagtcttgatttaccacattaaatggtccggttgcctgaaggaagcaaggagggagctttagcttaatgtgcctatctaggaagtatcttcattacctttctgaagattttcttttccattttcrttgcaggagaatgaagtgagtgaaagtagtttccgtctttctatttggcattttgagatacagggagagagtttaacaacacatggactcaaactcccagttgagcagttgagtatgtgttaaggcttttttccttcagaggattttatggtttatatattcgttagcgatgcatgaaaatatctatccacaccttcacacattccaatgtacaacgtgatagacattctatgccaatattgtgtaaatttggatttcagtgagtgaaggtgactatttcatataatttttattacttgttttcttttcatatatgctagtctaatgaaagatataataatgccagaatatcaaacatgtataatattgcagtaataaattactccgaaacttagcaacaacaaaactttatcttagagagtttctgtgcatagggtacaga

SEQ ID NO: 596149 - DNA, 590 bp, Homo sapiens
ttaagaacaacagacaaacagacaaacacacgaaaaaactatgtgccatgacttttggtgcaaacgatttagaatatattctatcaccattttccctggcatatctatgttgcttctttctcagagcaataatctaaagatgtgcagcatcaaagtaatattgatggctaatatatagtatttgctatgagccctcaagagtgccagtgtgtctgacagacaactgggtcagatagccaggacatgaattcgaggggatccacaaaggacagttctgcattttccatatctagaggctgtatctgggtcaaaagaatgcactttgcctttgcttcatacagcttgagccagctggactctatccaggaagataatgctgacaaatcctgggaaagcaagaagcagcagcagcttctctctcatcgtgcagcatatgatatcactgtttctcctgagtctctttgtccctttgacrtgtagtaataattaaagcatacagatctgcatttattagaggccaaatagcaggcttgaatattgagtcagaagtttctgtacctataagtcacatagcaaagtgcataaagcaa

SEQ ID NO: 596150 - DNA, 456 bp, Homo sapiens
ctaagcagaccaatgccaatgccttagtcttgagcttccagtctccagagttgtaacaaataaatttcttttatttgtaaattactcagtctgtggtattttgttgtagcagcacaaacagactaggtggcratattactgtaactgtcatccataacctccaattccgaatgtctgtgttcatgaaaatagcctttattattcttattattaaaatttataataaatatgtactataaatttgaatttattgaataaatttatagcaataaaatactctttcttaaaaaatatctttaaaaataatatggtagttttactataatattccatttatatagatgatttctgcaactaacgtactccacaagtgatatagatgtttctgggaacaattttgtattccatgtcttctgacggtagtgcaactgcctttctgaaagtttgtgcatggta

SEQ ID NO: 596151 - DNA, 565 bp, Homo sapiens
ggttgcactgtgggatgtgagtttggccagagccttagcattgttatctcatctgtttaacccactccctgagctctcaaagtcctgtctctgattcattctttcttaaccctctgaaccttgaacacaaagagctggcattttagaactggatcagagtagcaagtaccatctaaatccagagtctttgttatggcccataagctcctacattctcaggcctctgtctatccctgcgacttcctctcccgccagcctcccctttcatgcactgccctccttgcaggtttcaaacagatccagcatgcttctgtggcacatgctgttctctctgcctgcaaagsttgtcccgtgggtttctgcgtgacctaattcagatcttgctctatttgtcttcatagcacttatcattattcccatggttatttctatttgttcatttatctctgtctctgaatatatagaatataagcttatgagggcagcagttttgttttgttcactgctacatctccagcacctaacacaatgcttaacagacagcaaatatttgttgattaaatga

SEQ ID NO: 596152 - DNA, 498 bp, Homo sapiens
ctccaggagtcttcttaaggaagatgaaaatcaaaaaaaacacttgattcattagaaggtatcaataaattgaaagtgatagaatgcttcatctaaaaatattgagatatgtgggtaactaggagagaattcagtgttaattaataaaaagaacatgccagtttgaaccacataatgccaattttcaataattttgtcctataaaactataaatttcatattgttcaatttagtagacaactaaggaatcaaamcaatcataaaaattatcttcagggaaaaaatgtacagaaaaggaaatacaataataggtactaactacagctcagttggttattagcattttcattgtcataacagtgtagacactgactattgatctaataaaaataaaagtataattatattgctagactgagtgcttagaaggaattcctgtgtacagtaaatatggggaagataaaaacagggctaaatttttatctttaaaagtggcaa

SEQ ID NO: 596153 - DNA, 544 bp, Homo sapiens
agctgtgtccctgctggcaaccagttcagattggagcaagtcagaaggctccaggagtcttcttaaggaagatgaaaatcaaaaaaaacacttgattcattagaaggtatcaataaattgaaagtgatagaatgcttcatctaaaaatattgagatatgtgggtaactaggagagaattcagtgttaattaataaaaagaacatgccagtttgaaccacataatgccaattttcaataattttgtcctataaaactataaatttcatattgttcaatttagtagacaactaaggaatcaaaacaatcataaaaattatcttcagggaaaaaatgtacagaaaaggaaatayaataataggtactaactacagctcagttggttattagcattttcattgtcataacagtgtagacactgactattgatctaataaaaataaaagtataattatattgctagactgagtgcttagaaggaattcctgtgtacagtaaatatggggaagataaaaacagggctaaatttttatctttaaaagtggc

SEQ ID NO: 596154 - DNA, 634 bp, Homo sapiens
tcataccatagcttatacttaatttactgagggttttatcatgaaagaattttgtcaaatgctttttatgcatctattgagatggtcatatgatttttatccttcatttcattaatgtgagttattatatctattgatctgtgtgtgttgaatcatccttgcatccgagggataaatccaacttggtcatggtgtattgtcctttcaatgtgctgttgaatttggtttgttagtgtgttgttgaggatttttgcacctgtgtttatcmgggatattggtctataattttcttttcctgtagtgaccttatctgtctttagcatcagggtaatgctggccttataaaattagtttggaagtatgctcttttctttaattttttgaagagtgtgagaaggattgtttttagttcttctttaaatatttggtagaattaaagcatgaagccagcttttctttgatgggagactttttattgctaattcaattttcttactaattatttttctgttcagattttctatttcctcataattcagtcttggttggttgtatgttcttggtcagttgtatgtgcccagaaacatatccatttcttctaggttattcagtttgttggcattttcgttcatag

SEQ ID NO: 596155 - DNA, 634 bp, Homo sapiens
tcataccatagcttatacttaatttactgagggttttatcatgaaagaattttgtcaaatgctttttatgcatctattgagatggtcatatgatttttatccttcatttcattaatgtgagttattatatctattgatctgtgtgtgttgaatcatccttgcatccgagggataaatccaacttggtcatggtgtattgtcctttcaatgtgctgttgaatttggtttgttagtgtgttgttgaggatttttgcacctgtgtttatccgggatattggtctataattttcttttcctgtagtgaccttatctgtctttagyatcagggtaatgctggccttataaaattagtttggaagtatgctcttttctttaattttttgaagagtgtgagaaggattgtttttagttcttctttaaatatttggtagaattaaagcatgaagccagcttttctttgatgggagactttttattgctaattcaattttcttactaattatttttctgttcagattttctatttcctcataattcagtcttggttggttgtatgttcttggtcagttgtatgtgcccagaaacatatccatttcttctaggttattcagtttgttggcattttcgttcatag

SEQ ID NO: 596156 - DNA, 582 bp, Homo sapiens
aatccaacttggtcatggtgtattgtcctttcaatgtgctgttgaatttggtttgttagtgtgttgttgaggatttttgcacctgtgtttatccgggatattggtctataattttcttttcctgtagtgaccttatctgtctttagcatcagggtaatgctggccttataaaattagtttggaagtatgctcttttctttaattttttgaagagtgtgagaaggattgtttttagttcttctttaaatatttggtagaattaaagcatgaagccagcttttctttgatgggagactttttattgctaattcaattttcttactaattatttttctgttcagattttctatttcctcataattcagtcttggttggttgtatgttcttggtcagttgtatgtgcccagaaacrtatccatttcttctaggttattcagtttgttggcattttcgttcatagtgttttcttaggattctttgtatttctgtgtttctgtggtatcagttgtagtctcctccttcacttctgattttatgtatttgagtctcttatttctttttatcttagtcagtctagataat

SEQ ID NO: 596157 - DNA, 597 bp, Homo sapiens
agagagagagacagggctcttagtaacaatttcttggtgcagctttagcttgtgtacgtagagtggrcttcctgtaccttcaagaggcccagatcattccagcccttcaaacttttatgtaaagtaaacaataaaatgagagtaaacaataacaaagagaaagttaatagaaataaatgacagaagagagatattaactgtttggtacattacacttagactaaattaagagcttggaaactatgtcagatatattaaccttttaaaaacttccatccagaaattcccatccaatatggtcagttagctgtgtcattgggtagtgtgtttgtgttggccagaaatggaaaggagagaaagagttactacctgaaaagaattggaagagaaatgtttgggtccagggattcctttttttttcctgaaaaaaattgttttttcttttttactcttggttgggtggtaacaaagaatgcactcaagctctaacaataaatgagttgtgtcaaatccagcacatgtttccaagcagaatttaaaaatatgtagagttgtaagaaagtgttagcgattatttttggggaatacgattgaagt

SEQ ID NO: 596158 - DNA, 444 bp, Homo sapiens
cagttagctgtgtcattgggtagtgtgtttgtgttggccagaaatggaaaggagagaaagagttactacctgaaaagaattggaagagaaatgtttgggtccagggattcctttttttttcctgaaaaaaattgttttttcttttttactcttggttgggtggtaacaaagaatgcactcaagctctaacaataaatgagttgtgtcaaatccagcacatgtttccaagcagaatttaaaaatatgtagagttgtaagaaagtgttagcgattatttttggggaatacsattgaagtaacttgaggaaggagtaggaagagggatgctactttttattttatactgctttgtagtacctgactaaaaaaaaaattaaaaagtatatgttaactttataagaaaacacaaatattgtctaagttaaaaattcacaaaaatacgta

SEQ ID NO: 596159 - DNA, 559 bp, Homo sapiens
tgaattacagtaatagttaatgcatctatagtgcttcatagkcgtcagactctgttttaagtgcttcacatacattagttcatctaatcctgtcaataaccttaatgagataggcgctagtatctcaattttatagatgagaaatttgaggcagagagaggttaaggaattgtccaagttcatatagattgtaaattgtacagccaggatttgaacctaggttcttgtggctccagagacttaacatctatagcttacagctttgataggatcaaaaagagaagaattgaattgtaccaagttggctgggaagcatcaagttgtctttcccttccctttctcttcatctaacctcatatcccattccctgcctcaccccaatcccttctctcacttccaaagtgaaatacacctagagtgactgtcttagttagtttgggctgctggaacaagttattaggttggtgcaaaagtcattgtagtttttgtaataattagttggtacaaaagtaattgcgtgataacttttgcaccaacctaaatactatagactgagtga

SEQ ID NO: 596160 - DNA, 556 bp, Homo sapiens
gcagagagaggttaaggaattgtccaagttcatatagattgtaaattgtacagccaggatttgaacctaggttcttgtggctccagagacttaacatctatagcttacagctttgataggatcaaaaagagaagaattgaattgtaccaagttggctgggaagcatcaagttgtctttcccttccctttctcttcatctaacctcatatcccattccctgcctcaccccaatcccttctctcacttccaaagtgaaatacacctagagtgactgtcttakttagtttgggctgctggaacaagttattaggttggtgcaaaagtcattgtagtttttgtaataattagttggtacaaaagtaattgcgtgataacttttgcaccaacctaaatactatagactgagtgacttataaacaacagaaatttatttctcatcattctggaggtagaagtcagagatcagggtgccagcatgtctgggttctggtgagaaccagcttgctggtttccagactattgtatcctcaaatagcagaaagagggcaaaagagct

SEQ ID NO: 596161 - DNA, 556 bp, Homo sapiens
gcagagagaggttaaggaattgtccaagttcatatagattgtaaattgtacagccaggatttgaacctaggttcttgtggctccagagacttaacatctatagcttacagctttgataggatcaaaaagagaagaattgaattgtaccaagttggctgggaagcatcaagttgtctttcccttccctttctcttcatctaacctcatatcccattccctgcctcaccccaatcccttctctcacttccaaagtgaaatacacctagagtgactgtcttagttagtttgggctgctggaacaagttattaggttggtgcaaaagtcattgtagtttttgtaataattagttggtacaaaagtaattgcgtgataacttttgcaccaacctaaatactatagactgagtgacttataaacaacagaaatttatttctcatcattctggaggtrgaagtcagagatcagggtgccagcatgtctgggttctggtgagaaccagcttgctggtttccagactattgtatcctcaaatagcagaaagagggcaaaagagct

SEQ ID NO: 596162 - DNA, 479 bp, Homo sapiens
tctgtattttgcatcacgtgtacaaagtatattagactgtcagattacactttttaaaaacccacratggtttcttctgtaactttttaattttatttcttacatttttataattgatccatcaaaattcattaagtgtaaaggtggcacagatagaataaacttgttctttagatgactgctcagtttcccaacaccgtttataaatccattttcctctcaaaatttctaatgccattttattgtagactaaatactgttaggtatttacatctaattgtcggcttccatagtgtttcattgatttctctgtttagtcaagtgcaggtacagattgtttcaattattatagctttattatatattttaaatacctaataagtctagtccctccactttatacctcttttccagaattcttctgttttgtatgttcattttatataaaaactttggaataagcttgctcagttgaaaaa

SEQ ID NO: 596163 - DNA, 603 bp, Homo sapiens
tattatagctttattatatattttaaatacctaataagtctagtccctccactttatacctcttttccagaattcttctgttttgtatgttcattttatataaaaactttggaataagcttgctcagttgaaaaaaaattgtctagttatttaataatatcaagttaattgtataaattatggtggagaaaattggcattcttgttataactgtaccttcctatccaagaacatggtatgcctttccacctgtctaagtcttctgtggttccctttctcagtgttttaaaaaatgtcttccacagaaagataaatactacatgttctcacttataagcgggagctaaataatgtgtacacatgcaagtagagtgtggaatgctagatggtggagactctggggtgggatgagattggggtggatgatgagaaatgagtaaaatgcatgttactccagtgatggatatgctaaaagccctgacttcaacactgtgcagtatatcaatgtaatgaaattatgctttcactccatacatttatataaataaaaataaatctttaaataataaatcttcatatayattttgcaaattttgttacatt

SEQ ID NO: 596164 - DNA, 603 bp, Homo sapiens
actttttgtatgtttattaccaatagaatattttcttttgtgatgcatctgtgtattttgttgtttaaaacacacatgtgcacacgcatatgcacacacaatcttttcctttatgggtaataatctttttgtgtcctgtttaaaaatcttttccctacccgaaggttaygaagatattctcatagttaccttccagagtatctattacttttgtatttcacatttagatctacaatccaactggaatttatttttgtgtatggtataaggtacgggggagatgaagatgaactttttccccatatagacaggttgacaagactctcttttccccacttttctgaaatgccacctttatcataaatcaagtgtccatatctgtctggatctttttccacactctattctgattcattagtttgttgtctaattttgcactaacaccacattgtcttaattattgtggctttataagtcttaatgtccatcagagtcggtcagtcctctcactttcttgttcctaaagattgacttggctgtgcctggtctttttcatctttatatcaatttaccatttttcacacatgcatacacaaacagaca

SEQ ID NO: 596165 - DNA, 592 bp, Homo sapiens
aagtaagtgtcccaacttgctgccacagtggggatgaggtagttgccttgctgggtctggggcataagaggagagaaggtcccacttcacctgctaggctatggcactakggccactctttcttccccaaactgagacctcagcacagcaacagccactatgctcctcacccaagcatttctccaggccactgaggactgccccctaaccctgtcagggctagtgcttatgcccaatattggggagcccaagttcaggccctgttccaattccatctagctttgcccaatctcccaagacagagcacaggacccagatcattgagcatcccacagcccaacccatcacctgagacacctgagaattacacatgttaatagaggtcaagaataaatcctattgccaccactgcagcaggctcttacctgaaagcatcatctactggccaggaggttgacccacatagctcattacaatatctgctgatacatgtacacaatgcccaagaataaaatgatgctcttgcaacctatgctaccactattgcccataaaccctggccactctcaggaggtcataagcctgctcactc

SEQ ID NO: 596166 - DNA, 550 bp, Homo sapiens
gtagtggcatgatctcgacttactgcaacttctaccttctgggttcaagcgattctcctgcctcracctgcagagtagatgggactacaggagcccaccactacactcagctgattttttatattttagtagagacagggtttcaccatgttgcccagggtggtctcaaactcttgagcttaggcaatctgcccacctcggcctcccaaagtgctgggattacaagcctgagccactgtgcccagcctgatttctaaatctcacataattccctttccccttcaccccatttcaaaaatcaccccatggataaccttttctttttttagttccttgttatacttcctgtgtttctttgtgcaaaagtaaacagaacatatgcaccttgatttttttttactgagccatatatcatggagatcttcctcattttttaataactgcataataatttaaaattcggcaatatcatagtttattcaaccagtccccagagctgattcctagaagtaggattgctggatcaaaggataaataaaattataatttt

SEQ ID NO: 596167 - DNA, 550 bp, Homo sapiens
gtagtggcatgatctcgacttactgcaacttctaccttctgggttcaagcgattctcctgcctcgacctgcagagtagatgggactacaggagcccaccactacactcagctgattttttatattttagtagagacagggtttcaccatgttgcccagggtggtctcaaactcttgagcttaggcaatctgcccacctcggcctcccaaagtgctgggattacaagcctgagccactgtgcccrgcctgatttctaaatctcacataattccctttccccttcaccccatttcaaaaatcaccccatggataaccttttctttttttagttccttgttatacttcctgtgtttctttgtgcaaaagtaaacagaacatatgcaccttgatttttttttactgagccatatatcatggagatcttcctcattttttaataactgcataataatttaaaattcggcaatatcatagtttattcaaccagtccccagagctgattcctagaagtaggattgctggatcaaaggataaataaaattataatttt

SEQ ID NO: 596168 - DNA, 550 bp, Homo sapiens
gtagtggcatgatctcgacttactgcaacttctaccttctgggttcaagcgattctcctgcctcgacctgcagagtagatgggactacaggagcccaccactacactcagctgattttttatattttagtagagacagggtttcaccatgttgcccagggtggtctcaaactcttgagcttaggcaatctgcccacctcggcctcccaaagtgctgggattacaagcctgagccactgtgcccagcctgatttctaaayctcacataattccctttccccttcaccccatttcaaaaatcaccccatggataaccttttctttttttagttccttgttatacttcctgtgtttctttgtgcaaaagtaaacagaacatatgcaccttgatttttttttactgagccatatatcatggagatcttcctcattttttaataactgcataataatttaaaattcggcaatatcatagtttattcaaccagtccccagagctgattcctagaagtaggattgctggatcaaaggataaataaaattataatttt

SEQ ID NO: 596169 - DNA, 547 bp, Homo sapiens
tctgcaggttataacttgttaactcaaagctgcaatcttttccttttagtacagtaatacttttgaaaagggagaggaatatattgcaggtagtttaaaatagtgtttaaaaacttaaagcaatttgttatgaaagaagaagtagaaggtacgtagtctcttcaagatctctcatattcccataatctgtaagggtgtggtgatctaaggaagatcttttgagggataaacctctattcttgtagtagtgccagctgaatacacatcatatttctttctgatgtagttatttatttctgttgtagaattttcatctcattgattatcatctggcagcattcatcacagtgatgcttgcgaggaggcttgtatgggctctcatctcagaggtaacagttcattsactatattctatcacatgtagctagagttagttactagaatgggtgcaggttaaaaacgtgacgtgtccccatttaatgaaacaataaattactttactcccatgtgagttctgccagtactttaaaaaatgtttccctgcagt

SEQ ID NO: 596170 - DNA, 537 bp, Homo sapiens
cttccacctgggcaatgggaataaaaccctgtttctcaaaaaaaaaaaaaaaaaaggcccagatccccaaaagtctatcttttacatgcatcaaaaaatgccctcttttaggataatcttactgcatccaaaggaaaggggttggggatggagcaaaragttatatttacaagtcactcatttaatacttaccagatacttcttaagcatctactatgcacagagacaaggaaagtttacaagaggctcccaaacctcaaggggctgtgccgttgagatgataaacaatatgagaggcatcatacatacgtggaaggtgattaaggcaacaggagtgccaattattcatgaagacaatgtggatctggagtttagaggaagaataaacttccaactggagcagatgggaaactttgtggaggtaaaaattaatttataccatgaaggataagtaaatgaaatggttcttggagttctcaaaattcattctctctccacatgttgaaaagttttatatcatatataatgtaacaaaat

SEQ ID NO: 596171 - DNA, 452 bp, Homo sapiens
aaaaccaggccatatagagataggagctgaggggacatagtgaggtgtgaccagaagacaagagtgcgagccttctgttatgcccggacagggccagcagaagggctccttggtctaacggtgaagccagcgtctgggaagacgcccgttaccaggcggactgtggtccagcggtagcaaaaggtgtcaaggaacaacacccactacttagcagaccgggaaaggggggtctccctttccccgggggagtttagagaagacyctgctcctccacctcctgtggagggcctgacatcagtcaggctcgcccgcagttatctggaggcctaaccatctccctgtgatgctgtgcttcagtggtcacactcctagtctgccttcatgttccatcctgtacacctggctctgccttctagatagcagtagtaaattagtgaaaatactaatagtcc

SEQ ID NO: 596172 - DNA, 452 bp, Homo sapiens
aaaaccaggccatatagagataggagctgaggggacatagtgaggtgtgaccagaagacaagagtgcgagccttctgttatgcccggacagggccagcagaagggctccttggtctaacggtgaagccagcgtctgggaagacgcccgttaccaggcggactgtggtccagcggtagcaaaaggtgtcaaggaacaacacccactacttagcagaccgggaaaggggggtctccctttccccgggggagtttagagaagaccctgctcctccacctcctgtggagggcctgacatcagtcaggctcgcccgcagttatctggaggcctaaccrtctccctgtgatgctgtgcttcagtggtcacactcctagtctgccttcatgttccatcctgtacacctggctctgccttctagatagcagtagtaaattagtgaaaatactaatagtcc

SEQ ID NO: 596173 - DNA, 452 bp, Homo sapiens
aaaaccaggccatatagagataggagctgaggggacatagtgaggtgtgaccagaagacaagagtgcgagccttctgttatgcccggacagggccagcagaagggctccttggtctaacggtgaagccagcgtctgggaagacgcccgttaccaggcggactgtggtccagcggtagcaaaaggtgtcaaggaacaacacccactacttagcagaccgggaaaggggggtctccctttccccgggggagtttagagaagaccctgctcctccacctcctgtggagggcctgacatcagtcaggctcgcccgcagttatctggaggcctaaccatctccctgtgatgctgtgcttcagtggtcacactcctagtctgccttcatgttycatcctgtacacctggctctgccttctagatagcagtagtaaattagtgaaaatactaatagtcc

SEQ ID NO: 596174 - DNA, 516 bp, Homo sapiens
aagcttagtgagaaaacatgtcaaaagcccagacaagctgaaagctgggcctcttgtattagctagccgaattgtaaatgcaaagaaaaagttattcaaggaaattaaaagtgctactccagtgaacatacaaatggtaacaaagaaaacagcctcactgctgatatggagaaagttttgctgatatggtctggatcgaccagccacgacattgccctaaaccaaagcctaatccagagcaaagccctaactctttttaagtctatgaacctccagagaggtgagaaagctacagaagaaacgtatgaaggttaacagcggttagttcrtgaggtttaaggaaagaagctgtcccataacataaaagcacaatgtgaaacagcaagtgtgaatctacaaactgtagcaagttatccagaagacctagctaagatcactgatgaaggtgactaaactaacagacttttcaagggtgacaaaacagccttatactgtattggaagaagatgccatcta

SEQ ID NO: 596175 - DNA, 455 bp, Homo sapiens
agaaattattactaaccaggtactagattaaaaatttttttcacataaatcaataaagaacccaccaggaaagtagaaaccacttcaggaatttacaacagaaattgattcaaggaattagtcacacgagtgactggaagaactgagagccaacatagaagagtgagataagccagagagcagcaagaaaccactgtcacccttatgatacacagacacacagaccaatagaacagaatagagaacccagaaacaaatccacacacctacagcgaactgatttttcacaaaggtgccaagaacaascactggggtaaaaatggtctcttcaataaatggtgctgggaaaactggatatccatatgaagaaaaatgaaactaaacccctatctctcaccatatacaaaaattaaacaaaatagatgtaacacttaaatctaagacctcaaactatg

SEQ ID NO: 596176 - DNA, 434 bp, Homo sapiens
gaattcaaggaggatgcaaagacagggggtagttggaggtcaaggtcatggcagcggtagtggtagtgaccaagtccttaccaagctcttcttgccgtgagacttgctgtgcctcctacttcttaagtttccagagcttccttggttccgactgtctcaaccctgatcttccagccttctggggattccatgaatccttcctgtaacctctgactccccaaamcctttgggggggaatgaataggtaaaggggaattaagttagccagtgtttgcttccattgttttaaatcaaaaattaaatgatacagatagaatatgagctgaattttaaaagaaaggttgaactcatgaaagcagagaagaaagatcatagcatgataggaaatatggcagatatgtgggaatggttgaagaaaaattgttagattcatg

SEQ ID NO: 596177 - DNA, 596 bp, Homo sapiens
ggggagactagcaacaaaacatttctccttctctaaagaccaagatgtagttcagcagcaacttgcaaggattgataaacaagaaccagatagataatgtccatctcagtacactcctgaatgaattggtcaaaacaactgaggccagatgtaaaaacctcagrtctccttcacgccactcacttgatagtatataaaaggtgcttgaaattggccataagcttggaaaaagggatggtgaaatcctgagttgactaagagcacatttcatcgctttgtgcaacaggtgctcaaaatggatattaatctcgatcatagaaatgtcacatacaagtttatgtttcttacatgtacacatttgtgaactgattgtgctataacttagctcttcaattcctgcctttgtgaactgtgattactttgggacactgttctttccacctaactcctgggtttcactgcttgcctgatgtgtcatcttgtcttactgaaggacgaccccatcggattctagacttctgatgtgtggattaggaacatgaatttggtgtgtgtgtttgaatgtaattccaactataggtaattttctggctttt

SEQ ID NO: 596178 - DNA, 596 bp, Homo sapiens
ggggagactagcaacaaaacatttctccttctctaaagaccaagatgtagttcagcagcaacttgcaaggattgataaacaagaaccagatagataatgtccatctcagtacactcctgaatgaattggtcaaaacaactgaggccagatgtaaaaacctcagatctccttcacgccactcacttgatagtatataaaaggtgcttgaaattggccataagcttggaaaaagggatggtgaaatcctgakttgactaagagcacatttcatcgctttgtgcaacaggtgctcaaaatggatattaatctcgatcatagaaatgtcacatacaagtttatgtttcttacatgtacacatttgtgaactgattgtgctataacttagctcttcaattcctgcctttgtgaactgtgattactttgggacactgttctttccacctaactcctgggtttcactgcttgcctgatgtgtcatcttgtcttactgaaggacgaccccatcggattctagacttctgatgtgtggattaggaacatgaatttggtgtgtgtgtttgaatgtaattccaactataggtaattttctggctttt

SEQ ID NO: 596179 - DNA, 596 bp, Homo sapiens
ggggagactagcaacaaaacatttctccttctctaaagaccaagatgtagttcagcagcaacttgcaaggattgataaacaagaaccagatagataatgtccatctcagtacactcctgaatgaattggtcaaaacaactgaggccagatgtaaaaacctcagatctccttcacgccactcacttgatagtatataaaaggtgcttgaaattggccataagcttggaaaaagggatggtgaaatcctgagttgactaagagcacatttcatcgctttgtgcaacaggtgctcaaaatggatattaatctcgatcatagaaatgtcacatacaagtttatgtttcttacatgtacacatttgtgaactgattgtgctataacttagctcttcaattcctgcctttgtgaactgtgattactttgggacaytgttctttccacctaactcctgggtttcactgcttgcctgatgtgtcatcttgtcttactgaaggacgaccccatcggattctagacttctgatgtgtggattaggaacatgaatttggtgtgtgtgtttgaatgtaattccaactataggtaattttctggctttt

SEQ ID NO: 596180 - DNA, 592 bp, Homo sapiens
ggagaaaattagccctagactaaaggttgctctgattcatcctaacaagmttaaaagcaacctcaaaaggacaaatataatatgtgtaagacctgtacactgaaaacttcaaaacattgttgtaaaaaaattaaagacctaaagaaatggaggtatataccatattcttggatcagaagactgaatattgtttagatataatttcccccaaaattgatctatagattaaatgtcatcccccacacaatcttactggcttttttgtagaaatgcaaaagacataagatcaccaaaacaactttcatttaaaaaaaaggataaagttaaagatttgcaatcttgatttcaagatttattataaagttaaaatcattcacacagtatggtatttgtgttaaggcagacaatgagatcaataaaatgaaataaagaatcaagagatatatcatacatatatggtctattagttttcaaaaaaggtgctgaggcaattcaatggggcaaggataatctctttaacaaatggtgttgtagcaactggatagccatgtgattaagaaatgacaaccacccccttacaacctatacaaat

SEQ ID NO: 596181 - DNA, 575 bp, Homo sapiens
aaaacattgttgtaaaaaaattaaagacctaaagaaatggaggtatataccatattcttggatcagaagactgaatattgtttagatataatttcccccaaaattgatctatagattaaatgtcatcccccacacaatcttactggcttttttgtagaaatgcaaaagacataagatcaccaaaacaactttcatttaaaaaaaaggataaagttaaagatttgcaatcttgatttcaagatttattataaagttaaaatcattcacacagtatggtatttgtgttaaggcagacaatgagatcaataaaatgaaataaagaatcaagagatatatcatacatatatggtctattagttttcaaaaaaggtgctgaggcaattcaatggggcaaggataatctctttaacaaatggtgttgtagcaactggatagccatgtgattaagaaatgacaaccacccccttacaacctatacaaatgttaacttgaaacgggtcgtggaccttaaattaatagctaaaatttctagaacacttaggakaaaatcttcattcccttggtttttgcaaaga

SEQ ID NO: 596182 - DNA, 470 bp, Homo sapiens
aaatagaaaactgagccaatataaaagtaataagaaaaactaaaaaawctgcctactttatctctgagccaaatgaatctgcattttgaagtttaaataaaacgtttcggattcttctatattgtagcaaatcagtgaaaacaagtttacattttcctttatccagcatgactttttgctttccctcttttaaaacttggcttctggactctgagcaggacactgcactgaagctcatgcagtaaatacaactggactaaaggagagcactgatttaatggtgtgtaaatacctaagcaaaagaacttgctccatctagtatgttttgctcagttttcacgactacagcaatacagagatcagtgacattatccatagaatttaaatttaaaatatttgtgttggtttggttattctggccaatgtatgatacactatttcttttctttctttgaattagagttatctgc

SEQ ID NO: 596183 - DNA, 561 bp, Homo sapiens
atggcctccagctctatcaatgtttctgcaaaggacatgatctcattcttttttatggatacatagtattcattggttttgttgttgttgttattgagatatttgagttccgtagagattctgtatattagtccctttgtcagctgacaattttttttttgaaagtcaatgtattttgtaaaggtagcaataataaatattgaatatctttgctctcagaaaaatatttatattaattgtttyatcttgttggaaagtttgatctatactagatttatgtaagtgaactgtgaaatattcattaatatagatatatgatgataaaagttttccaaaggtattatggcatgataaaactagttctttcatgtaaagtagactatttttaaaaatattattattagtagtaatagtagtatcattttagagacaggatctagccctgttacccaggctgcagagcagtagtatgatcatagcttgctgctacccttgaatttctggggtcaggtgatcctcttgcctcagcctcctgtgtagctgagactacaggtgcatgcc

SEQ ID NO: 596184 - DNA, 498 bp, Homo sapiens
tgcaaagtcttactttatagayttgagtgttctctgaccactccaaatggaaatattttaatttttcatttggggaatagctgtagtgaccaagtaatattagtaaaaggactaaggaaaactacaaagtaccatcttttccccctcagtactcccctttctccatcaccccacccctgcctgccaaacatacacacacacaaaaaaaacaaaatctggggagacttaataatgctctctacaccctatatatttgagaaggtttgtgggcaagaaatctattttaattttgatccctttctttccataaaggaagtatcaactttgatcattaggtgacatcaaagagcaacataatatactcagatgactaaatgcaaagaactgaaaaactaaattggtcttgcagtaaatcatctttctttaattagacagtcagaaattctgtatctggtttgaaataatattaaacagtttgttatttcctgaaagaaaacc

SEQ ID NO: 596185 - DNA, 598 bp, Homo sapiens
acagggtctcaccatgttgcccaggctagtctcgaactcctaagatcaagtgatccagtgagtgtggttttccatggtttatgttattcatgcrtctagaatatgcttgcatgactaactcattacaagaaaccctgatcataagcagttttgagcttcctagcactgaggtgatttgaatgatctccattggtagattgagaattgtagatgaagccagcattgagaaagattttttgcttgaccaaacattactcaggctcctaaaatttctgggcccatctgtgtacttccttgtaaaatctactttaagcaaagaaccttgctgagtctgcttagcaataatcttccatgcttgataatgtgattcatttcaatatctgatccgttttctcgtcccccacagtttcccaggtgatgtcatatgggcctgttctcagcaagaatcttgttaagtcagcttaaccagaatctccctgacctctgttgtttcctctcagcaatttttcattcactgaccatcactctgcttcttggctataaattcctatttgctcatgctgtatttggagttgagcccaatttctctttcctagcg

SEQ ID NO: 596186 - DNA, 598 bp, Homo sapiens
acagggtctcaccatgttgcccaggctagtctcgaactcctaagatcaagtgatccagtgagtgtggttttccatggtttatgttattcatgcatctagaatatgcttgcatgactaactcattacaagaaaccctgatcataagcagttttgagcttcctagcactgaggtgatttgaatgatctccattggtagattgagaattgtagatgaagccagcattgagaaagattttttgcttgaccaaacattactcaggctcctaaaatttctgggcccatctgtgtacttccttgtaaaatctactttaagcaaagaaccttgctgagtctgcttagcaataatcttccatgcttgataatgtgattcatttcaatatctgatccgttttctcgtcccccacagtttcccaggtgatgtcatatgggcctgttctcagcaagaatcytgttaagtcagcttaaccagaatctccctgacctctgttgtttcctctcagcaatttttcattcactgaccatcactctgcttcttggctataaattcctatttgctcatgctgtatttggagttgagcccaatttctctttcctagcg

SEQ ID NO: 596187 - DNA, 573 bp, Homo sapiens
caaataaataaataacctcttagtaagaaaacttgccttaagaatgttgtaagtagtgaaataagcatctccgtcttttgccttcatatatatttacagcaaaaaccagatgtgaagtaaggcttgtgtaaaataaataaataaataaataaataaataacctcttagtaagaaaacttgccttaagaatgttgtaagtagtgaaataagcatctcagtcttttgccttcatatatacttatagcaaaaacaagatgtgaagtaaggcttgtgtaaaagagatgtgcacaaggaaaatgacagaacattttttagcttttttttccaaattcaatcatattattaaatttaattccggcttttgtaagccttaattactttatctaaatcagaattctcaacagactaattaaaccagaattcatgcaatagtttttttctcaacactcagtttcctctacacaaaaaactagaacaattatatcagaatctctgggtaagcttaggcattgggatttgtggggaaaagttctccaggtgattctrttgtataggtaagcattaagaatcact

SEQ ID NO: 596188 - DNA, 658 bp, Homo sapiens
ttgaggctgcagtgagctatgcttatattactatactccagtctgggtgacagagtgatattttatctctaaaagaaaattaaaaaatacatgaagagtgagaaaggtgacatctggacagattttacaaatattaaaggaatattgcaaacaattttattacaaaaatttgacaatttaaacaaaatagatcaatttttttgaaagacacaaaataccaaacattaagtcaggaaaggaacataagcagaatgctcctatttctgttaactacagtgacttcrtagaaaaacaaacaaacaaacaaacaaaaaagcctttcagacaaagaaaatttcaggttcagctggcttcaatggtacaaattatttaagactaaaatgacaatgatttaaccaaacacttctgaaaaactgaagaagagcaaatacttaaatattttccaactcctgaggccagaactaccttaatatcaaagccattgcagccaatgacaaagacatcacagaaaaatagaactatggatcaatatcattcatgatcaaaagtgcatttttaaactagataaccaaatcaaagaatatattaaaatataataatacacataactaaaaacaaggtatgcaaagtcattttaacatttggaaatcaaccaatg

SEQ ID NO: 596189 - DNA, 604 bp, Homo sapiens
tggtttcatgggccaggccaggcccccctactgtgtgcaggctagggacttggtgccctgcatcctagctgctctagccatagctaaaaagggtcaaggtacagcttgggctgtagcttcagtgggtgcaagccccaagctttggcagcctccatgtggtattgagcctgtggatgcacaaaagtcaagaattgagttttggaaaccttcgcctgggtttcagaggatgtatggaaatgcttgagtgggtccagaaataagtttgctgcaggggaaggtccctcatggagaacctctgctagggcagtgaggaagggaaatgtggggtggaagcccccacactgagtccccactggggcactacctaatggatctgtgagaagagggccaccatcctccagatcccagaatgatagatccacagacagattgcaccttgtacctgtaaaagccacagaaactccctagccagactatgaaagcagctgagagggaggctctatcctgcaaacccagagacagagctgcccaagaccatgggaacccacctcttgcatcactgttacctggataygtgacatggagttaaaggagataattttga

SEQ ID NO: 596190 - DNA, 617 bp, Homo sapiens
ttgacaaaaatagcaaaatagaagtcttttcctccctttgtttgaggcagggtatggatacaatgatgaattcaattttgaatgtgtcaaatttgaaatgttatgagatatctaaggaagatgtccagtaagcagcttactatacaaacctggagctcaggagacttaaatgtagaagtggatataggagaaagtgtagcattatcagaaaagaaggcttgtagcttggaaggagtaggatctggataattaccaatatgtagggaatgggcagaagaaaatgaggtcactaataacaaatcccccaaaacaaaatgtttcaagataaaggaggaaaaccagaagaaactggtacaactaaagctaagctacaaagaacatttcaaaggatggagtggtaaaatggtcaaatgctatagggaaggwaaatacaattaaaaagaaagtattggctttaaatttaacaacaaatgtgattattctttgatggcttttaacatagaattatttgcaaatgatagtggagtagtgagatggtggccccaagaatcaatgtctccatgggttagtgccatgaaagggaggaaaagcaatagaaacagcaggaatataagttc

SEQ ID NO: 596191 - DNA, 476 bp, Homo sapiens
tttccaaggccatatggggaatccacaaacacttagagcgacttcataagcatagaatcatagtcaaatgccagtcactgtggaatacccctctcttgtcagtgaggaagctgtctagtgaatataggctaatgcaggatttgcatgcggtaaaccaagctatagtgaccatccacccagtggtgccaaacctgtatactttaatgggacatattccagcaagtgccacttggtttttacagtcctagatttaaaggatgcatttttctgcctccagctggcaccgattagtcagactatttttgctttccagtggggtcaatcacagtacacttggacaagactcccacagggatttaagaactctcccacaatctttgcagagacactggcctcagatcttaaagactgcacctcacygagcagtgactgtgtcttgctccagtacattgatgatctccttctagcagccccaa

SEQ ID NO: 596192 - DNA, 627 bp, Homo sapiens
gcttgccggtaatcccacctactttgggatgctaaggtatgagcatcactagaacccgggaggcagaggttgcagggacctgagattgtgccactgcactccagctcagcaacagtgtgagaatctgtctaataataataataataataataataataataatattcacatggaaaattaagaccaagtaattctttggggcccaaatgaagagaatacttgcctttattttctttttactttagccagtgacagtgattacagaatttcagaaaaaaaaaactgagggtaaaatttgatgtactgtgaggaactaaaagtttctttctctagttgcggaggatgttccatggctttctttacatggtttttttttttttaattagcatgttgtacataaattgaatcattaatggacaagagacactgaattaaacatacagttattatctttaaatgtgaagacacaatatgtcacygtaaacatcaagacatgggagttttggaggaggaaataaattgatagacacatattgtttttctccacaaatgagaaaccaaaggtccaagagaatacacaatgtgctcaaggtcatatgcttagaagttgtcagaactgagatttaa

SEQ ID NO: 596193 - DNA, 455 bp, Homo sapiens
tagcacctagtttatatccaggcagccaacgaacagtgctgggatattgccccaggctgcatgctttctagctgagaaagcaagcagggctttcaggccccacccctccttacctgccacagcttctgtkctcctgtctgtacttcccattccctccacccaggattctgcccaggaaaatttgcacttggtcaaaattattacaaagttcagctgaaagttttcttctacctgtccttccccaattccactggcagtcctacccagtgacttcagtgagataaagtcagaaatggcttccctgcgaaccaggaatacctacagggctttttcagtacttcttctacttttatattttgttcagctctctaaattcttttcagctctaggtaaggttaaattcttctcccatgatctgggttttcaggttccccggtgaggatgtgaggatgtgt

SEQ ID NO: 596194 - DNA, 425 bp, Homo sapiens
gtattgttgttatttatgtaacttacaaacacaggtttaacaatctcaagttgctatttttaccctcctatctgctattgtaattcaaccagtgaagttctcttttgttaagagttaacatcattgattaggagattttctccctattaaccctcaaatacgcttcatcagactctggatcmcctctgatcttctcttcattataccacacctgtgtagcactgatttttttagcttctgagccatggccttctggtacctccacacatgggtgaacatcacttttggaattgctgattgctgatctggcaacagatatacctataagtgacatcatgatggaggtgccagcatgtacactataaaagggaagattttttagtacatttaaaacacttggggaacaggctaaaacagaaagaatt

SEQ ID NO: 596195 - DNA, 427 bp, Homo sapiens
ggtattgttgttatttatgtaacttacaaacacaggtttaacaatctcaagttgctatttttaccctcctatctgctattgtaattcaaccagtgaagttctcttttgttaagagttaacatcattgattaggagattttctccctattaaccctcaaatacgcttcatcagactctggatcacctctgatcttctcttcattataccacacctgtgtagcactgatttttttagcttctgagccatggccttctggtacctccacacatgggtgaacatcacttttggaattgctgattgctgatctggcaacagatatacctataagtgacatcatgatggaggtgccagcatgkacactataaaagggaagattttttagtacatttaaaacacttggggaacaggctaaaacagaaagaattc

SEQ ID NO: 596196 - DNA, 551 bp, Homo sapiens
tcacaaactatgcatccaaaaaaagtctaatacccagaatctgtgaggaacttaagcgattcaacaagtgaaagccaaataaccccattaagaagtgggaaaacaatataaacaaacactttcaaaagaagacagacaaatggacaacaaacctatgaaaaaatgctcaagattactaagtattakataaatgcaaatcaaaaccacaatgaaatactatctcacaccagtcagaatggctactactaaaaaagtaaaacaaacaaacaaacaataacaacaacaaaattgtcagcgaggctgcagcaaaacgggcaatgcttgtatgctattggtggaaatgtaaattaattcagccaccgtggaaagcagtttggagatttctcaaagaacttaaaacagaactaccatttgacccatcgatctcgttactgggtatacatccaagagaaaataaattgttctaccaaaagacacatgcactcatatgttcatcacagcactattaacaatagcaaagacatggaattaacctagctgtccatccttgg

SEQ ID NO: 596197 - DNA, 551 bp, Homo sapiens
tcacaaactatgcatccaaaaaaagtctaatacccagaatctgtgaggaacttaagcgattcaacaagtgaaagccaaataaccccattaagaagtgggaaaacaatataaacaaacactttcaaaagaagacagacaaatggacaacaaacctatgaaaaaatgctcaagattactaagtattatakaaatgcaaatcaaaaccacaatgaaatactatctcacaccagtcagaatggctactactaaaaaagtaaaacaaacaaacaaacaataacaacaacaaaattgtcagcgaggctgcagcaaaacgggcaatgcttgtatgctattggtggaaatgtaaattaattcagccaccgtggaaagcagtttggagatttctcaaagaacttaaaacagaactaccatttgacccatcgatctcgttactgggtatacatccaagagaaaataaattgttctaccaaaagacacatgcactcatatgttcatcacagcactattaacaatagcaaagacatggaattaacctagctgtccatccttgg

SEQ ID NO: 596198 - DNA, 517 bp, Homo sapiens
tgcaaggtcttttgagcctttggcttacaactcccataatgtcccttccactgcaagcaactggtaaaatcaagtcacaaagaagattaattyttttggtgggatcatcaaataaatgctgcatagcaaagggggatgcaaaagcagaaggatttagtaccttttttaacttttttttttttttttttacaatctactacaccatcaaagtggagatattaggaacatatttagttacatacacctgaggtcgaggagagaaggctgagtcttgatgtccaaaatttaaaaaccaatgggataacgaggacataaaaaagtgcattcgatagattatcagtaaggtaggaggaaaccgagacaagtatgtccaaaagttaaatttcatgttgcaaattgcaccagaaatgactgtgcatttgttgtttatatagtctttaatggcttttctggcagttaagtctctttgaagttatctgaccagtttataatggtaactgttttctctttggcctta

SEQ ID NO: 596199 - DNA, 636 bp, Homo sapiens
ctatgctatgtagagcctcaataagggaaggagaggtgaaataaatcaggagtgtgaaattaagagatgatgacaagcaggacaattttacttggctacatattagaaacaaccaacagtggggtggggctcctagaatggaggcatgaggaactcggcaggcccttgccctagtataacagtgatttaattggtggaaatcataaaaaaaaatcatttaaaatttctgaacattgtcctagaagtacacagtaaacagagaaacaattacccaagaaaattgactaaatgtcagtaagaactctagaaatctgtagtatttgggccacaacacactccattcccctgactcccatctttctcctgctcttctgtgggctccctcaaagtacattgaaaccttacatattttttctctctccatttcttgttttccttcaatgcctaatgcagtgttaagcccttgttatacataactaaatttgttgaacaaaaaatargtataagaatgactacttggttgggaagccgcctgacatttccatgggttactttaacacaggccttaagttttttgataagcacatggaacagtaacctcaaataatattgctcaaaagtgaagaaaatagaatt

SEQ ID NO: 596200 - DNA, 609 bp, Homo sapiens
tgtagctgtcaccatctgaggccacttacctagcccccaaaaggccctaatggccctcagtgccattccaccctgacctggttctctctctgccccctaccatctgatgccatccacacttgtactgccctggcacatcctgagggttcagacctagccgtttttcctctccaccttggatgttcaaaagaagagtacctgtcctaattgaaaagtttggctaaagtagacagctttcacattagagggtgatgggccttggrccagctctgattaaagacaccgtcctggtgtttgccgtcaggatagggcctggaaactggcaggagaagactcttgtgaccattttggatcccttcactgacagtaggtgataaaagaccctctggcccccactattaatgtaactgcatttgtgttatgtatgtgtttccatttgtgctcttttaaaattatgtctgtacatatattaatatattatgtagttacacacatacacacacacacacacacacacacacacacatatatatatattctgcacaactccagtctcaactcagttatccctcttctgtatgtccaagttctcttgtgggcatctgcaag

SEQ ID NO: 596201 - DNA, 614 bp, Homo sapiens
aaaatcacaatacgtattttaggtaatgggccataagggattattttaattgtaagaaaatgtacaaaaaatttgctttttacaaattttctatttaatacgcaataaaatgaagtgacactaaagtacaaaaaagcctgaacagtatgatttctttgtatcaacagtgaagggctcccttgtatatggagttcccaaacagtaagttttcttaatcctgatcatctgtggccagtgtaaaagaaaggcctgacaggaaaagttaaggagccagctgggtaactccatatgagggaactcttggtgacattcaaaaaactcacacttccactttcaaaatcaagaaacacaccaacccggcccagaggtttctctatrtagtgaggaaactctggggaggtggtcaagagactgaaatgattatccaccttcagacacaaaagaagaaatatgtcctcagagttaaccattgtgctattcttccttatccaggagtcgttacagactcccagagcccagtcacaagagttgtccacatccagctcccagtagtgtttcccaaaggagaagaccctggctccccatgcagcaaaatagtcagatctgtcagaatt

SEQ ID NO: 596202 - DNA, 614 bp, Homo sapiens
aaaatcacaatacgtattttaggtaatgggccataagggattattttaattgtaagaaaatgtacaaaaaatttgctttttacaaattttctatttaatacgcaataaaatgaagtgacactaaagtacaaaaaagcctgaacagtatgatttctttgtatcaacagtgaagggctcccttgtatatggagttcccaaacagtaagttttcttaatcctgatcatctgtggccagtgtaaaagaaaggcctgacaggaaaagttaaggagccagctgggtaactccatatgagggaactcttggtgacattcaaaaaactcacacttccactttcaaaatcaagaaacacaccaacccggcccagaggtttctctatatagtgaggaaacwctggggaggtggtcaagagactgaaatgattatccaccttcagacacaaaagaagaaatatgtcctcagagttaaccattgtgctattcttccttatccaggagtcgttacagactcccagagcccagtcacaagagttgtccacatccagctcccagtagtgtttcccaaaggagaagaccctggctccccatgcagcaaaatagtcagatctgtcagaatt

SEQ ID NO: 596203 - DNA, 614 bp, Homo sapiens
aaaatcacaatacgtattttaggtaatgggccataagggattattttaattgtaagaaaatgtacaaaaaatttgctttttacaaattttctatttaatacgcaataaaatgaagtgacactaaagtacaaaaaagcctgaacagtatgatttctttgtatcaacagtgaagggctcccttgtatatggagttcccaaacagtaagttttcttaatcctgatcatctgtggccagtgtaaaagaaaggcctgacaggaaaagttaaggagccagctgggtaactccatatgagggaactcttggtgacattcaaaaaactcacacttccactttcaaaatcaagaaacacaccaacccggcccagaggtttctctatatagtgaggaaactctggggaggtggtcaagagaytgaaatgattatccaccttcagacacaaaagaagaaatatgtcctcagagttaaccattgtgctattcttccttatccaggagtcgttacagactcccagagcccagtcacaagagttgtccacatccagctcccagtagtgtttcccaaaggagaagaccctggctccccatgcagcaaaatagtcagatctgtcagaatt

SEQ ID NO: 596204 - DNA, 614 bp, Homo sapiens
aaaatcacaatacgtattttaggtaatgggccataagggattattttaattgtaagaaaatgtacaaaaaatttgctttttacaaattttctatttaatacgcaataaaatgaagtgacactaaagtacaaaaaagcctgaacagtatgatttctttgtatcaacagtgaagggctcccttgtatatggagttcccaaacagtaagttttcttaatcctgatcatctgtggccagtgtaaaagaaaggcctgacaggaaaagttaaggagccagctgggtaactccatatgagggaactcttggtgacattcaaaaaactcacacttccactttcaaaatcaagaaacacaccaacccggcccagaggtttctctatatagtgaggaaactctggggaggtggtcaagagactgaaatgattatccaccttcagacacaaaagaagaaatatgtcctcagagttaaccattgtgctattcttccttatccaggagtygttacagactcccagagcccagtcacaagagttgtccacatccagctcccagtagtgtttcccaaaggagaagaccctggctccccatgcagcaaaatagtcagatctgtcagaatt

SEQ ID NO: 596205 - DNA, 457 bp, Homo sapiens
taggtgataaaagaccctctggcccccactattaatgtaactgcatttgtgttatgtatgtgtttccatttgtgctcttttaaaattatgtctgtacrtatattaatatattatgtagttacacacatacacacacacacacacacacacacacacacatatatatatattctgcacaactccagtctcaactcagttatccctcttctgtatgtccaagttctcttgtgggcatctgcaagtgatggcatactctttctcaattgactcgtggccagtctcagaacggtgggtccatatgttacggatacccatttatgaatggcctatacctatagacagctggcctgctctttccaggccccttactaagagtattgtggaaaaccttagagcttttgaaaagtaattggacttttagctagaagaaatgaagaaattgcccagaattatcatc

SEQ ID NO: 596206 - DNA, 666 bp, Homo sapiens
ttgtgttatgtatgtgtttccatttgtgctcttttaaaattatgtctgtacatatattaatatattatgtagttacacacwtacacacacacacacacacacacacacacacatatatatatattctgcacaactccagtctcaactcagttatccctcttctgtatgtccaagttctcttgtgggcatctgcaagtgatggcatactctttctcaattgactcgtggccagtctcagaacggtgggtccatatgttacggatacccatttatgaatggcctatacctatagacagctggcctgctctttccaggccccttactaagagtattgtggaaaaccttagagcttttgaaaagtaattggacttttagctagaagaaatgaagaaattgcccagaattatcatcagttagaggaagctctctgtgcctagattttctgacatgagataatagccaatatggctgatcccaacccataattgtatgctcttgacagcttctgttttttttttgtttttttttttttaaatcagttgttgctctctggaattccaatgatgagttcaacttagttaacatctcctttctaaatgtgagggttaaggagttggtggtaattcatataataattagttagaatcaaattactttcttttggaa

SEQ ID NO: 596207 - DNA, 351 bp, Homo sapiens
tgaataggatttttccaaagaagacatacaaatggccaatagggttgggcatggtggctcacgcctgtactttgggaggccgaagcaggtggattgcttgaggtcaggagttcgagatcagtttgggcaacacagcaaaacgccatctctattaaaaataataatagtaatgtttttaaatggccaaacaagcacatggaaatatggtcaacatcattcatcatcagagaaatgcaaatcaaaatctcaatgagataccactttatacccactaggatggctaaaataaaaaagacagatcagtctaggtgccatggctygtgcctataatccaaacactttgagagaccc

SEQ ID NO: 596208 - DNA, 521 bp, Homo sapiens
tatggcaactattttgactaaactaaaaggaactctataatgaaaacttttctataaggaaaatttccatcttatrtttcatttactggaaccaaccttgtgaaaattacacaaacttcaagagaattaaaaagaaggaaatgcttccagaattattatatgtggtcacaataaacttcatttccaaaacgaataaaagcattagaaacagaaaattaattcctgcatctgacatgaacagagatgtaaaatcataaaaagcacatatatgtgtaatgtgtagttcatatatatatatacatatttgaaatatctatctatctatagctatataggtatttatagatatctaaatatatctatatctgtatacatgtaaatgtacatatatgtgtgttaatgcacatatatgtatatatgaatgcatatctgtatatagctacatatgtatgtagccctatagttaattatgtatggctataaatgaaatgtcagtatattctatctatttataaacagat

SEQ ID NO: 596209 - DNA, 457 bp, Homo sapiens
taggtgataaaagaccctctggcccccactattaatgtaactgcatttgtgttatgtatgtgtttccatttgtgctcttttaaaattatgtctgtacatatattaatatattatgtagttacacacatacacacacacacacacacacacacacacacayatatatatattctgcacaactccagtctcaactcagttatccctcttctgtatgtccaagttctcttgtgggcatctgcaagtgatggcatactctttctcaattgactcgtggccagtctcagaacggtgggtccatatgttacggatacccatttatgaatggcctatacctatagacagctggcctgctctttccaggccccttactaagagtattgtggaaaaccttagagcttttgaaaagtaattggacttttagctagaagaaatgaagaaattgcccagaattatcatc

SEQ ID NO: 596210 - DNA, 521 bp, Homo sapiens
tatggcaactattttgactaaactaaaaggaactctataatgaaaacttttctataaggaaaatttccatcttatatttcatttactggaaccaaccttgtgaaaattacacaaacttcaagagaattaaaaagaaggaaatgcttccagaattattatatgtggtcacaataaacttcatttccaaaacgaataaaagcattagaaacagaaaattaattcctgcatctgacatgaacasagatgtaaaatcataaaaagcacatatatgtgtaatgtgtagttcatatatatatatacatatttgaaatatctatctatctatagctatataggtatttatagatatctaaatatatctatatctgtatacatgtaaatgtacatatatgtgtgttaatgcacatatatgtatatatgaatgcatatctgtatatagctacatatgtatgtagccctatagttaattatgtatggctataaatgaaatgtcagtatattctatctatttataaacagat

SEQ ID NO: 596211 - DNA, 521 bp, Homo sapiens
tatggcaactattttgactaaactaaaaggaactctataatgaaaacttttctataaggaaaatttccatcttatatttcatttactggaaccaaccttgtgaaaattacacaaacttcaagagaattaaaaagaaggaaatgcttccagaattattatatgtggtcacaataaacttcatttccaaaacgaataaaagcattagaaacagaaaattaattcctgcatctgacatgaacagagatrtaaaatcataaaaagcacatatatgtgtaatgtgtagttcatatatatatatacatatttgaaatatctatctatctatagctatataggtatttatagatatctaaatatatctatatctgtatacatgtaaatgtacatatatgtgtgttaatgcacatatatgtatatatgaatgcatatctgtatatagctacatatgtatgtagccctatagttaattatgtatggctataaatgaaatgtcagtatattctatctatttataaacagat

SEQ ID NO: 596212 - DNA, 521 bp, Homo sapiens
tatggcaactattttgactaaactaaaaggaactctataatgaaaacttttctataaggaaaatttccatcttatatttcatttactggaaccaaccttgtgaaaattacacaaacttcaagagaattaaaaagaaggaaatgcttccagaattattatatgtggtcacaataaacttcatttccaaaacgaataaaagcattagaaacagaaaattaattcctgcatctgacatgaacagagatgtaaaatcataaaaagcacatatatgtgtaatgtgtagttcatatatatatatacatatttgaaatatctatctatctatagctatataggtatttatagatatctaaatatatctatatctgtatayatgtaaatgtacatatatgtgtgttaatgcacatatatgtatatatgaatgcatatctgtatatagctacatatgtatgtagccctatagttaattatgtatggctataaatgaaatgtcagtatattctatctatttataaacagat

SEQ ID NO: 596213 - DNA, 606 bp, Homo sapiens
gagcttggcacagcagctagagcctgtcatcacagccctttgggaggccaagacaggaggatcactcgagtctagaagttctgggcttcagtgagctatgatcttgccattgcacttcagcttgggcaacagagagagaagctgtttacaaaaagtaaaagaaaaacacaacagaaaagcaaagttacaagttgggaagtattactgcttttttctgttttctagaagggtttgtctaaaagtgtgtgattttttttcttaaatgttgtgaatatttcactgaaaaagatcaccaggtttttcgctgggagaagttttgttttttaaataatagggtaaatttttagaatctaaatcgtatcttagatttgtctatggtttcttctgttggtttttgtcagatatgtttttcagggaaatttctcatttcatctaaatcatcaagtgtatgagcataaaagtcatcttaaaatcttcttattaacatattaatttgtggatgacctaagtgtttgcctatttattttttatttgaactcctcttctccattttttaattgagtctcactaagaatttaycaatttaattgatctatttgaagagcc

SEQ ID NO: 596214 - DNA, 666 bp, Homo sapiens
ttgtgttatgtatgtgtttccatttgtgctcttttaaaattatgtctgtacatatattaatatattatgtagttacacacatacacacacacacacacacacacacacacacatatatatatattctgcacaactccagtctcaactcagttatccctcytctgtatgtccaagttctcttgtgggcatctgcaagtgatggcatactctttctcaattgactcgtggccagtctcagaacggtgggtccatatgttacggatacccatttatgaatggcctatacctatagacagctggcctgctctttccaggccccttactaagagtattgtggaaaaccttagagcttttgaaaagtaattggacttttagctagaagaaatgaagaaattgcccagaattatcatcagttagaggaagctctctgtgcctagattttctgacatgagataatagccaatatggctgatcccaacccataattgtatgctcttgacagcttctgttttttttttgtttttttttttttaaatcagttgttgctctctggaattccaatgatgagttcaacttagttaacatctcctttctaaatgtgagggttaaggagttggtggtaattcatataataattagttagaatcaaattactttcttttggaa

SEQ ID NO: 596215 - DNA, 666 bp, Homo sapiens
ttgtgttatgtatgtgtttccatttgtgctcttttaaaattatgtctgtacatatattaatatattatgtagttacacacatacacacacacacacacacacacacacacacatatatatatattctgcacaactccagtctcaactcagttatccctcttctrtatgtccaagttctcttgtgggcatctgcaagtgatggcatactctttctcaattgactcgtggccagtctcagaacggtgggtccatatgttacggatacccatttatgaatggcctatacctatagacagctggcctgctctttccaggccccttactaagagtattgtggaaaaccttagagcttttgaaaagtaattggacttttagctagaagaaatgaagaaattgcccagaattatcatcagttagaggaagctctctgtgcctagattttctgacatgagataatagccaatatggctgatcccaacccataattgtatgctcttgacagcttctgttttttttttgtttttttttttttaaatcagttgttgctctctggaattccaatgatgagttcaacttagttaacatctcctttctaaatgtgagggttaaggagttggtggtaattcatataataattagttagaatcaaattactttcttttggaa

SEQ ID NO: 596216 - DNA, 666 bp, Homo sapiens
ttgtgttatgtatgtgtttccatttgtgctcttttaaaattatgtctgtacatatattaatatattatgtagttacacacatacacacacacacacacacacacacacacacatatatatatattctgcacaactccagtctcaactcagttatccctcttctgtatgtccaagttctcytgtgggcatctgcaagtgatggcatactctttctcaattgactcgtggccagtctcagaacggtgggtccatatgttacggatacccatttatgaatggcctatacctatagacagctggcctgctctttccaggccccttactaagagtattgtggaaaaccttagagcttttgaaaagtaattggacttttagctagaagaaatgaagaaattgcccagaattatcatcagttagaggaagctctctgtgcctagattttctgacatgagataatagccaatatggctgatcccaacccataattgtatgctcttgacagcttctgttttttttttgtttttttttttttaaatcagttgttgctctctggaattccaatgatgagttcaacttagttaacatctcctttctaaatgtgagggttaaggagttggtggtaattcatataataattagttagaatcaaattactttcttttggaa

SEQ ID NO: 596217 - DNA, 577 bp, Homo sapiens
tcaatatagctctagagtctaactattaagcccgaactgtcttacttttctataaatatgagttggaaaagaggaatccaatttgtttttcttctttatgactatcttagaaaaaacactttatcacgaataaagtgaatatatttggttagatacatctatgttcgttgatcttcatgcagaaaagaaaacagagtaaaatttcgtatagtctgagaattggcaagactaagagttaaaatatgggatgttcaagagacaaagaggaaycagtgagattcaataggagatgagtacgtcggttttgtttttgactaacccgttgttactgcaggattatgtgaatttaaagatagaagcaatcagagctgaatatcagaagatgcctgcatttctccatgaagaacagcaacatcacttggagatgcttcaaaaggaggacgaagacaatttttagcaactccataaaagcgatgccagaatggcccatgagagggagattttaaaaggaatgtatgaggagctgaaggaaaagtcccataaaccagatgtggagctaatccaggtactgactgac

SEQ ID NO: 596218 - DNA, 577 bp, Homo sapiens
tcaatatagctctagagtctaactattaagcccgaactgtcttacttttctataaatatgagttggaaaagaggaatccaatttgtttttcttctttatgactatcttagaaaaaacactttatcacgaataaagtgaatatatttggttagatacatctatgttcgttgatcttcatgcagaaaagaaaacagagtaaaatttcgtatagtctgagaattggcaagactaagagttaaaatatgggatgttcaagagacaaagaggaatcagtgagattcaataggagatgagtacgtcggttttgtttttgactaacccgttgttactgcaggattatgtgaatttaaagatagaagcaatcagagctgaatatcagaagatgcctgcatttctccatgaagaacagcaacatcacttgsagatgcttcaaaaggaggacgaagacaatttttagcaactccataaaagcgatgccagaatggcccatgagagggagattttaaaaggaatgtatgaggagctgaaggaaaagtcccataaaccagatgtggagctaatccaggtactgactgac

SEQ ID NO: 596219 - DNA, 468 bp, Homo sapiens
tgctaaagttctgcatccctgagtttttaattacattgtttacctgacttagtaaaaaatcaggacggatgcataatagccaaatgctaaaacaggccagctttagccagcatgataaggaagtcctccattctttcatctatgcaagaagagtaacctgatgttaaccatttcgtttgttgtattattttgtttctttgttcctgttcaagaaaccttacaaaaactggctcttgtcccatatccagcacagaaactctctatttttggatgagmtatttcctgatttttgaatcacagttagaagccaatttgatcatttagctaaatttgcaaaaattttgtcttttcatatcttcaaatatacaatgagaaaacccaaagagatatgagaaaatctggccaaaatcacacacacacacacacacacacacacacacacacacacacacatcaggagttaaactg

SEQ ID NO: 596220 - DNA, 611 bp, Homo sapiens
caccaatgttcaggtttttctgttgttttggtttctttgtcaagaaatatttttcatttgtttgtaaaatgattgttatgtatgtcatacaatttcctgatttttaagctgtgtctatgacttaataaagttatgttgctatgtgacaagtgcaagtatattcaaatgtattctgaggccatgcataactggcaaaagttttcactattttgtgaaaatactgaccatgttgggctttcagctgtcagttcctcattatcaccatcacttctgaaagcgcattcktcagaaccacctttccctctatactttcctgtagagttgttcactgaggggtccttccacaagatttggaagtcagaagagaatgattcaatgctcattgacacctgcagacagacaagtggacttagttgagaactagagaatcacctagagacatactgcaggaggctgagagcatcagcacctgcactctgggcttctcagacagatccaaggaccatgtggttaggcagctcacacctgcagggtagggtgcaccctggtttctgcaggagcaccagagaatcatgtctctagtatctgcttccgtgactaacatcaaccag

SEQ ID NO: 596221 - DNA, 611 bp, Homo sapiens
caccaatgttcaggtttttctgttgttttggtttctttgtcaagaaatatttttcatttgtttgtaaaatgattgttatgtatgtcatacaatttcctgatttttaagctgtgtctatgacttaataaagttatgttgctatgtgacaagtgcaagtatattcaaatgtattctgaggccatgcataactggcaaaagttttcactattttgtgaaaatactgaccatgttgggctttcagctgtcagttcctcattatcaccatcacttctgaaagcgcattcttcagaaccacctttccctctatactttcctgtagagttgttcactgaggggtccttccacaagatttggaagtcagaagagaatgattcaatgctcattgacacctgcagacagacaagtggacttagttgagaactagagaatcacctagagacatactgcaggaggctgagagcatcagcacctgcactctgggcttctcagacagawccaaggaccatgtggttaggcagctcacacctgcagggtagggtgcaccctggtttctgcaggagcaccagagaatcatgtctctagtatctgcttccgtgactaacatcaaccag

SEQ ID NO: 596222 - DNA, 595 bp, Homo sapiens
tttgctacaagaattccaatcatcccataacagactcctcaggtggttaaatctctttattaaatcaggactcgcatttcatgtctttgcttctggggatgaggaggaaagagagtgggtgcaaaggagccacctcatcacaatttaccaaaatttccagatgaccttcaaaacttggctgcatctggaaaacaactcagcagattgaggcaccaggaggagcatctagggcaacccggcctcactcatctgctatcctagcggttgatgttatgacttgtcgcactgggagagggaaaatgctctcttgttgacattaataagttgcaaaatcttcaggctgcaggctgctgacrgtgagagtgaaatctcttccatatccgctgccactgaactgagatggcatccccctctgcaaactggatgccctataggtcaggaacttaggtgctttccctggtttctgctgataccaatttaaatagttgtaaatgctttgactagcctggcaagagacggtgactctgtctcctacagatgcagacagggaggatggaggctgggtcatctggatgtcacatctggcatctcagat

SEQ ID NO: 596223 - DNA, 519 bp, Homo sapiens
gaattcttgtcacatctttttttttaatgcatagggatattcagaaaatttaggaaacacctgaattgtcttggaatggtcaccctcagttcttcaaaatggctctatcttgtcattttttagtgtcagttttaacaagacacacaggcatttcactgtgaagagggctagcaggagaatacttcttatgtgtaaaagctcttggataaatcctttaaactctcatagtctctgggtatgtgattagctcttgtgttctctggagatgacaaaagtaggggactatttgttcatttgttttcacattaggagaagaaatcagattgataggacacattttgagagggaagagccggctcagagagatgaggatggtagaaaagaarcaaagtgttcagggcaatgcgagatgtgctcctgccctcaaatctgaaagaaagacatttaaattttaaagacttggaggaagttttgctatgtggacaaaactgcagaaaggcctgagtttataattgtggt

SEQ ID NO: 596224 - DNA, 480 bp, Homo sapiens
cagtgttcctgagaccatggtgttgtcttttgtttattgtggagtgtttttgccatcttcagacaggtctttgacatagcaacttatcggacatttgattctgtgattgtgaaaattaattgattaattagtcataagtaaaaaattaaacaatacattgaatcagaaaaaaggagggccagatgaagagcttaaaaggaatctgagtatcttaaaaagacgtattcctttcaaacaagaacagttagagtcacggattttttaacaaatgactttttagcwgcaatgatgaaatagtaaatgacaacttcaaataggctaccacatatggaagtttcttgtcaaagaatatcttcaagaatcatgtaaacacattttcagattaaaacaaacaaacaatgaacgtgggtttaccagcagacccgctcaatggaaaatttctcaaatctgtgactgagtcaaaagtacatttgtccctga

SEQ ID NO: 596225 - DNA, 479 bp, Homo sapiens
cagtgttcctgagaccatggtgttgtcttttgtttattgtggagtgtttttgccatcttcagacaggtctttgacatagcaacttatcggacatttgattctgtgattgtgaaaattaattgattaattagtcataagtaaaaaattaaacaatacattgaatcagaaaaaaggagggccagatgaagagcttaaaaggaatctgagtatcttaaaaagacgtattcctttcaaacaagaacagttagagtcacggatttttaaacaaatgactttttagcagcaatgatgaaatagtaaatgacaacttcaaataggctaccacatatggaagtttcttgtcaaagaatatcttcaagaatcatgtaaacacattttcagattaaaacaaacaaacaatgaacgtgggtttaccagcagacccgctcaatggaaaatttctcaaatctgtgastgagtcaaaagtacatttgtccctg

SEQ ID NO: 596226 - DNA, 540 bp, Homo sapiens
ggcacctcaggtggactattgtccagtaagctcttctggggctgacctggaactgaactaccatttgtaaactctttctacaggggaarcgcaacagtgttgcagagaacatactaaaccaaacggcctccactcattctttctcaatttgttgtctattagcttccttaagaaaagaaaaaaaaaaagacttcagattgaacccaggaggcctgagccatccatattctaacttgtttcctcagaaatgacaaaaacactatgtgcatttctgtgcttggctactgtctggattttttgtttggtttatttccttgagaaggtacccactgttttgcactttcttttctgactaacttctatggttttattttgaggaaagttgctgctttttccttgcttgcatgcctggtagagagctataggcatttggtacatatctgttgacttggtagattaaggtgtggacaccaaagcagagaggttactataagttgtcacaggtaagactttggtctgagaagacacggtagaagagat

SEQ ID NO: 596227 - DNA, 609 bp, Homo sapiens
tgtagctgtcaccatctgaggccacttacctrgcccccaaaaggccctaatggccctcagtgccattccaccctgacctggttctctctctgccccctaccatctgatgccatccacacttgtactgccctggcacatcctgagggttcagacctagccgtttttcctctccaccttggatgttcaaaagaagagtacctgtcctaattgaaaagtttggctaaagtagacagctttcacattagagggtgatgggccttggaccagctctgattaaagacaccgtcctggtgtttgccgtcaggatagggcctggaaactggcaggagaagactcttgtgaccattttggatcccttcactgacagtaggtgataaaagaccctctggcccccactattaatgtaactgcatttgtgttatgtatgtgtttccatttgtgctcttttaaaattatgtctgtacatatattaatatattatgtagttacacacatacacacacacacacacacacacacacacacatatatatatattctgcacaactccagtctcaactcagttatccctcttctgtatgtccaagttctcttgtgggcatctgcaag

SEQ ID NO: 596228 - DNA, 564 bp, Homo sapiens
ggagagaagacttgtctaatagaatgaatagttataatcaggagagttctaggagagttgctgatgttacttcaaaataagaataaagggccggatgcggtggcgtgactcatgcctgtaatcccagcactttgggaggccgaggcaggaggatcacctgaggaggtcaggaattagagatcagcctggccaaatcccatctctactaaaaatacaaaaaattagccgagcgtggtggcacttgcctgtagtcccagacactcagaaggctaaggcaggagaactgcttgaaccgggaggtggaggttgcaggagcccagatctcgtcattgcactccagcctgggctgcagagcaagactacgtctcaaacaaaacaaaacaaacatgccgggcacggtggcacatgcctgtaatcccagcactttgggaggccaaggcggctgaatcacctgaggtccggagttcgagaccagcctgaccaacatggtgaaaacctgtctctactaaatacaaaaaattatccaggtgtggtggygcatgcctgtaatcttagctatgtggg

SEQ ID NO: 596229 - DNA, 564 bp, Homo sapiens
ggctttttggaaatattcgatgaaatactattaatagaggagctagtattttacagtagatataaattatcttcccttcttttgttctcttctgtttctttcactctacatgatgaaaatctagaatcttaaactataagggaattaaatactatcaatgtcaaacccgcaattactgcagaaagcattccatgagagatcatctggctgccagggctcaagtcacccacaaggactgaaaactttgctactttacaaggcaagtgatgttgaatgaaggaatgaatgagtgaagaaatgaacaaaagaacggaaacaaaacacatcccagtttttttgtgcttctttggctattcccccattgtcmtcagtaatttagacctgtctgttttaatactagccttttctattatgtgcatttgtctccctcactaaactgaggacactttcatcataaggtccatttttctccaacacctagcagagtgtctgatatagaagattgacttaataaacattcagatgaaagatgcatgaatgagatatttgtagagttctgtaaat

SEQ ID NO: 596230 - DNA, 524 bp, Homo sapiens
tactgtaaggacagtgatcggtcactaaagacacttaagcagggaagtgacgtggtcagcctattttgcattttagaagtgtcactttgtgctgtgtgaaaactacattgaagagaatggtaatactttaagcagaagccaagttcagaagttcctaaaacattttaggtagaacatgggctyacccagtggatctttgaaatggttagaagggaagaagccagctccacagatgttcagtagaaaaagtcaacagaacttatgcatatagtggcagatctggaggagtgggcagccaactctgagttcctagctcaggctgactgggctagaggtccattcatccaggcagagagtgtaagagtgggctccactttgttaatgctcgttgtgacacaggcttccatgtatttcccaaatttctttccttttcttcctgtacatagttaaactctatttttcattctctcctgagttgggtggggccatattacagaattttggtcagtggaatactgttggaa

SEQ ID NO: 596231 - DNA, 568 bp, Homo sapiens
cagtaacgggctcactgtcttctaactgaagaccatgaaatagatccttgtcctagcaccagccattctgggcaaggtactaaaggcagtccagttcacctagggatgagacaggatcattgatgttcaggtccctggtaacaggtccacaaatcacagaccctactgtggacccagcagtagctgtgcaacctaactctaatccttcctgattgcaactgaggaggttatcccatcagcctaggaacccaagataaaaagatctttaactactaaaaatagtaaataaaaactggaagagacgktttctacttcaaaggcacatataccattgcaaggctacactgatcatgaagaatcaagcaaacatgacccacagaaaaacaataaagctatagtaaccaatgacaaagaaaaaaaaatcaaagaattttctgacaaaaaaatttaaaataattatctcaaggaagttcaatgagatgaaaaagaatacagacagacaactagacaaacttacaaaaataatacaagaacaaaatgaaacgtttaataaaaagtagaaatcata

SEQ ID NO: 596232 - DNA, 630 bp, Homo sapiens
gaagtaatgtttgttgattgtttttctgtaatgctcacaaggcttgttttggcataaagtgtaagaggagctgatcttttatttgttaaactatggttccagtggtctgccttgcaaaaataaccaacatcaaaacccaagacgattttcatagtgaagaccatgagcttacagaggggagccagcacacagagaaagggaaggaaggaaacaagaaaggaaagaagcattcaaacaagtgtcttcatctctaaaataagatgggacttgaactaggcctctaaggcagttttaatctttgaaaatctttgtaataaaataatttagcctcaaaacaatgttttatttaaatttgtgagtgaaagctgagtgttgtggtragcgtctatagtcccagctattcaggaggctgacgtgggaggatcaattacttaaagcacaggtgttcaaattcagcatgggcaacatagcaagacactatctctaaataaacataagaatgataataaattcatttttgaatgaaaagatacagaataggaaagaaagcagaaagtgagaatacgcaatgaaaaataaaagtaatgaagagatggagagcacacaagtgagagaaaatggaggaagatt

SEQ ID NO: 596233 - DNA, 630 bp, Homo sapiens
gaagtaatgtttgttgattgtttttctgtaatgctcacaaggcttgttttggcataaagtgtaagaggagctgatcttttatttgttaaactatggttccagtggtctgccttgcaaaaataaccaacatcaaaacccaagacgattttcatagtgaagaccatgagcttacagaggggagccagcacacagagaaagggaaggaaggaaacaagaaaggaaagaagcattcaaacaagtgtcttcatctctaaaataagatgggacttgaactaggcctctaaggcagttttaatctttgaaaatctttgtaataaaataatttagcctcaaaacaatgttttatttaaatttgtgagtgaaagctgagtgttgtggtaagcgtctatagtcccagctattcaggaggctgaygtgggaggatcaattacttaaagcacaggtgttcaaattcagcatgggcaacatagcaagacactatctctaaataaacataagaatgataataaattcatttttgaatgaaaagatacagaataggaaagaaagcagaaagtgagaatacgcaatgaaaaataaaagtaatgaagagatggagagcacacaagtgagagaaaatggaggaagatt

SEQ ID NO: 596234 - DNA, 630 bp, Homo sapiens
gaagtaatgtttgttgattgtttttctgtaatgctcacaaggcttgttttggcataaagtgtaagaggagctgatcttttatttgttaaactatggttccagtggtctgccttgcaaaaataaccaacatcaaaacccaagacgattttcatagtgaagaccatgagcttacagaggggagccagcacacagagaaagggaaggaaggaaacaagaaaggaaagaagcattcaaacaagtgtcttcatctctaaaataagatgggacttgaactaggcctctaaggcagttttaatctttgaaaatctttgtaataaaataatttagcctcaaaacaatgttttatttaaatttgtgagtgaaagctgagtgttgtggtaagcgtctatagtcccagctattcaggaggctgacgtgggaggatcaattacttaaagcacaggtgttcaaattcagcatgggcaacatagcaagacactatctctaaataaacataagaatgataataaattcatttttgaatgaaaagatacagaataggaaagaaagcagaaagtgagaatacgcaatgaaaaataaaagtaatgaagagatggagagcacasaagtgagagaaaatggaggaagatt

SEQ ID NO: 596235 - DNA, 556 bp, Homo sapiens
agccatccagttgccaggattatttattcccacatagcaatgaccccctaacttgcagtttctctctcacattctttcttatgcccccaattttatttttgcttctatgtgataaatttcaggcaatctggagccaacgagaagcaaattttgagataaggatgtaaaggtgttaaaagcatttattatgagcccaagggtgtctacttaaaatgctgatgttctgttatccacctgatataattgagaagctgagaatctggagtggtgaatttcattccatggctcttcacaattttcaaagccttttcatatgccttaatttactgtcacgtcattccctccctcactattgacctcctaatygctaaattccatggaaattctgggtttacactgaccttggcctccctgcagcatttgaagctcttgacacatttgctgctatgttctcagcagtgtgattcgatccagtttcttcccatcactttctttactagacctcattggtagacatctttcttaacacactccagttttggagtttccctgggtt

SEQ ID NO: 596236 - DNA, 541 bp, Homo sapiens
ggctgctaggttttcttacagcatgttggctaggtgccccaagagaaccaggcagaacttgtatcaccactatgacaacctcagagtctcatagcatcctttccaccatagtcactggcctatccagattcaaagaaagaaactgaccagtggaggcatgtccatgtcacactgtaaaaggtcatttggaatgggatatatatatagatatagatatagatatagatatagatatagatatagatatgcagccaactttggaaaatacaaycttcaacaaaaatataagaggtgcacccaaagccagttgacctttatagccactttcatagggtgatgtgagtataagccagaaagcaagagtgggagtgagcccagggaagtatggtaccagcatgcccagccttcctaggctagagcagaaggccaaagggattgtcattttcataacatccttgagaacacagtacccactggctgtgtacatcagatgctatcttctctctgcttttccaatcatggcagaaactgttgtagccag

SEQ ID NO: 596237 - DNA, 548 bp, Homo sapiens
tacatacagggacagtgtgtcatcatggttaaggctgcagatttgggtcaaaatgccaacttgaatcctggatccattattcactggcaatgtgatctgagtaagcctgtctgtgcctctgttgtatcatctacaaaatggaaataatattagtacccctatcaaggaatattgtgaggagtaatttgaattaattcatataaagctctcagaataaagcttgtgacatattaaaygcttcagtaatattatccattgccacagacttgattgaatgatacagtattaacaaggctttcactgtactacttttatcatcattaaatgacctttttaatacttgatcatttgcaaaggaatttttacatatgttattgtgctccattctcacaaccaacatatagagcataaataaccccaagctggagataagacttaggcacagggaagtaaaagagagcatgcacacgtgtgtacacatgcatatgcacacattcgcagatcctcttttgcttgacaaactgctgttcacccttcaagcactgtgc

SEQ ID NO: 596238 - DNA, 548 bp, Homo sapiens
tacatacagggacagtgtgtcatcatggttaaggctgcagatttgggtcaaaatgccaacttgaatcctggatccattattcactggcaatgtgatctgagtaagcctgtctgtgcctctgttgtatcatctacaaaatggaaataatattagtacccctatcaaggaatattgtgaggagtaatttgaattaattcatataaagctctcagaataaagcttgtgacatattaaacgcttcagtaatattatccattgccacagacttgattgaatgatacrgtattaacaaggctttcactgtactacttttatcatcattaaatgacctttttaatacttgatcatttgcaaaggaatttttacatatgttattgtgctccattctcacaaccaacatatagagcataaataaccccaagctggagataagacttaggcacagggaagtaaaagagagcatgcacacgtgtgtacacatgcatatgcacacattcgcagatcctcttttgcttgacaaactgctgttcacccttcaagcactgtgc

SEQ ID NO: 596239 - DNA, 547 bp, Homo sapiens
cattattctattctctggtgtacatgtgttagtaaacaaatagccattgctcaagccccaggctgaaattcttgacccattcaaacctactgaagtaaatatagtaatgcatcacttaaggatggggacacgttctgaaaagtgcatcattaggcaattttgtcattgtgcaaacatcacagaatgtgcgtacacaattttagatggtatagcccactccattatatagcccaattataatctcatgggatcatcctgctatagggagtcattcactcatgaaaacatcattatgaggagtgtgactgtagtctccttgtttttcttaaattaaaattcctcatgaaatatgcaatkagctccaaatagtcccagattcaaagtctagaaaaataatcagtatttaaaaaataagacagcatttagtgcaagtttatttatattttttcatggctctttaagatatttaaatatctgtcacacattcaagacaatctaaagcaaactaatggttacttttagtgttactggaatattggtttagaat

SEQ ID NO: 596240 - DNA, 547 bp, Homo sapiens
cattattctattctctggtgtacatgtgttagtaaacaaatagccattgctcaagccccaggctgaaattcttgacccattcaaacctactgaagtaaatatagtaatgcatcacttaaggatggggacacgttctgaaaagtgcatcattaggcaattttgtcattgtgcaaacatcacagaatgtgcgtacacaattttagatggtatagcccactccattatatagcccaattataatctcatgggatcatcctgctatagggagtcattcactcatgaaaacatcattatgaggagtgtgactgtagtctccttgtttttcttaaattaaaattcctcatgaaatatgcaattagctccaaatagtyccagattcaaagtctagaaaaataatcagtatttaaaaaataagacagcatttagtgcaagtttatttatattttttcatggctctttaagatatttaaatatctgtcacacattcaagacaatctaaagcaaactaatggttacttttagtgttactggaatattggtttagaat

SEQ ID NO: 596241 - DNA, 530 bp, Homo sapiens
tagtatatataacaattaaagtaaccattacaagtatagaaacatgatacatagccaaaatccagaggaaatgaaaaaaatttaaaaattacaaataaagagagaaaaaaataaaaggaagaaaaacaatggtaatatagaccacacaaaataaaatggtgaaaaaagtcccaatatattagtaactaccatcagtgtgaatggatttagctactaaaaatccacataaaaygacacagctaaaagaaagtcaagcagaatactaataaaaagagaggttagtaatactaatatcccacaatatagaatttaatgcacaaattatttttagtaaaacaaagggtatctaatatacacaaaacggcaagtttaccaagaaaataaaacaatatgaaattgtacacaccttgaactccagaaaggaaaatgaacagaattactaagagaaatggacacgttcatcatcagtttcaagattttaacatcctttaatcagaaatcagtagatcaagataatagagtattagaaa

SEQ ID NO: 596242 - DNA, 566 bp, Homo sapiens
ggatggctacattgtagagtatacacaaactcaatttgctgggtaatatcgaatcactttcaaagtcatttttacccctaccaacaggctatgggagtttctatgacttcacatcctcacccatagatgatgttratagacttcttaacttttcatgctctactggatataaaaagatggctcattataaatttaaactgcattttgcattttgtttttctgtttactaatgaaacttggcactttttctttggcttattggccatttgtgtcttctatttcatgaactaccttgtcacctactccacaattaggatttgttacttgatctccatgtgtatatgcaaatatttgcctgtatttattgtcatcatcatactttgggcactggccatgctacctctgtgaggaaagaagggaaaggaaaggaaaaataagaaaagaagaaaacatccatgtaagtttttaataagtatggcatgcatgactcagaaaatctgtcaaaatttttattggaattacattgaatctgtagaccaactgggtgagaattgacagatctatga

SEQ ID NO: 596243 - DNA, 588 bp, Homo sapiens
agatgcgacagagactgcctgagccacaaagcctgaaatagtactgggcctttagaaaattttcgccagccctgctctaacgctttacctactaaaaggcaccaccagtccatccaaagcccaaccaggcagattggaagtgtggagctgcctgttctcatgcaacgtgcctgtctmtttccgacttgcctaccatgatcagtaagcaacgtttcctcacaaatttggtgtttttataattagggaagaaagggcttgtgtacaccagagctaggatacaacgtcagcctcttctcaaatgtcaccaagccaatagtcactgttataatggagctgtcaagacaaactacaactctcttaaaccacctgatgggaaggctaaaaagacaaatagagaaaggatggcaatttgccctaaaaagaatttgatatggactcactaagatagaaaatgctaacaattctgtgtaaagaacaatttaaaaggctctcttttctaggatgcctgattatagggaggtatcagtctcatttcttttcagaaacaagaccagacaagaaggtgttttgggtggtgtggacacgaca

SEQ ID NO: 596244 - DNA, 588 bp, Homo sapiens
agatgcgacagagactgcctgagccacaaagcctgaaatagtactgggcctttagaaaattttcgccagccctgctctaacgctttacctactaaaaggcaccaccagtccatccaaagcccaaccaggcagattggaagtgtggagctgcctgttctcatgcaacgtgcctgtctatttccgacttgcctaccatgatcagtaagcaacgtttcctcacaaatttggtgtttttataattagggaagaaagggcttgtgtacaccagagctaggatacaacgtcagcctcttctcaaatgtcaccaagccaatagtcactgttataatggagctgtcaagacaaactacaactctcttaaaccacctgatgggaaggctaaaaagacaaatagagaaaggatggcaatttgmcctaaaaagaatttgatatggactcactaagatagaaaatgctaacaattctgtgtaaagaacaatttaaaaggctctcttttctaggatgcctgattatagggaggtatcagtctcatttcttttcagaaacaagaccagacaagaaggtgttttgggtggtgtggacacgaca

SEQ ID NO: 596245 - DNA, 598 bp, Homo sapiens
ttttgttgaaaattgggcattttaaaagcagctccctctcctagggtttgcaaactgattgtttgcagaaaaatcagcattattgtaattgtggtaactccactttttactctattagaaaatttgaaagacaaaagcataaaaatacctagaagttatattaatgggtacacaataagtaaagatataattcatracattaataatacaaaggagaaagagtaaaagtagtaatgaagtagtttttctatgcaagtgaagctaatttggtttcattttcaaataaattggattatttttgtatgtaatttgtaatactaatgctaacaaaaaaagaaaagatatatagaatatacataaaaggaaatgagaaaggaatcaaagtatgtttctacaaataatcagcttaacacaataagaggcagcagggagaaaatgagaaacaaaaagttacataagacataagaaaaaaaatgtcaacagaaagcctttcttttgaagtaattattttaaatataaatggactaaactcctcaatgaaaaggcataaattagcaaaatagattaaaaacaggatcagctatacgctgtttacaaa

SEQ ID NO: 596246 - DNA, 574 bp, Homo sapiens
ctttaagaattaaaagcaatttatgcttcagttctttattctctaaggtggggaatctctcctattactgattactagcttccttttgattctgtcacgtgcccactccaaccttataaagctggttttttaartaaaatgagactttggacgacactcagcaatggcatggaaatccacagaacagcaggagataagaacagaacactcagtaactctgcaggcagccccactgagaggaaaatctgcaatctagcaatacacaggatttaaatatcattagtaatagttgaatataaaaatcttatataatacatcaaagtcaatgattgcaaatatctatctatcatagtgggtctttcagaaatggttcttcagggcataagtgtttgtcctaagagtgaaaatgaatgcatggaaactaattaaatatagcatctaaatctacatggaatggatttacattttaacttttaatgttagccattcttcctactctctgtattgaaaggacaatcgtgagagcagtcattgactgagtagataacaagagaagcaataatccatcatacaa

SEQ ID NO: 596247 - DNA, 590 bp, Homo sapiens
tgattactagcttccttttgattctgtcacgtgcccactccaaccttataaagctggttttttaagtaaaatgagactttggacgacactcagcaatggcatggaaatccacagaacagcaggagataagaacagaacactcagtaactctgcaggcagccccactgagaggaaaatctgcaatctagcaatacacaggatttaaatatcattagtaatagttgaatataaaaatcttatataatacatcaaagtcaatgattgcaaatatctatctatcatagtgggtctttcagaaayggttcttcagggcataagtgtttgtcctaagagtgaaaatgaatgcatggaaactaattaaatatagcatctaaatctacatggaatggatttacattttaacttttaatgttagccattcttcctactctctgtattgaaaggacaatcgtgagagcagtcattgactgagtagataacaagagaagcaataatccatcatacaatcaattgaaaattggagctatttttcttctttacttggaaaacaattatctctttccttctatgaagccactttgctaaagaaa

SEQ ID NO: 596248 - DNA, 590 bp, Homo sapiens
tgattactagcttccttttgattctgtcacgtgcccactccaaccttataaagctggttttttaagtaaaatgagactttggacgacactcagcaatggcatggaaatccacagaacagcaggagataagaacagaacactcagtaactctgcaggcagccccactgagaggaaaatctgcaatctagcaatacacaggatttaaatatcattagtaatagttgaatataaaaatcttatataatacatcaaagtcaatgattgcaaatatctatctatcatagtgggtctttcagaaatggttcttcagggcataagtgtttgtcctaagagtgaaaatgaatgcatggaaactaattaaatatagcatctaaatytacatggaatggatttacattttaacttttaatgttagccattcttcctactctctgtattgaaaggacaatcgtgagagcagtcattgactgagtagataacaagagaagcaataatccatcatacaatcaattgaaaattggagctatttttcttctttacttggaaaacaattatctctttccttctatgaagccactttgctaaagaaa

SEQ ID NO: 596249 - DNA, 629 bp, Homo sapiens
gctccaacctcctcctcttttccttctatttttccttcctattcttcccttctctgtttctggaaaaagagtgactctacaggtgaggattaaactaaggatcctaacaatagaccaggtgaaaggtggggatgaagctgtgggttcagctgacaggaaaaggaggaggatcctatgcagagtggctccagaaaattccaaccagctgtctgctgactatggataccttataagtataattgattgagagctgcaggcatacattactgccagtcattttgacacaggtcacctctctatataaacaaggatacatttcagaatgacctactttaaacagcaactatacagctactaataataatttacatcttgatacttctttacagctttcaagccctcatcacatacagaggcaatgtgcaatgatccaaagtctatttacaaatctgtgggctttgcagactatttgcatttccccatctttctgcatctcactgcttttcagcgctgtggagaaagaggagatcccccagggtcaagtttactrtatattagcagccaccacaatgacgacagttggaggaggtttaaccaataacctcagtggcgattgcgggtttgtggac

SEQ ID NO: 596250 - DNA, 616 bp, Homo sapiens
ggctattctaaaacttcagtttaaaattgtaatggttaattttatgtgtcaacttgactgtgccatgaggtgccmagatatttggtcaaagattattctttgtgagatgggttttggatgagattaacatttaaattggtagactgagtaaaacatatttccctacataatgtgggtgggcctcatttaatcagttgaaggcctgaatagaacaaaaagggctgaccctctcctgagtaggaggaaattcctcctacttgagtgccttcaaactgagacattggcttttttccccgtcttagggttcatgttgaagcactggctcttcctgggtctcaagcctgctagctttcagactggaaccacaccattgactctccttcttcttaggctttcagacccagagtggaactaaaccatcagctctcctgggtctccagcttgcggactcgccctgcaaatcttgggttttgtaagccttcataatggcatgagccaatttcttatactaaatctctctatatatacatacacaggctgttggttctgttgctctggagaaccatgactaacacaaaaatcttaccatggtaagaaaccttagtcacttatcaca

SEQ ID NO: 596251 - DNA, 566 bp, Homo sapiens
tctagacaatttctgtaattattctcattattaacttaactttttcaaaatgtctgtagcactgtccaactgccaagggaaaaaaacctatctctggtttccactgttagtttagtgatgctggaattgtagcactgcaaagaactcaagagaaacagcatgcctacttcctaatgctatgaacttgtgaccttacatggcaaaagggactttgcagatgtgattcagttaaagatcttgagatgggggatgactctgggctatctaggtgagcccagtgtcatcacaggggtccctataagagagaggcaggaaagtcagagtcagagaaggagatagaaagwtggaaacaggggtcagagagagagaaagagaagtttgacaatgtcacactgcaagctttaaatatggaggaaggggccacaagccaaggaatgcaggtggtgtttcaaatctggaaaaggcaaaaacacagattctcctctggagcatccagaaggaatgcagcccctcaactctaccatggcccattttgtgccctgacctctagaactctgagataatat

SEQ ID NO: 596252 - DNA, 593 bp, Homo sapiens
aataataaaaataaataaaaacagaaaataaactttttgtaggtgaatttcaatttttttaaaatcgagtgctgccttagtctgttggtgctgctggaacaaaatacctgaaactggataatttataaagaagaaatgtgcatttcctcacagttctggaggctgggaagtcaaagatcaaggcactgacagattcagttttctgatgagggcgactctgtgcttccaagatggtgccttgtcactgcctcctgcagagggcacaaatgctgtgtttttatatggtggraggtggaagggaaaaagaaatgaatgctaattccctccagcccttttataaggttgtcttatgaggatccaccctcgtggctcaatcacatcctaaaggcccacttcttaacgatatgacattgaccgtaaattttatagggcacattcaggccatagtaggtacccagtgtttaaaacgtaaattaagtgtcccatttaattttattggaatgaattggggaacataggttaataaaatagtcagtgtatatagtatatatgatatctgagagtccacatgatcaattatatttatgtaagca

SEQ ID NO: 596253 - DNA, 565 bp, Homo sapiens
ccagagcctcatctcatgccaccagtaggaattcaggatcccttttcagtcttccttaaagagagcaaagagtcctcccctctccactctcagcctcttaatagtctctctggagccacacgttggtccacagcggctaaaattactcatgtcaataagcaaagttgctcaactccttgttattctgcatttctccgtttgagaatagcatttaggctttccctttacatatccaaatggtccattcagatattttgtttccctgatatggaaactctatcytccaaaaatgaggtttgcctctcctgatagaataaagaaaaatgccaacagctgtttatctacttctaatgattgagcttccaggaatattggagtctggccctagaaataaatatataatattttccattgctcctagtaaaacatcatcaaaatgttctctaatttaaatccactcttggggtgcatcctggatgctgtcagtcagggctttcagaaatggaatcatgggctgggtgcagtggctcatgcctgtaattccagcacttcgggaggccaagat

SEQ ID NO: 596254 - DNA, 601 bp, Homo sapiens
gccttttgcctctcccactagacagcaccaatatctccagggagcatcttgcaaatgcagattgttagccccacctcagacctactgtattagtccattttcacactgctgataaagacatgccagagactgggtaattcataaagaaaaagaggtttaacggactcacagttccacgtggctggggaggtctcacaatcatggcagaaattgaaaggcatgtcttacatggcagcaggcaagatagaatgagaaccaaacaaaagaggtttccccttataaaaccacaagatctcatgagacttactcattaccatgagaacagtatgggggaaactgcccccatgatttaattatctcccaccaggttcctctcacaacatgtgggaattagggaagcttcaattcaagatgagatttgggtgggracacagccaagccatatcgcctattgaatcacaaactctgggagtggcgcctgataatctgtccatttaacaagctctccctgtgattctgttgctgaactcaagttttcaaagtgctgacctcagctataagctccttaaggacaaaaactttaatttactactgacacagc

SEQ ID NO: 596255 - DNA, 584 bp, Homo sapiens
caacttcttccaccaatcaaattttatatttcacaaatttgtcaattaccaggggtacaacaaaaactgagtcacagctcctctccaaggaccttacagtctgaaggaaaagagagttttctcaaaataaaacatacctctttcctgattaagaagcttaacaamcacccacaaatagtgtctattcatagactcatggtgtgatctgtaaccctttgctaaacaaagaaattgcattcattttgctttatgtaagtcagcttgcctaaggagataagttgtcagtggacctcaaattttttttttgccatctttcacatttcttctgaacagttgcccctgagaacccagatggtattttatcttcatgtccacccaaatctaaaagttgtggggttaggatgataatcacttttgcaatgttgggtggttagccacattctggaacaccatcctgtcaggctgaaagctcactaggatttggagtcgatgagtacatgctcaagaaggtggtagttctctctgcggggcagctgaatctctaggtacaattgcatgttgagacctacagactggtccataat

SEQ ID NO: 596256 - DNA, 585 bp, Homo sapiens
ctggtgaaacttgtgtatgtgaggtagaactatgagactctgtaagcagaatgagcaactaggtctttcaaggagcgtagcagccccagtgacaaaagtcatttagagccagatggaatatgagcaaatcagagaacccaacagaatcagtaaaggaggttaggccaagctggtcatggttgtatttccatagcctgccagatgtgcctccacccttctccatcctctctgtaccctcaggaagtgactccagtggactacatctgtgggccttggctagctgacttcctgttggcttctaggaggagattggcaggaggcaggagactgcctttgggacacaggtgctgcatggatctggtaaccacttctatccatggccacttcacctctggacataggaactgtttaccagagatcctagccccagggaacttcaacatccctctccagtatctttgcacatagtcagtgcattakactctccttggcattgttttcttctggtgggacttttctacattattttattttcttctcttatctgctttataaaatctgcagaaactactctatagtgtgaat

SEQ ID NO: 596257 - DNA, 462 bp, Homo sapiens
ctacttagtttaagctatctcatttctatattttatttatttacttttcattatgaattttattttttattcagaagtcataattgtataaacttataaggcataatgtgatgctctgatatatgtacaccatgtggaatgattaaatcaagctaattaacttatttaccacctcacttatttatcattttttctgtggtaagacatttgaaattcttggtaattttgaaatatacattattattgactatagttatctcgttgtgtaatagacctcaaaacttattcctattgtctatctgaaactttgtaccctttaaccagcgactcaccatgtcctctttcccaccctattcccagtctctcacaaccatcattctactctctacttcgyagttcagctcttttagattccaaatgtaagtgagatcacgtggtatttatttttttgtgcttggctta

SEQ ID NO: 596258 - DNA, 494 bp, Homo sapiens
attgaaacagatctatcactgggggaccattattctgcccacacagcaaagttacttgctttggtcagagaagcaaaggcagaggttatggtttgctagtcaagtccaggcctgaaaagacaacacatgtttccactcatctctcctatggttttgtcattaccatgagaagaacccattctagatagcttgctgtactaaggaagatgagaggcacataaagtagacctgattccaacctacagctccagccaggccaaacccaatcagccatgcccaggtgaccttgagtcaaccaatacacagatgcctgayagagaagaaaaaaagggtttgttgatttattaaaataaacttttggacattttgttatgtggcaatatcgtggtaatgactagctgatacagctgtacttggtttaaagcttgaagtaaaaagtctcaggctgtgtgaggcttccaggacatgtgtgtctattgccctgacacagtgaa

SEQ ID NO: 596259 - DNA, 559 bp, Homo sapiens
tcaagtccaggcctgaaaagacaacacatgtttccactcatctctcctatggttttgtcattaccatgagaagaacccattctagatagcttgctgtactaaggaagatgagaggcacataaagtagacctgattccaacctacagctccagccaggccaaacccaatcagccatgcccaggtgaccttgagtcaaccaatacacagatgcctgacagagaagaaaaaaagggtttgttgatttattaaaataaacttttggacattttgttatgtggcaatatcgtggtaatgactagctgatacagctgtacttggtttaaagcttgaagtaaaaagtmtcaggctgtgtgaggcttccaggacatgtgtgtctattgccctgacacagtgaagaattacaattatgcttgaagttttgctctgacatctgttaaatctacacataacacttactgcacatcctactctcttggacattggtggacccagttatatgttaagaatttccaaagattttgaaagaacatattctaatctgagcttcttccaggaactt

SEQ ID NO: 596260 - DNA, 654 bp, Homo sapiens
actttactgcggccagacttgacattaacatcttaatggctctgatagaatcacttaggagcttcacttcatgtaaatagagaaaatgttaatgaggagaaaatgtgggtgattaataaatgtgattgaaatgaaatgacctttacttatccactgcgtaattaaagtaatcaagggagacccagctgtgatgagaaatgtcatagaatagaccaaaaygcaattagctatcatctttgtaaaaaaaaaaaatcaacattcattgtgttttatagaagaaggggtacttttaaaaattgcttttagagtcaatcgagtttttcctgactgcctggaaaaatattcctacttcagggcagctgcagcattataaatacaccacactgaaaaatacaatccctatggaataaaaaaagtagcatgcaaagatttatcttatctgccttctgatatcctctgaattccaattagaagttccccacagcacacaatatcaatcaggaaacagtagctcagaggcaccagatcactttaagtcttctgatgttactcttggggaaggagagaatgaggatacattgtccctaaaaagccttgtcctctttcttttggcagcaaaacaagcaactctgtccaaaaagctgagaaagaaat

SEQ ID NO: 596261 - DNA, 641 bp, Homo sapiens
taattgatgatggtggtatgaatttgatatcactagatattgcagatatgagtaaaatacctgttttacaaaactgcctgcatttggaagatgtggttgaggaaggagtttgaagacttaagattaagatgacactcgctcttgacatacagggacagtcccagtttcaaatattccattcagcatttcagatcacttgacagccaacaagatctgatttgaggatcaaaatataaagggaaggtgctttgatggctcttagcagatttttaaccatttattatccactccaggaggcaaacaactgactttatttcccctcaaaaaaatccgtaaaatgttttaaggtgttttccatrcagagacaattaatccagaaagggactaactctaaaatatgcacatttttctgaaagttggatataatttttacttgcaaaagaacattcaacacataaatggaaaatattcaatataaaaatatcagcttctttagaattgtaattttaattgctaagatgaatgttgaagctgatttagcaccagaatcataattgaccataaattttctcttgcttttataaccattcctgcaagattgaatttttttcagagctgaagtgaagcatccccgtaaaatg

SEQ ID NO: 596262 - DNA, 582 bp, Homo sapiens
aaaagtgttttcaactgtgagtgatgtactggctgagtctaatactacacatacaaactattgggacaactgttttaagagtgggtgttataaaggcagacaatggtaaggatgtgggttatgtgttactgagactactggaaagtgactaagaggcatttggatagatgtcctaccagttcctggtgtgtggcttctgcataatttacgtagttggttttttggaggaagacactttaagacactttgccagctttctctcaataatgaatggttctacatagagaagaggactctgagaccaccagacagagattggtacccacctccacctccaccccaaccctatctatctatctatctatctatctatctatctatccayctatctatcatctatcacttatttatcatccatccatccatccatccatccatccatccgtgattcatccatctgcccattatcttagagtcaattgaaataaaaagggctgtgttacaggaactgtcaagaatctacgctaagtgaggggatactaagtgtcaatcaacatgaaggataaactgggaaattggttt

SEQ ID NO: 596263 - DNA, 648 bp, Homo sapiens
gccacctttcagaagtctaaattcaaaatgagagttaaaatccatactaacaatcctattcagaattgagtcatgttatgatataccatatatcataaattgtcaaatattgctttggtttgcagacataattaatataagctagccattaatagtatgatatatgatccaggaacctttaatataacaaaagccaactaatatttatctctaatatgctataatctttactcacatcacaaagcattaacaaagggtatatgctttaatgctttactctcgtgggcttatttgaacttttttttctggtttaattagcttattcattttaattaaagtacagtgcaacatttacatggtgtttaatctgaaagttaatcctgttttcttagaagattaagtacagtaataaatataaaataatggtggccgtatctcataggactggcactttgactatatgaacaacttctgctggaaatagcagaaacagatttttctctagaattctttccttaagccacaaaatagctttasgcaattaagagctcccacaaaagccagacatgtgcccccatccctccacccccaccccatggatgttcacaacttttgaatctgaggccagactccaaaacctcctgcagt

SEQ ID NO: 596264 - DNA, 648 bp, Homo sapiens
gccacctttcagaagtctaaattcaaaatgagagttaaaatccatactaacaatcctattcagaattgagtcatgttatgatataccatatatcataaattgtcaaatattgctttggtttgcagacataattaatataagctagccattaatagtatgatatatgatccaggaacctttaatataacaaaagccaactaatatttatctctaatatgctataatctttactcacatcacaaagcattaacaaagggtatatgctttaatgctttactctcgtgggcttatttgaacttttttttctggtttaattagcttattcattttaattaaagtacagtgcaacatttacatggtgtttaatctgaaagttaatcctgttttcttagaagattaagtacagtaataaatataaaataatggtggccgtatctcataggactggcactttgactatatgaacaacttctgctggaaatagcagaaacagatttttctctagaattctttccttaagccacaaaatagctttacscaattaagagctcccacaaaagccagacatgtgcccccatccctccacccccaccccatggatgttcacaacttttgaatctgaggccagactccaaaacctcctgcagt

SEQ ID NO: 596265 - DNA, 566 bp, Homo sapiens
gataactgatgttgagagacaggtcttctggctttctttaggatgtgtggggaattgagcaaatgtttttgtgggacccctatctatgcattttaattaaaaatatattataaaatccatgggcctctgtgaagtaaagtgatttgtcagtgaagacttagaaaaatgagtatagaagagatacttacatatttatatactgtccagtcagtgcatatgttcaggcatctctcatgttctttattatcaatggcattgtttttggctaattttgtatctcctatgcaagaaaactacagcaacactgctattactcacaatgacatggctcttcagaactttttgtattgaaacagtatagatcttctcgycactgcagtaccctaataccatttattttaatgctggttgtatcattactcatgatacgatatcatttatctaccttgccatcagtgaatactggcttccaatgactctctcagagattgttactatgcttccttggtggtgactctgtatgctagacttacccagactatgtagaaacatgcaaatgattattt

SEQ ID NO: 596266 - DNA, 568 bp, Homo sapiens
tcactcaccagcctgtgcaactagttcaggttgcttaacttgtctgcaccctagtttcttcatttacaaaacaggataatgagacacaaaaggcaggtttgccataaagatagactgtgaggcccatcccagtgcctggaacctggcggacactagactctcagtcacctcctgccctctcccttctcccacccccatgccacagctttcattataactgctctcctagcttacagggaccttctctcctccacacttagagagaaattgtgatctatgccacacaacttggtacttactcaaaagttcattaagattcttttttataagggactaaagcccaggtcaaattgctaaatacawaaaggacacttattagttccaataactgaaagcagcggagacaggcagaacttcatctgcgtgagcttgatctggatactcatttgtcattggggctctgcctccatttccttgtggttttcctctggctctgcttggcccatgctcgggcctcattcccaggctggctcccatcatgacagcacgatttaccccagcattccca

SEQ ID NO: 596267 - DNA, 568 bp, Homo sapiens
tcactcaccagcctgtgcaactagttcaggttgcttaacttgtctgcaccctagtttcttcatttacaaaacaggataatgagacacaaaaggcaggtttgccataaagatagactgtgaggcccatcccagtgcctggaacctggcggacactagactctcagtcacctcctgccctctcccttctcccacccccatgccacagctttcattataactgctctcctagcttacagggaccttctctcctccacacttagagagaaattgtgatctatgccacacaacttggtacttactcaaaagttcattaagattcttttttataagggactaaagcccaggtcaaattgctaaatacaaaaaggacacttattagttccaataactgaaagcagcrgagacaggcagaacttcatctgcgtgagcttgatctggatactcatttgtcattggggctctgcctccatttccttgtggttttcctctggctctgcttggcccatgctcgggcctcattcccaggctggctcccatcatgacagcacgatttaccccagcattccca

SEQ ID NO: 596268 - DNA, 595 bp, Homo sapiens
aactaaatatctgtgaataacagaagcctcaggatggttgtcctgagtttctgctgcaaagtacttgtctgcaatattttaaagacttaatagaattttattttaaagccatgacattagcacagttaagccaatcaatgtttttwaatagccttttaaaggtgcctttttaattgtgctctgtgggagggaaaggcacatgaagactgaaaaacatctaaaaatggcttagtcagatctttcaaaaatatttgcaaaagcacatttttgccttggttcgattgctgtagaagtggggttaacgtataagatctaaagggcttattccctgtgaaaaaacaaagatttaacccttgtgtaggttcattcagttcagcatcatagcaaaatatttgacatctgcactggtttccttttggggctccaaggagttgtggtttctgttagagatggaatgactatgcagaaacttcccttccctccttggggcccaggagacacagagaacactcatgttgttccttctagcagtcctttaacagtctgaatgtttgccagtgaccactttggatttatagttagaatgtgtccaaac

SEQ ID NO: 596269 - DNA, 535 bp, Homo sapiens
gcaaatgtatgattaaatatgagtcagcagattgcactgttactttagaaagcaaggattcttgggctacattcctgcctagacccaagggcaggctcaggggattaggtatttgtattgatacccagagctcaatatctacttcagatagatgcatgacgaagtcaatgaatcacagcttcctggacaatcttggcagaatataattctgactctagccctctactgcacagaagagtacagtgtctctctagtaaacactttgcatggctttaagatcttccccagtttaaacattagcccccttttccagctgtrtcttacacacacacgcacacacacacacacacacacacacacacacacacacacacacgccatcatttacatctctgccagcctggaccactggctgttccctgcactttcttactcctgatctctgttgcttacccataatattcttgggggaaagcctgcctttccaattctactttttccactagagctgagatcaagtgccagttttcctccc

SEQ ID NO: 596270 - DNA, 576 bp, Homo sapiens
cagctgagaaatctgattgtttaattgcgtaaatacaaatgatatcaccctcaaggaatacatttaagaaactaaggtataatccaagacggttactatggctctggttatagctaggacttcatcaacaattacaattacaattgactaacarttgttagtcaacaattattatttgaatatcttctgtgtgttgggttctgtcccagccctgagctattcagctggtgtgtcccagtacaatttattaggtgttgaaaaattgaaacattttcctgccagtttttgcctgaccgttgccttgggtcttcccttcctccatccaactgtactgtcttagttccaggggtgtcatatttggcactgcctggaggccaccttgagtccaccaacttgtcagctcaggttcctaggaaccagcctttatacctatcctactcccctgtcagggaggcatgagtatcggcaaggaaggtggcacacttgatggcactgagacaccttaatggataaatgcacagtgcctattgggctccctgaggctgggccaccagccacaggttggcattcccccat

SEQ ID NO: 596271 - DNA, 614 bp, Homo sapiens
tccttgagcctgaaaaggaaatatcttggaagagtacttcttaaattacatgggatttaaatattttttttcatttctaatttgtcatgggccaatacttttaaaaataccatagaacacaaattactaaaaaatgtaatcacatgctgttttagtaacacattattataaaggtctaaatgtttactccgttttacttatcaaagactagtaacaaccaattgcatatcccacattaagtggcaccatatgagaaccaccagtattaactataaaatgtcaaatacatattccttctcagacctaractcagcacatgcagcattttttttcacctacctaacctcttattctcatcattggaggtggaaggagaaaaggtaatatttaagtaggggccagatgttctccatcccacaatgatgccaatgaaataaaacaactaaatagcaattttatatctttaaaatcccttgacagctagactggacaagtacgaagatagacttaaataatcttgggatgtcatatttgatcaaatgaatcagggaaatagcatttttgaatttataaaggctttcaatcctgcatatcttgagtactactttcccagt

SEQ ID NO: 596272 - DNA, 619 bp, Homo sapiens
tatggtgtgctatgaattagtagagtaatattgaatatccctaaaccccttattatggcttctcacttgaaatatgttttcaatatacatttattcagcagtgcttaaacatggcaagtcataaacacatgctttttaaatcatgtggctacattttcttcctgcttaaatgtaagatcagatgttattaacagcagaggggcaggagacgaaaggagagtgaagctgttaaaaaacaaatagcacttttcattttaaaagatatgtctcctatttatgatactgtttccccaaagcaaaagacggaagagtattttagagtgtcgtggtagtttctctagtgataatttattttatctttgtagcactttgcctcccaagagtgtttgaaatctgccatatataatgtggaaatgcttgaccaactgatttggttagcaaatggcctctggctaacatccaggaagaggagctaaatatttaactctcarattattatgaacatggtccaaatgtctggagccctaaagaggcttcctataactgcttctaatgtgagaatttaacttcattctttgttgagagtggctcagacaccgagccacaagatgagagaatt

SEQ ID NO: 596273 - DNA, 325 bp, Homo sapiens
tgtttcccagtaacaagtgtctttttcattgttttatcagacactaagtcaattcaacctttttaattgtgaaaggactttaaaatgcccaatgctactacgtcagtgtccagaaagattggaatccacctgccaggatgggaggtttacacccatttcataattatatagaactttcttgttattccyataattcgactcagttatatcattaaacccatctggttatcaaaaggaaagggattgacttggtaatgcgggctccttttttttgctaagcatcattttgaattctatctttacatccgggttttagatgtcttat

SEQ ID NO: 596274 - DNA, 636 bp, Homo sapiens
gcaatctgtgtttttgaccatttcttctagggtatttggaggtcaargactttgtttttctcattgttttgcatccagtgtctagcatgtaatagtatttcacacaagcttgttggatgaaagtctttgcaatctattgcacaattactgatacttttagagaggagcaagaatttgacctctgagcaaagcagctacaaaaacctggtgaaacactgatctgttatctcttcccacagaggcaggagtaatgcagttcatctaaaatatcagatcataaaaattagtatttggcttagaaattgtgactatatttgaatgttaataactatgaaacactaaagagggagaagaaaacgatgcctgcttcactgaaaagctttactaaccagttacatctcagacttgtttatctcagaggctggctatgcttatgcatggagtcacttctcaagtcaatacaaagaactcagctctgctggaaaccttgcttgttcacataggcagataaggttcttaaaaataggccttcttttctaggctttgcttagaaagaatcacatctttgtcatctaagtactgaactaaatgcaatgagttctcccagacagattaaaaatcctgccaaggtaacgt

SEQ ID NO: 596275 - DNA, 599 bp, Homo sapiens
aacaaaagattttgtttttaagaagaagcaagatattctttcacttatactgtttgcctaatgaagcttattatctccagaaggctctgaaaactgttgttattattatcccaagaatgggatgccagctgtttgttctgacagctctttgatcctcaatccaattgctttcagggctttggccatcttcccttgtattttccatgatctactcttaactgtcattactattgacagcaaaagtcactttctgatcagcgttagaactaaaaatggatcctctgttagatagacatatgggcaccagtgctttacatgcaccactagtaaatacatctctcccccattgcaacagtcaagtagtgcttctctttaaaaaattccacaccctatatctcatggggtttcaaaaatacagttggtggcaagaataatttcgaagggcagattcagaataagataaaatatyatgaggttaaatctttgaggataattgagctggcataggcaatggtccaggggcatcgatttctcatgaaagggatagaatagaaagttaaggctgtctcattagtgattcttggaattacatgacaagc

SEQ ID NO: 596276 - DNA, 581 bp, Homo sapiens
aagataacataaataatttgaatctctccctacctaacatgccaaaataatggctacttttaaagaactgattaaaattctaatcattcaacattagtttgttattactattatccacatttgtgcaaggcaatgagaagttgccaacttctgtgtaagtatagtgccagtgcctacaacacagcctcgctcacataaacaagggtatagcctggatgtcaatctgcaaagtaatctgtaaaggaagcaaaagtcggccrgtggctcatgctgtaatcccagcactttgggaggctgagacgggtggatcacctgaggtcaggagttcaagagttcaagaccaacctgcccaacatggcgaaaaccgtctctagaaaaaatacaaaaaattaactgggcatggtgtcaggcacctgtaattccagctacttgggagactgaggcaggagaatcgcttgaacccgggaggcagaggttgcagtgagctgagattgcacccctgtactccagcctggatgacaagagcgaaactccatctcaaaaataataataaaaaaaaaggaaacagaagtctagtaaaa

SEQ ID NO: 596277 - DNA, 581 bp, Homo sapiens
aagataacataaataatttgaatctctccctacctaacatgccaaaataatggctacttttaaagaactgattaaaattctaatcattcaacattagtttgttattactattatccacatttgtgcaaggcaatgagaagttgccaacttctgtgtaagtatagtgccagtgcctacaacacagcctcgctcacataaacaagggtatagcctggatgtcaatctgcaaagtaatctgtaaaggaagcaaaagtcggccagtggctcatgctgtaatcccagcactttgggaggctgagacgggtggatcacctgaggtcaggagttcaagagttcaagaccaacctgcccaacatggcgaaaaccgtctctagaaaaaatacaaaaaattaactgggcatggtgtcaggcacctgtaattccagctacttgggagrctgaggcaggagaatcgcttgaacccgggaggcagaggttgcagtgagctgagattgcacccctgtactccagcctggatgacaagagcgaaactccatctcaaaaataataataaaaaaaaaggaaacagaagtctagtaaaa

SEQ ID NO: 596278 - DNA, 609 bp, Homo sapiens
ggccctcaactcctaagatggtaactactgatcttttacagaaaaaagttggcttcactggtagcagtccaggtccatatctccctcccattgcctctacaacagaggaatggttatttctgaaatccttttgttctatccttcagcttcattttacaatgtctgatcctctgccataaatcaagagatgcatcactttagagtaatgaaaataatagtcattgctttataattgtactaaaattgtccatatgcttgctgttctagtttctactaactgggattttacaaagtcaccttccatctttcagcctcagttcccaaataaagaatttggactagacaatgtctaaaattcctcttagcttcaatatgatgaaatgactatgmtacaaagagaatgttttcattttaagaaaatgtagtttaaccaccaagggtcataggaatttttctggaagcccacttttataacagacattattggctgcttacatagtattcatcccatccaatctccttcctaaccaagttctgccccatgtcagcccctccttcccttggccctatgctttgagagaaactaacccaggaatagtccagggacta

SEQ ID NO: 596279 - DNA, 560 bp, Homo sapiens
gattggaagtttcctgaggccaccctagccatgtgaaactgtgagccgattaaatctctgctctttataaattacccagtctcaagtatttcttcatagcagtgtgatagcagactaatacagcagttcttttttccaatacattatgtctgaatatcaaggatatattacaaggcatactaaaacacagtaaaagaaaggcaaaaaccaaacacaacaaacaaaaaactaaacagttcgaagacacagtaacacattagaaacaggcawgggtgggatattggaattatcaaacaagaaatttaaagcaactatgattaatgagataacggctctaacggataaagcagacagcatgcaagaacataagaaaatgtaagcacagaaatgaaaatcctaggaaagaacctagaagaaatgctagagatcaaaatcattgtaacagaaaggtatctgaaaatctcattaggagattggccccagatgaggaagaaaatctctcagcttgaatatttatcaatagaaacttccaaagctgaaacaaaaagagaaaaggctga

SEQ ID NO: 596280 - DNA, 552 bp, Homo sapiens
tagcaaaccaaatacaataaaatataaaaggattatacactgtggtaaaataagatttattttaggtgtataaagcttgtttaatattacaaaatcatttaatataatacatcctatcaactggtcaaattctacaagaatattatatcaataaatgtaagaaaaaacatttgaaaaaaaacccaacaaattcacaagaaaaactgtcagcaaactaaaaatagaggagaacttagtcaacttgataatgaaaatctataaaaatccacagctaatgtaatacttaataattagaaactagatacttccctgctaagacaaataacaagacaagaatgcctgttctcctcacccttactcaacattatactggaaattctagttaatgcaatgagaaaataaaataaaagctacaaataggaaagaaagatattgtctttatttgcagatgacatgcttgaatatataaaaaaaawtttttaaagattaaagaaaagtaaagcccctgccaaaactagtaagtaattaaatcttgtatcataggttgtagga

SEQ ID NO: 596281 - DNA, 576 bp, Homo sapiens
tttatttctaggggtgagcaagagaaaacattgaagaaactgagaatatataacagcacactcttcccaggctgagaagcagacattattggagacagtggggctaccacctgagccagcagcatacctatagcaaaaaaatttctcacaatgcgcagattggagctagtttgcaagcgtggccactgtatggctgataaacttgttaaaagattcaggtgagccatatttgtatatggaaactgtacactatgtgaccaagaagatcacttgaaagtactagtgtgctcgagctgattcacaggaagtggtattctgtagatgcactgaaacctgagcaccactggtcctccaccttgtacccataacataggaggaaataaagcaaccaggagcatacattgctttgagcttcagtgtcccgcyggcctcctctactgacaaagtctacttgtaccaagtggcaaaggaaaaatattaagagtttagctctgatctcacaaagtaggaaaaagggaagtagatttggtactgcaagtaataaattgatagaccaatatacccgtttgcttactc

SEQ ID NO: 596282 - DNA, 641 bp, Homo sapiens
aaatgaaggaaacacagaagrtattttctccctctacagaaaagaacatgtaagaatctatcaaatggttttactgtttttgtggtttacttgttatcaaagtttaaagttatttgttatttactatttttattataaatcataagaaaaatacatattattttactacctgaaacttgtcatattgtttttaatcaataaacattttgaagattataataattataacaggaattttttaacagtatacttaaaaaaaaaacactactcctgtgttccaaaattttcaatcaaaataagaagcccaatttaccccttaccgttaccttaatatgatttccaaaatgcaaatctaactccagttgagaaaaccagctgtgaaagtatgttgtgttgacagacacagtgattttagtaatgtaatttagtgctgttcagctttagtgaccttttaaagactaaaataaaaacattactctctgtggtctgaatcatttaagctgcttcagctttcatactttacagtacaaacacttcaaaacaaagaaagccagtaggaatatgagatgaaataaatttttaataattataagacagagtgccatcacacatattgtaataatttgtcaaggtgaagaaat

SEQ ID NO: 596283 - DNA, 479 bp, Homo sapiens
ctgattacatttaaacagtttataatttaattcaaaataaaaccatgaaaacatgactaataaccttattgattatttgaaaatatattttacttttcttatgcatctgaggatgtaaaaaatgtgtattgtggaatatatagttttagctagacattcaaagatctgtaattttaacacagttaaagaatgaaaaattatataaaagaaatgtttggtactagaaaagtccactcatctcaacaatagtcactaaaagaaaataacacacatgcacacacasacagacatatacatacacacacaccttgaatactaaggaaatgactaaaagaccaaataaaagaccctagtaaaattgaaaaagatgagacttctggaatgccacagtaagaagtttgggagatcttctcccttagtgaaagaacaatttagctggtaaaaattgtaaaagtaacagtaattaaaatttctggaaa

SEQ ID NO: 596284 - DNA, 570 bp, Homo sapiens
agtccagaggaggccaaggtggcagggtcttggcatgtcagcactgcccaaacatgctcacacctggttgtgttgcaacagcacctgggctcgactccaactttgctctgaaattggagcagaagctgcatgcagggagagtccaggcagtgggagcaggcacttctgagcctgcagggacaggggacttcccagacccctgaaaatgcagagatacccaggtctgcagcagtgtctgggtggctgcagtggcaccaggagtgcaggctcctgccccattgactcagaaaagggtgaggcttgagcctsttccaagcacctgcaggctccatagagtgcacagccctggccatgccctccagatgactgctgccatgccatcaatactcaattcaaaaacacttattttatatttgaggacacgaatgcacaaggacaataaggaacttaagccagttcaattgtagttgacatctaagattcagacacagttacatttgactctggaacctaacaattaactgctatattatatcacaaactgtatattttgatgaatcaaactaatca

SEQ ID NO: 596285 - DNA, 613 bp, Homo sapiens
gtgtctccttttcatttcccttgttgaaggagaatgaaaaagttatctatttcttctgatgattatgaagtctaaatgagattacagacataaaatcacaggttgaacacatatatttcatttcactatctcccaaacttcagtaaaatacagcaaattagaagaacaagtagaaggcaaaaagagaatatcagaaaagaccatagcaaattttagaaattgaatggccaagggtaaacagtcattcattcaaaatctatagccaatgtagttgaaagtgaaaggaaaaaaaagcacatgtaccaaatgaattctctcctacaaaagcttagataygaggagacttcaaaaagttcatggataaaatggaattaaaagataaaactttaaaagagagataaactttatttctcaacataagagtcatcaagctcaagacaatactgtgagcaatgacaccagccatttagtgcatccatatggacctaagggtcctaggaatttaataatgtcaatgtagtcttttttaaattattaattgaagaaaaaaatgaaaccctttacagattttttaggactagaaaacaaacagaaatcagaaagagataattgc

SEQ ID NO: 596286 - DNA, 602 bp, Homo sapiens
agtagccaaaacagcatagtactggcataaaaacagacacatagaccaaggaaacagaatagagtgcctataatcaaatttatgtatttgtcaactcattttcaacaaaggtgcaaagaatatacattggatgaaagaaaactctcctcagtaaatggtactgtgacaactggatatacatatgaagaagaataaaaccagacccacatcttaaatataagacctaaaacagttgaattacttgaagaaaacactggggacatactccataacataactaccacaagatatcatctcactcagttaaaatgactttatattttgtatatattttgtgtgtatacacacacacacacaagcacacacatacgcagatagatgatagatatatagataggtgacatgatgatcggggaccatcttcttttagaaacagaagattagatgtcaattgtgaggtatctttaattttttatttttaattattatgggtaataacagttgtatatayttatagggtacaagtgatgttaggatataagcatacaatgtgtaatgaccaaggtagggtaattggggtacccatcacctcaagaatttat

SEQ ID NO: 596287 - DNA, 603 bp, Homo sapiens
gaaggagagtgttcagatgcaacaacacttccactacttgacatattcattcactcttcagacatttactgggcagcaactataggcagtaggaccacaatcaaacttttccccacccaggtactgtcttcctattactttatcattataagaatctcccccaattttggagaaataagaaacagtggtacttttgacagattgctgaataacaaagttctcagaaaacgaacatatctgcagagcatactgacattaatattttatgctttttctttgtattgctgttttaaatataygtgtcttacatcctacactaaaagcatctgaaagtaatatttagtttatgtttcaaagaacctcataatgtggcttttccactgaaggcaatcattaaacatttgtgaatgaatgcattttggtgcaggtcccagattttaaaactgcaaactcaacaaattaatagataagaagttggaatgttgtcgcctaggaattttattctatcaattttctttgcttggattagtttgaccccaaatattcaaatcaaagaactgcatgtagaataaataacattgtgttcgtacaaaacatacgaaa

SEQ ID NO: 596288 - DNA, 513 bp, Homo sapiens
tactttttctttcgacatttacgtgacctttctgtttggacatttagactatcaaggtgttgtatttgtagttaattctgggttctgttaatgcactaaacaaatttagataccttgggagttacaatataaaaaattacctgttttgtaaaagctggttattacactttatcaatgaagacaaatatttatttttttctgtgtttctaatgcattaatacycttgagtgccaaaatagcactgaaatgttattctgtatacttataaatattgtataaaattaaagtgtcacaacagtaattagtgtttatgagttatttagaagcttctcctgcttcagcctcctgagtagctgggactacaggtgcccaccaccacgtccagctaattttttgtattttcagtagagatggagtttcactgtatcagccaggatggtctcgatctcctgacctcgtgatccgcccgccttggccttccaaagtgctgggattacaggtgtgagccaccgg

SEQ ID NO: 596289 - DNA, 579 bp, Homo sapiens
taatgttagcagggtccaactgtctctgctacatgaggctccagttatctcaactaagctgtttatgagccacactcacaaacaagatcaccaaaagttaagtctttttggtatatgtataggaacacctatctattagggcctgtttgaagcagcatttttggtgctttggatacaaagatagtatagtgcctcaattgaaggatcttggattaggttgagaaaaaggtaaactgatcatgtaatggcataagcaagtaggtaycatgtaacggtgtaaacaaaaatttatgttagatagtcattccccacagagagatttcatactgtatagtacagggcccatcagactctcttcaaagaaaatgatactcaaaatggacttgggagaatgaggaagagtttgtgaatcattctaagggaaaactgaataagtaaatgcaacattttacataatttcttccgacttatgtgttcacttgccctagactgcccctcttgtttgaggcttatttctgtgcattttaccacttgcaagataatggaggcaggttgaaatgggaaagataccagatgact

SEQ ID NO: 596290 - DNA, 579 bp, Homo sapiens
taatgttagcagggtccaactgtctctgctacatgaggctccagttatctcaactaagctgtttatgagccacactcacaaacaagatcaccaaaagttaagtctttttggtatatgtataggaacacctatctattagggcctgtttgaagcagcatttttggtgctttggatacaaagatagtatagtgcctcaattgaaggatcttggattaggttgagaaaaaggtaaactgatcatgtaatggcataagcaagtaggtaccatgtaacggtgtaaacaaaaatttatgttagatagtcattycccacagagagatttcatactgtatagtacagggcccatcagactctcttcaaagaaaatgatactcaaaatggacttgggagaatgaggaagagtttgtgaatcattctaagggaaaactgaataagtaaatgcaacattttacataatttcttccgacttatgtgttcacttgccctagactgcccctcttgtttgaggcttatttctgtgcattttaccacttgcaagataatggaggcaggttgaaatgggaaagataccagatgact

SEQ ID NO: 596291 - DNA, 579 bp, Homo sapiens
taatgttagcagggtccaactgtctctgctacatgaggctccagttatctcaactaagctgtttatgagccacactcacaaacaagatcaccaaaagttaagtctttttggtatatgtataggaacacctatctattagggcctgtttgaagcagcatttttggtgctttggatacaaagatagtatagtgcctcaattgaaggatcttggattaggttgagaaaaaggtaaactgatcatgtaatggcataagcaagtaggtaccatgtaacggtgtaaacaaaaatttatgttagatagtcattccccacagagagatttcatactgtatagtacagggcccatcagactctcttcaaagaaaatgatrctcaaaatggacttgggagaatgaggaagagtttgtgaatcattctaagggaaaactgaataagtaaatgcaacattttacataatttcttccgacttatgtgttcacttgccctagactgcccctcttgtttgaggcttatttctgtgcattttaccacttgcaagataatggaggcaggttgaaatgggaaagataccagatgact

SEQ ID NO: 596292 - DNA, 611 bp, Homo sapiens
gtacagggcccatcagactctcttcaaagaaaatgatactcaaaatggacttgggagaatgaggaagagtttgtgaatcattctaagggaaaactgaataagtaaatgcaacattttacataatttcttccgacttatgtgttcacttgccctagactgcccctcttgtttgrggcttatttctgtgcattttaccacttgcaagataatggaggcaggttgaaatgggaaagataccagatgactaattctttccccaacatttccatcttatgttaagaaatttgaagttgattgctacattgaagtatgtagttttgttttttttgtgtgtcagtctttaaccatttgtgtccctgttaacttataattgatgaatttatttgtatttatttttaggcagggtaaaaaatagtaatatgtctcataaataatatatgttcctattactagttttggtaggatttaaaaactttataataatcctcaatatagaaacctgcccctttaaccatattactatttgcttttaaaaaaaaattttaggttttgtttctaaaatgcttcacaatttatttttgaaaatataaggaatgaaattctaactttct

SEQ ID NO: 596293 - DNA, 611 bp, Homo sapiens
gtacagggcccatcagactctcttcaaagaaaatgatactcaaaatggacttgggagaatgaggaagagtttgtgaatcattctaagggaaaactgaataagtaaatgcaacattttacataatttcttccgacttatgtgttcacttgccctagactgcccctcttgtttgaggcttatttctgtgcattttaccacttgcaagataatggaggcaggttgaaatgggaaagataccagatgactaattctttccccaacatttccatcttatgttaagaaatttgaagttgattgctacattgaagtatgtagttttgttttttttgtgtgtcagtctttaaccatttgtgtccctgttaacttataattgatgaatttatttgtatttatttttaggcagggtaaaaaatagtaatatgtctcataaataatatatgttcctattactagttttggtaggatttaaaaactttataataatcctcaatatagaaacctgcccctttaaccatattactatttgcttttaaaaaaaaattttaggttttgtttmtaaaatgcttcacaatttatttttgaaaatataaggaatgaaattctaactttct

SEQ ID NO: 596294 - DNA, 558 bp, Homo sapiens
ctattgcttaagaaagtccagacaacacaaaagaataaaagcattggtgaacagcaagaaaagtcaaaatagctgtcatacagtgtaaattgaagaaggaccaaatcagyattgctttctaatttccatcaaaccctatcatctgccaattttcattactggcaggacactgggctgactgatttgtctataaaagagaatctctggaaagaaaaaataaatcatggatgtcatccaaagaggctagaccgtatcattggcaggtagataagaaaggtcagaggactgacagaatttagggcaaaagaaaagcagcaggacttaatgtcaagaaatacaaagataaccaaagaaaagaggctggagttaaatcttaagtgaagtaaaaggaattaaagctaaatgatgagtaaatacattgaggaacagggggtgaattaagatatgtagcatttccatgtttaaaccttgcaaaaacttctcattgcagaccgaacagaacccaaactccttcccttgcttacaagcctacatgatctagcctttgttcgccttgat

SEQ ID NO: 596295 - DNA, 462 bp, Homo sapiens
tgatcagtagtatagtttgctgaggagtcaatttgattagtagtcaagagcctgatcttagaagccaaatagacctggattttactcctctcccctcttaaattatctttagttatagcctgtctttttgctttttcaactgtttaaagaaaaatttcttagttgattattgctttaaacttaatgtctctggcttacagacatgtgtgtctaaatattcatatttaatttctgtgatgacaccaaacytatccagtagtatcgataatcttcttatacatgacctccataaggttgtttcagtattcccacacatcttctccctgactgggagggttggaaccaacctcatttctttgtgtagtgcttttaaaaataatattgtttttcacataaggcatattaagtgtttttgcaccagatgtattacatggatgtttttctttgactaatttattacca

SEQ ID NO: 596296 - DNA, 579 bp, Homo sapiens
tttattttaaatgcctatcacttaaagagccatttaaaagttattttagcagtaagtccttcacttaaaatatgttcaataagacttgattcatgttaggcagttggggatacaaagttaaaaaagttaaggctcctgtccttcaaggattcacagagttgtgctgtaaataaatgattatgtaacagaagtttcttgtaagcatatgggtaaaagtaatattcgacaactaaatgggtatttgggtgtggtaataggtattcaggaaataatgtgcagattttttttttgagacagggtctcactctgtcccccaggctggagtgccgtggcataaactctagtcactgcagcctccacctccttggttcaagcgattctcctgcctcagcctcsttagtagctgggactacaggcatgtgccaccacaccctgctaattttgtatttttagtagagatggggtttcaccatgttggcccggctggtctcgaactcctgacctcaggtgatccatctgctttggcctcccagagtgctgggattacaggcatgagcctctgtgcccagccatgagcag

SEQ ID NO: 596297 - DNA, 227 bp, Homo sapiens
agaggttaacaattagatttacatttttgaaagattgttctggatgtgtagaaaatgawttagagaggatgtcagaaccgtaagtagagatgatttgatgcagaagatactgcagttagcgagacagagtattaggtaggtgcaaaggtaattgcagtctttgccattaaaagtaatgtcaaaaactgcagttacttttgcaccaacctagtatgatagactaaact

SEQ ID NO: 596298 - DNA, 411 bp, Homo sapiens
cacatttagggatggatgatgtccataattatgtggattttratgcttttacaactagaaattaatatagatgaatatagaattagtatattaagtaatgtgtttgtgtatgaatatgtagcttctgtctttaatgttcttccacataagacattttccagtaataaaaaaaagcccttatgtgacttgaatagtctgtttatgcttaagaagcatcttagtctaattgatattgtttcttaattttgtctcttgtctgattttgtaatttcaaaatatatttagcatgcaaagaaaatgtttatgttacactgcaaagcatttcttagttggtattttccttgtttggttctttgcagtgagcatatattgagcattaattaggtatccagcattatcattggcattagg

SEQ ID NO: 596299 - DNA, 411 bp, Homo sapiens
cacatttagggatggatgatgtccataattatgtggattttgatgcttttacaactagaaattaatatagatgaatatagaattagtatattaagtaatgtgtttgtgtatgaatatgtagcttctgtctttaatgttcttccacataagacattttccagtaataaaaaaaagcccttatgtgayttgaatagtctgtttatgcttaagaagcatcttagtctaattgatattgtttcttaattttgtctcttgtctgattttgtaatttcaaaatatatttagcatgcaaagaaaatgtttatgttacactgcaaagcatttcttagttggtattttccttgtttggttctttgcagtgagcatatattgagcattaattaggtatccagcattatcattggcattagg

SEQ ID NO: 596300 - DNA, 425 bp, Homo sapiens
tgaagagataaaacatgtgactttttatrgagaggttgaactgaataataattggaggccaactgacccatcttcctgttgacttctgtttatcccccagatttcattcagagattcctctctcagctcttcttgctttccctgttttttctcttcccctcctcttgaatttaaaatcatagtatctgaaagtaattatagtcaaaaatctcaacagagataacgctgtaggaaaggggcccaatctttgggggcagaagagtgtttaaagaaaggttttaggttttcaattataattcttaataattatgacaaggttcatcttttgaaataattattcagcatttaattgcttaatagacattataagcacttgaacctgcattacatttaattctcacagtaatgtttattattcccctttt

SEQ ID NO: 596301 - DNA, 425 bp, Homo sapiens
tgaagagataaaacatgtgactttttatggagaggttgaactgaataataattggaggccaactgacccatcttcctgttgacttctgtktatcccccagatttcattcagagattcctctctcagctcttcttgctttccctgttttttctcttcccctcctcttgaatttaaaatcatagtatctgaaagtaattatagtcaaaaatctcaacagagataacgctgtaggaaaggggcccaatctttgggggcagaagagtgtttaaagaaaggttttaggttttcaattataattcttaataattatgacaaggttcatcttttgaaataattattcagcatttaattgcttaatagacattataagcacttgaacctgcattacatttaattctcacagtaatgtttattattcccctttt

SEQ ID NO: 596302 - DNA, 563 bp, Homo sapiens
gcagaagagtgtttaaagaaaggttttaggttttcaattataattcttaataattatgacaaggttcatcttttgaaataattattcagcatttaattgcttaatagacattataagcacttgaacctgcattacatttaattctcacagtaatgtttattattcccsttttatacctgaaactcagagagctttagtctaagttgtttagtgacacagctagaaaacagcagcctggatacaaatagagatctgatgtcaaatttgatcctctttacgttatatgacagtcttttcaatttgctgtgccaagatttgatctttccacacagtagcacatagcagttacagcgccttcctctcaaaaattatattttaaaagtaaagatcagaggctattcatcttgccttaacccttcctcctttgcaggaatcctaaaatggctagagcaagttaaccataggtgagcattgagtaaagatcaccatttaggaggtaatccttatggtagggttacctctgttactatctgcagagacaaaacagatactgaggtatttat

SEQ ID NO: 596303 - DNA, 341 bp, Homo sapiens
ttattattccccttttatacctgaaactcagagagctttagtctaagttgtttagtgacacagctagaaaacagcagcctggatacaaatagagatctgatgycaaatttgatcctctttacgttatatgacagtcttttcaatttgctgtgccaagatttgatctttccacacagtagcacatagcagttacagcgccttcctctcaaaaattatattttaaaagtaaagatcagaggctattcatcttgccttaacccttcctcctttgcaggaatcctaaaatggctagagcaagttaaccataggtgagcattgagtaaagatcaccatttaggagg

SEQ ID NO: 596304 - DNA, 588 bp, Homo sapiens
tttagtctaagttgtttagtgacacagctagaaaacagcagcctggatacaaatagagatctgatgtcaaatttgatcctctttacgttatatgacagtcttttcaatttgctgtgccaagatttgatctttccacacagtagcacatagcagttacagcgccttcctctcaaaaattatattttaaaagtaaagatcagaggctattcatcttgccttaacccttcctcctttgcaggaatcctaaaatggctagagcaagttaaccataggtgagcattgagtaaagatcaccatttaggaggtaatccttatggtagggttacctctgttactatctgcagagacaaaacagatactgaggtatttatgaactgtgcggttcccaggactgatgattttcatgattacttatgttgcaaaacataagtttaaagataagccatcattaatgctatcttactttttagacaatcgggagaaratagcaagatgctagtgtgtgatacgtgtgacaaagggtatcatactttttgtcttcaacgaattatgaaatctgtaccaaccaatggctggaaatgcaaagta

SEQ ID NO: 596305 - DNA, 483 bp, Homo sapiens
ttcaaagaccatacagttactaataaaaaatataaaggagagtttaccttctcagctggttgtttctgagaagacactgaaaagcaaaagggatacataatcactcatatgtacrtatgataaatttatccatacatcatgcagtgttattatcaagctgtatcttcctgcctgcactagtgtaggctttgatgtttcctactttttgtctggagactggaacacgacagaaatacacgaaaaaaaaggaatacaggcttcacaaaatatacccttacaatttcaaacatggtatgattcgtgatatgtctaaaactaaaataaaaccgtgtcaatatcaatgtggatatgctgagtgatgaggacaaatcagaggggtaactcacacacctgagaatcaatgtcaaagcaggtggtacatgacccacagtatgtctttctttcaagaaattagaaggatttacaccattatactacaaacgt

SEQ ID NO: 596306 - DNA, 483 bp, Homo sapiens
ttcaaagaccatacagttactaataaaaaatataaaggagagtttaccttctcagctggttgtttctgagaagacactgaaaagcaaaagggatacataatcactcatatgtacgtatgataaatttatccatayatcatgcagtgttattatcaagctgtatcttcctgcctgcactagtgtaggctttgatgtttcctactttttgtctggagactggaacacgacagaaatacacgaaaaaaaaggaatacaggcttcacaaaatatacccttacaatttcaaacatggtatgattcgtgatatgtctaaaactaaaataaaaccgtgtcaatatcaatgtggatatgctgagtgatgaggacaaatcagaggggtaactcacacacctgagaatcaatgtcaaagcaggtggtacatgacccacagtatgtctttctttcaagaaattagaaggatttacaccattatactacaaacgt

SEQ ID NO: 596307 - DNA, 483 bp, Homo sapiens
ttcaaagaccatacagttactaataaaaaatataaaggagagtttaccttctcagctggttgtttctgagaagacactgaaaagcaaaagggatacataatcactcatatgtacgtatgataaatttatccatacatcatgcagtgttattatcaagctgtatcttcctgcctgmactagtgtaggctttgatgtttcctactttttgtctggagactggaacacgacagaaatacacgaaaaaaaaggaatacaggcttcacaaaatatacccttacaatttcaaacatggtatgattcgtgatatgtctaaaactaaaataaaaccgtgtcaatatcaatgtggatatgctgagtgatgaggacaaatcagaggggtaactcacacacctgagaatcaatgtcaaagcaggtggtacatgacccacagtatgtctttctttcaagaaattagaaggatttacaccattatactacaaacgt

SEQ ID NO: 596308 - DNA, 610 bp, Homo sapiens
ttcatttagttagatgaagtccttttaccttattttttgacttgttgattcaacaagttacaattgaccactattaattgttcctatcaatttatcatatttttaaacaaataatttgtggctgttatttagcaagtaggtcaggccagtgttaatatattgtgttttttaccagtataaaattgttatttattctatgtaatgtgttttttgttgagggatcaggaagggcaggtattttgctttgcctgacactatggccacgtagggtgttagtttaacagttgaatggttatcttttcacatcttattttggattcttttgtgttataaaaatgtatcttttgaaaagcttaatagaggtaactgtttggattgacggttgtaattgaaatgcttggctgttttgagrcaaaatttttcttttctttctattttttctcttcttttacttcctgcaatgatttataattcagaatctcattttgtgaatgtaaatgattataaatattaaagatataaattttctcccattccccactgacaataaagtttttattccccttttctctgtttgattcgattaacctagattgtaaaccttgtcaca

SEQ ID NO: 596309 - DNA, 435 bp, Homo sapiens
tgaaaaaatttaatcataatcctttttttcttcctgaaagctttgggagatgtgtgaatccccatccccgcctccaccccccaccccagcacctttttaaaaaaatatatttacttaaaaaattaccttctttacactctctaataatatctagtaactactggataatttttgtctcttgctcttaatcttctttattatggttttcattgtcttgagaactggtagagaattctgggtgtctttctcarcttgttctgtctcccctttggtgtgcttcttttcgatttgctctttgtaatctgctattctcttttgagagtgacaggattacataatttctgggaatactattggatacttaatctttttattctgttctatgaaggcactatagtgtggtggttaaaagcttatgctgtggagtcaaactgc

SEQ ID NO: 596310 - DNA, 483 bp, Homo sapiens
ttcaaagaccatacagttactaataaaaaatataaaggagagtttaccttctcagctggttgtttctgagaagacactgaaaagcaaaagggatacataatcactcatatgtacgtatgataaatttatccatacatcatgcagtgttattatcaagctgtatcttcctgcctgcactagtgtaggctttgatgtttcctactttttgtctggagactggaacacgacagaaatacacgaaaaaaaaggaatacaggcttcacaaaatatacccttacaatttcaaacatggtatgattcgtgatatgtctaaaactaaaataaaaccgtgtcaatatcaatgtggatatgctgagtgatgaggacaaatcagaggrgtaactcacacacctgagaatcaatgtcaaagcaggtggtacatgacccacagtatgtctttctttcaagaaattagaaggatttacaccattatactacaaacgt

SEQ ID NO: 596311 - DNA, 421 bp, Homo sapiens
ttttcatctaagaataagaggatatattgctctttcagtgaaggtagcatgttgtatatgttcttttgcatgttgcttttttcatgtaataaaatctggaaatcacttccaggcaagttaggcaagttcaagagatctcattctccttttaaacagctgcatagcactccattgtgtatctgtgctatcggttactyaaccagtggcctgtgctttggtatttcagtagtttatgatattttgcattataaatgattttacactccctggctttgtgcatgtgtgtttttgaattctcagggacaaatctgtagggtaaattcctaggattattgcctcaggagtgtacacatatgtagctttgttagatactgtgaaattcccttttttggggcttatggtactttgcattgccaccaga

SEQ ID NO: 596312 - DNA, 538 bp, Homo sapiens
tcagcctcccaaagtgttgggattacaggcatgagcactgcacccagccgagtttgttttgtgttattaaattggtataaaagatttttgaaaaattaagtcagtgattaaaaatcaagactacagtagtctctcaatttattttctctaacatgaaatgctgacccagaaaaaaattaagtaaaaactggtggtctatattatcaaactgtcaaatgaggcatatttatacttcaatatcttggatgatatcagggggaggtwgggagtttaaaaaaatagttcttccagtcatgaaagaaaataaagtataatctagaattccttaaaatccttcattagtctaaattaaacagccatattccagaatattaaatatagaatatgaagaaaaactgtcatctccagtcaatgaagttttttaacttttgagttaatactttttcaaagtaatttttttctctccgaaatgcatcacactacttaactcacttcaaggactggcagagccatcaaccaatgtcataggggaaaaagc

SEQ ID NO: 596313 - DNA, 538 bp, Homo sapiens
tcagcctcccaaagtgttgggattacaggcatgagcactgcacccagccgagtttgttttgtgttattaaattggtataaaagatttttgaaaaattaagtcagtgattaaaaatcaagactacagtagtctctcaatttattttctctaacatgaaatgctgacccagaaaaaaattaagtaaaaactggtggtctatattatcaaactgtcaaatgaggcatatttatacttcaatatcttggatgatatcagggggaggtagggagtttaaaaaaatagttcttccagtcatkaaagaaaataaagtataatctagaattccttaaaatccttcattagtctaaattaaacagccatattccagaatattaaatatagaatatgaagaaaaactgtcatctccagtcaatgaagttttttaacttttgagttaatactttttcaaagtaatttttttctctccgaaatgcatcacactacttaactcacttcaaggactggcagagccatcaaccaatgtcataggggaaaaagc

SEQ ID NO: 596314 - DNA, 538 bp, Homo sapiens
tcagcctcccaaagtgttgggattacaggcatgagcactgcacccagccgagtttgttttgtgttattaaattggtataaaagatttttgaaaaattaagtcagtgattaaaaatcaagactacagtagtctctcaatttattttctctaacatgaaatgctgacccagaaaaaaattaagtaaaaactggtggtctatattatcaaactgtcaaatgaggcatatttatacttcaatatcttggatgatatcagggggaggtagggagtttaaaaaaatagttcttccagtcatgaaagaaaataaagtataatctagaattccttaaaatccttcattagtctaaattaaacagccatattccagaatattaaatatagaatatgaagaaaaactgtcatctccagtcaatgaagttttttaacttttgagttaatactttttcaaagtaatttttttctctccraaatgcatcacactacttaactcacttcaaggactggcagagccatcaaccaatgtcataggggaaaaagc

SEQ ID NO: 596315 - DNA, 418 bp, Homo sapiens
tacacttttaactgtagagagctggtaacattaaaatgcaaataccattataatcttagcatttaatcactctttcttcagtgaccattagttgtcggtttggtttcggtttttacttagggaaatgaatactttatggaaattacatccaatggacaaaagtgaagaaacgttaaagcaaattgtcctaaatttgcaaattaaaatgcctaaagtgcctgataaattatgtagaaagtactatcttattaaaatctatataactraaactaaagcattttacttctgaacaaccacattcagcaataccctgaactaatctgaagatgctaaacagcataaagaaaaatgtttactccacaaagataacattttaaagaaaaacaagacaaatgtcaaacaataaaagaatatattt

SEQ ID NO: 596316 - DNA, 418 bp, Homo sapiens
tacacttttaactgtagagagctggtaacattaaaatgcaaataccattataatcttagcatttaatcactctttcttcagtgaccattagttgtcggtttggtttcggtttttacttagggaaatgaatactttatggaaattacatccaatggacaaaagtgaagaaacgttaaagcaaattgtcctaaatttgcaaattaaaatgcctaaagtgcctgataaattatgtagaaagtactatcttattaaaatctatataactaaaactaaagcattttacttctgaacaaccacattcagcaataccctgaactaatctgaagatgytaaacagcataaagaaaaatgtttactccacaaagataacattttaaagaaaaacaagacaaatgtcaaacaataaaagaatatattt

SEQ ID NO: 596317 - DNA, 480 bp, Homo sapiens
aaggattttcaacttccttcttagcatttccattttctcacacaaaacccctcttaagtttgccatgtttaaaatttctcccttaaccggtttcatcccagtcttccccatccttataaatggcatccagtcccttgtcactctcctctgcttcttcagtcctctcccccaacacttcgtcaatgcaaatcatcagcaaattcaagactttttatcttcaagttttgtctccaatccttctacttcttgtcacttccaccactagcagcacactcgtggccaccaccatctctcacctaacctgctacaagagtctactgctggttatgcttctcccaccctgcatctactcaarcctttccccacagcagccagaggaacttttcaaaagtacaaatgtgatcaagcaagtcactattctatttcaaaccttcaattgcttctcagagcacttaaaatacaaacctttcccagtgcctt

SEQ ID NO: 596318 - DNA, 409 bp, Homo sapiens
tataattatcaaagtttaaattatccttcagatcttagctttgatcaagaatttacacaaaccattcagaaaaggttacctgcccctgtaatgtatgggytcttctcctacaatccagttgcagcactttttacactgtaattaaagatcatgcccctttctgtccactgctacgttaagcacactgttcagcacttactgaactttttttctgctgagcatctattatctttttttgcatgtgtgtatgaattcatcaataaacaatgagctatgatatgaaacacactaatgcctccaccagtaataacctagaatcttgaatttcttcacttaaaaaaaagttactaaaaattactaaaaaatctatataatgcctccttaatctacaaactgaattaaaagcaaa

SEQ ID NO: 596319 - DNA, 409 bp, Homo sapiens
tataattatcaaagtttaaattatccttcagatcttagctttgatcaagaatttacacaaaccattcagaaaaggttacctgcccctgtaatgtatgggctcttctcctacaatccagttgcagcactttttacactgtaattaaagatcatgcccctttctgtccactgctacgttaagcacactgttcagcacttactgaactttttttctgctgagcatctattrtctttttttgcatgtgtgtatgaattcatcaataaacaatgagctatgatatgaaacacactaatgcctccaccagtaataacctagaatcttgaatttcttcacttaaaaaaaagttactaaaaattactaaaaaatctatataatgcctccttaatctacaaactgaattaaaagcaaa

SEQ ID NO: 596320 - DNA, 409 bp, Homo sapiens
tataattatcaaagtttaaattatccttcagatcttagctttgatcaagaatttacacaaaccattcagaaaaggttacctgcccctgtaatgtatgggctcttctcctacaatccagttgcagcactttttacactgtaattaaagatcatgcccctttctgtccactgctacgttaagcacactgttcagcacttactgaactttttttctgctgagcatctattatctttttttgcatgtgtgtatgaattcatcaataaacaatgagctatgatatgaaacacactaatgyctccaccagtaataacctagaatcttgaatttcttcacttaaaaaaaagttactaaaaattactaaaaaatctatataatgcctccttaatctacaaactgaattaaaagcaaa

SEQ ID NO: 596321 - DNA, 409 bp, Homo sapiens
tataattatcaaagtttaaattatccttcagatcttagctttgatcaagaatttacacaaaccattcagaaaaggttacctgcccctgtaatgtatgggctcttctcctacaatccagttgcagcactttttacactgtaattaaagatcatgcccctttctgtccactgctacgttaagcacactgttcagcacttactgaactttttttctgctgagcatctattatctttttttgcatgtgtgtatgaattcatcaataaacaatgagctatgatatgaaacacactaatgcctccaccagtaataacctagaatcttgaatttcttcacttaaaaaaaagttactaaaaattactaaaaaatctatataawgcctccttaatctacaaactgaattaaaagcaaa

SEQ ID NO: 596322 - DNA, 622 bp, Homo sapiens
ctagggtaaggtcattagcttgatgttctaaaatctactgagttgattacaatatgtgtcagtgtcaataaccactttcttaaacccargtcgcaaagcacatatacctatagaaatgttgaaaatgggccaggcgctgtggggctcacacctgtaatcccagcactctgggagacccgagatgggaggatcacttgaggccaggactttgtaaccagcctggtctacacagcaagacccccatctctataaaaaaataaaaaatatttttaaatgctgaaaaatgaaatactaaattatttatgaatatataacttcaataaaagatgagaaaatacaactaggtcattaggacaatttgtatgaaacaatatccaatttgctgtctgttacttctaccttatcatgtctaatttttcctcatctttgtgaaatcctgcatctacaataggcaaaaaaacaaaaaacaaaaggaatcttattctattcacagccatcagaaaaatgtgttactattcctgtagtcagttaggttctaaatcatacatttgagatatatctcaaacatgtcataaagaaaataagcatcatatttctaactaaatagcacctgaaatattcc

SEQ ID NO: 596323 - DNA, 622 bp, Homo sapiens
ctagggtaaggtcattagcttgatgttctaaaatctactgagttgattacaatatgtgtcagtgtcaataaccactttcttaaacccaggtcgcaaagcacatatacctatagaaatgttgaaaatgggccaggygctgtggggctcacacctgtaatcccagcactctgggagacccgagatgggaggatcacttgaggccaggactttgtaaccagcctggtctacacagcaagacccccatctctataaaaaaataaaaaatatttttaaatgctgaaaaatgaaatactaaattatttatgaatatataacttcaataaaagatgagaaaatacaactaggtcattaggacaatttgtatgaaacaatatccaatttgctgtctgttacttctaccttatcatgtctaatttttcctcatctttgtgaaatcctgcatctacaataggcaaaaaaacaaaaaacaaaaggaatcttattctattcacagccatcagaaaaatgtgttactattcctgtagtcagttaggttctaaatcatacatttgagatatatctcaaacatgtcataaagaaaataagcatcatatttctaactaaatagcacctgaaatattcc

SEQ ID NO: 596324 - DNA, 424 bp, Homo sapiens
gaattcttctggtattttaatttcaccaataattctggaactgctgtttttgtatttctcaaaatgttttgtcttgcatcgtgcaataaggcagccaccatcatatgtgaccaccgagcacttctaatgcagctagccagaactgatgttttaagtataaagcatcttgttcacttttatactaaatgctgaaatattgttttgaatataccaggttaaataaaatatattaaaatttatttcacctttttttttaagtgtaactactagaaaatttaaaattacacatatggtctgcatcatatttctattagacagcactggctcaccgttctactggttggctagcttgtacctccagataacatctgataatccaatcactagctaycacaaactagatctttcagatgtttcctattaa

SEQ ID NO: 596325 - DNA, 343 bp, Homo sapiens
gtttaattttgaagtgaattcctagaaaagctcatataatactattatagaaaatcattaaaatcaacttaataatttgcccaccatgaaacagaacttaaggtaaatctacatttctttggttagtatttactgtactggtaaagaccaaagaattggtaatgttcaacaaaatatgaaaatgccagtgactttaacaaaaaaatagctggaaaccaaagaatcttgcttacatcacaatcacagctaggaaaatgcagcttattttacagccggtccccgatgtgaagaatatgtagaaacaacagtaaataaaaaargaagtataatacggaaatgccta

SEQ ID NO: 596326 - DNA, 360 bp, Homo sapiens
aacaaaaatctgggacaggtaattttgcaatacayatttaatgtcatgttttctcaagatagaggagaacttcccttcccctaataaatcagcagggggctcattgaagctgctctttctaattcagcgggcctgagattctgcatttgtaataagttctggagtgatggtgattctgctgatttttggccatgatctgagtagtaagattatagacttccctacattgaaattgggaagaagaaccactggagaacagttcaagacataacaggctgaggggacagcataattgtgctttaattctacagcatgtttccatcaagaggggaaggagaacaagatgaagtactagaaatt

SEQ ID NO: 596327 - DNA, 360 bp, Homo sapiens
aacaaaaatctgggacaggtaattttgcaatacacatttaatgtcatgttytctcaagatagaggagaacttcccttcccctaataaatcagcagggggctcattgaagctgctctttctaattcagcgggcctgagattctgcatttgtaataagttctggagtgatggtgattctgctgatttttggccatgatctgagtagtaagattatagacttccctacattgaaattgggaagaagaaccactggagaacagttcaagacataacaggctgaggggacagcataattgtgctttaattctacagcatgtttccatcaagaggggaaggagaacaagatgaagtactagaaatt

SEQ ID NO: 596328 - DNA, 360 bp, Homo sapiens
aacaaaaatctgggacaggtaattttgcaatacacatttaatgtcatgttttctcaagatagaggagaacttcccttcccctaataaatcagcagggggctcattgaagctgctctttctrattcagcgggcctgagattctgcatttgtaataagttctggagtgatggtgattctgctgatttttggccatgatctgagtagtaagattatagacttccctacattgaaattgggaagaagaaccactggagaacagttcaagacataacaggctgaggggacagcataattgtgctttaattctacagcatgtttccatcaagaggggaaggagaacaagatgaagtactagaaatt

SEQ ID NO: 596329 - DNA, 360 bp, Homo sapiens
aacaaaaatctgggacaggtaattttgcaatacacatttaatgtcatgttttctcaagatagaggagaacttcccttcccctaataaatcagcagggggctcattgaagctgctctttctaattcagcgggcctgagattctgcatttgtaataagttctggagtgatggtgattctgctgatttttggccatgatctgagtagtaagattatagacttcyctacattgaaattgggaagaagaaccactggagaacagttcaagacataacaggctgaggggacagcataattgtgctttaattctacagcatgtttccatcaagaggggaaggagaacaagatgaagtactagaaatt

SEQ ID NO: 596330 - DNA, 549 bp, Homo sapiens
gagcatgatgaatatttgtagtataatggtttaaacccttctgatgtcttgtatgaaagacatgcgcaatcctggctcacttcaamtttcaccttctgggttcaagtgattctcctgtctcagtctcctgagtagctgagtttacaggtgtgcaccaccaacctggtaatttttgtatttttactagagacgggctttcaccatgttggccaggttggtctcaaactcctgacctcaagtgatccacccacctcggcctcacaaagtgctgggattacaggcatgacccaccgagccctgcctacatgacttttttaaatttttttagctttttaaaataaagatagaatgtttctgtgttgcccaaggtggtctgaaatgcctggacttctcaagtgatacttctgcctgaaccttttgagtagctgagattataggaacaagtcactgtgctcttttatgtttttaatattttataagttcctattgatttaaaatgcattttacattttgtttaatagtgcttcctgctgttgaacagtgtttaaa

SEQ ID NO: 596331 - DNA, 549 bp, Homo sapiens
gagcatgatgaatatttgtagtataatggtttaaacccttctgatgtcttgtatgaaagacatgcgcaatcctggctcacttcaaatttcaccttctgggttcaagtgattctcctgtctcagtctcctgagtagctgagtttacaggtgtgcaccaccaacctggtaatttttgtatttttactagagacgggctttcaccatgttggccaggttggtctcaaactcctgacctcaagkgatccacccacctcggcctcacaaagtgctgggattacaggcatgacccaccgagccctgcctacatgacttttttaaatttttttagctttttaaaataaagatagaatgtttctgtgttgcccaaggtggtctgaaatgcctggacttctcaagtgatacttctgcctgaaccttttgagtagctgagattataggaacaagtcactgtgctcttttatgtttttaatattttataagttcctattgatttaaaatgcattttacattttgtttaatagtgcttcctgctgttgaacagtgtttaaa

SEQ ID NO: 596332 - DNA, 549 bp, Homo sapiens
gagcatgatgaatatttgtagtataatggtttaaacccttctgatgtcttgtatgaaagacatgcgcaatcctggctcacttcaaatttcaccttctgggttcaagtgattctcctgtctcagtctcctgagtagctgagtttacaggtgtgcaccaccaacctggtaatttttgtatttttactagagacgggctttcaccatgttggccaggttggtctcaaactcctgacctcaagtgatccacccacctcggcctcacaaagtgctgggattacaggcatgacccaccgagccctgcctacatgayttttttaaatttttttagctttttaaaataaagatagaatgtttctgtgttgcccaaggtggtctgaaatgcctggacttctcaagtgatacttctgcctgaaccttttgagtagctgagattataggaacaagtcactgtgctcttttatgtttttaatattttataagttcctattgatttaaaatgcattttacattttgtttaatagtgcttcctgctgttgaacagtgtttaaa

SEQ ID NO: 596333 - DNA, 542 bp, Homo sapiens
ttagctttttaaaataaagatagaatgtttctgtgttgcccaaggtggtctgaaatgcctggacttctcaagtgayacttctgcctgaaccttttgagtagctgagattataggaacaagtcactgtgctcttttatgtttttaatattttataagttcctattgatttaaaatgcattttacattttgtttaatagtgcttcctgctgttgaacagtgtttaaacaggtatgatttcacagattttttaaagtgatatgttaacttagtgaatagagagaatagaaactagtatccgtttggtgttctcctctgtgctagacaccatattacatgcttaatatttatcatgtcatgtcgtctccacacagctttacaaactatttgtgctattattgcttttttactaattagacaactctgctttaaagaggttgaaatattggctcatgattccacagttaacaggtagccaacccatgatttggccatcatcctgcctggctctctaaccacttcatttgcccctaagcatagatgga

SEQ ID NO: 596334 - DNA, 549 bp, Homo sapiens
gagcatgatgaatatttgtagtataatggtttaaacccttctgatgtcttgtatgaaagacatgcgcaatcctggctcacttcaaatttcaccttctgggttcaagtgattctcctgtctcagtctcctgagtagctgagtttacaggtgtgcaccaccaacctggtaatttttgtatttttactagagacgggctttcaccatgttggccaggttggtctcaaactcctgacctcaagtgatccacccacctcggcctcacaaagtgctgggattacaggcatgacccaccgagccctgcctacatgacttttttaaatttttttagctttttaaaataaagatagaatgtttctgtgttgcccaaggtggtctgaaatgcctggacttctcaagtgatacttctgcctgaaccttttgagtagctgagattataggaacaagtcactgtgctcttttatgtttttaatattttataagttcctattgatttawaatgcattttacattttgtttaatagtgcttcctgctgttgaacagtgtttaaa

SEQ ID NO: 596335 - DNA, 357 bp, Homo sapiens
atgtctctttttttctgactcttttctcaattctctcatgtacatgtagggtagggcaaatgtaggattggccagcaaaccagcagtgaagcttcatttgggtagttggtaacatgcgtatgcttggggtggatgactgagactaacttactttccagaagcagaggaatagagagctcctactctcaattatgttagcccgtcttttgaggaatctgggctttcctaggctgaagatgtagattggagattgccacggatccctgcagaagagggatccagaagtgggagcccataggaaggaagatayttagatagtgatgaatgaaatggagctataagtacttaggagggaga

SEQ ID NO: 596336 - DNA, 446 bp, Homo sapiens
gctcctactctcaattatgttagcccgtcttttgaggaatctgggctttcctaggctgaagatgtagattggagattgccacggatccctgcagaagagggatccagaagtgggagcccataggaaggaagatacttagatagtgatgaatgaaatggagctataagtacttaggagggagacttttccagcagtctctctcttgygtatctgagtgtctatgaaggttcttaagcttgctggtttttgtggatctgaataaggcaggatctatataatgacaataattggattttaaaatttttaatattttaatcttctgtgaagaatattcccactaacaacctaaaaacatatacatttgtactttgacttttgtacactcagctttcaaacattttcagtgtttcagggcggctccctgtatgtgattctaggtgtgaaga

SEQ ID NO: 596337 - DNA, 446 bp, Homo sapiens
gctcctactctcaattatgttagcccgtcttttgaggaatctgggctttcctaggctgaagatgtagattggagattgccacggatccctgcagaagagggatccagaagtgggagcccataggaaggaagatacttagatagtgatgaatgaaatggagctataagtacttaggagggagacttttccagcagtctctctcttgcgtatctgagtgtctatgaaggttcttaagcttgctggtttttgtggatctgaataaggcaggmtctatataatgacaataattggattttaaaatttttaatattttaatcttctgtgaagaatattcccactaacaacctaaaaacatatacatttgtactttgacttttgtacactcagctttcaaacattttcagtgtttcagggcggctccctgtatgtgattctaggtgtgaaga

SEQ ID NO: 596338 - DNA, 540 bp, Homo sapiens
aatagataatgcagaagagacagtgccttttctaccttgttttaggttatcaggtttactgcagttcagtaacaaaagttgtgtcagatatcaactggattttcagtttagcctttagggtagataatttataaggacaaattattgtctggccgtgccgttataatgcctgtcactatttgttatgggtttaagggtgagtctgcattggatatttcataggttgggagaggtggaggcagaaataggtaactgaaatgttttctaaaacggaagccatatcttaattataccaagaaataytatttaatatgcagataactgagtttcctcagactttgttttaccatttttttggaggcgacacgcatgtatagactgacggtttttgttttctttgaagaaatgaacgtgctcatttttgtggtatctttttgctctgtaggagtctctacagaccggatactgttgcacagcctgtgacagaggatgagtttgctttggaatctgcggtagagtactctcttgtgaaattaatgt

SEQ ID NO: 596339 - DNA, 604 bp, Homo sapiens
ttttctaaaacggaagccatatcttaattataccaagaaatactatttaatatgcagataactgaktttcctcagactttgttttaccatttttttggaggcgacacgcatgtatagactgacggtttttgttttctttgaagaaatgaacgtgctcatttttgtggtatctttttgctctgtaggagtctctacagaccggatactgttgcacagcctgtgacagaggatgagtttgctttggaatctgcggtagagtactctcttgtgaaattaatgttctcactctgaatctcagtttttatattattttcttctaaaacttaacagttgtctacctatcattgttttatgttagtattaaaacgtttattagagataaccattttaaagaaatgggaggggttaattttatttttttttactttagcaaataataaatagttgataaattctttgagaggtgtgatctgaaaaaaaaattgctggaaaatacacagtgacagaaaaatgatgtttgggaatgctttcccacaacacaggagataccaattttggtctaggcttatttgagtgtttttactttgagttgtatatcatatga

SEQ ID NO: 596340 - DNA, 604 bp, Homo sapiens
ttttctaaaacggaagccatatcttaattataccaagaaatactatttaatatgcagataactgagtttcctcagactttgttttrccatttttttggaggcgacacgcatgtatagactgacggtttttgttttctttgaagaaatgaacgtgctcatttttgtggtatctttttgctctgtaggagtctctacagaccggatactgttgcacagcctgtgacagaggatgagtttgctttggaatctgcggtagagtactctcttgtgaaattaatgttctcactctgaatctcagtttttatattattttcttctaaaacttaacagttgtctacctatcattgttttatgttagtattaaaacgtttattagagataaccattttaaagaaatgggaggggttaattttatttttttttactttagcaaataataaatagttgataaattctttgagaggtgtgatctgaaaaaaaaattgctggaaaatacacagtgacagaaaaatgatgtttgggaatgctttcccacaacacaggagataccaattttggtctaggcttatttgagtgtttttactttgagttgtatatcatatga

SEQ ID NO: 596341 - DNA, 540 bp, Homo sapiens
aatagataatgcagaagagacagtgccttttctaccttgttttaggttatcaggtttactgcagttcagtaacaaaagttgtgtcagatatcaactggattttcagtttagcctttagggtagataatttataaggacaaattattgtctggccgtgccgttataatgcctgtcactatttgttatgggtttaagggtgagtctgcattggatatttcataggttgggagaggtggaggcagaaataggtaactgaaatgttttctaaaacggaagccatatcttaattataccaagaaatactatttaatatgcagataactgagtttcctcagactttgttttaccawttttttggaggcgacacgcatgtatagactgacggtttttgttttctttgaagaaatgaacgtgctcatttttgtggtatctttttgctctgtaggagtctctacagaccggatactgttgcacagcctgtgacagaggatgagtttgctttggaatctgcggtagagtactctcttgtgaaattaatgt

SEQ ID NO: 596342 - DNA, 540 bp, Homo sapiens
aatagataatgcagaagagacagtgccttttctaccttgttttaggttatcaggtttactgcagttcagtaacaaaagttgtgtcagatatcaactggattttcagtttagcctttagggtagataatttataaggacaaattattgtctggccgtgccgttataatgcctgtcactatttgttatgggtttaagggtgagtctgcattggatatttcataggttgggagaggtggaggcagaaataggtaactgaaatgttttctaaaacggaagccatatcttaattataccaagaaatactatttaatatgcagataactgagtttcctcagactttgttttaccatttttttggaggcgacamgcatgtatagactgacggtttttgttttctttgaagaaatgaacgtgctcatttttgtggtatctttttgctctgtaggagtctctacagaccggatactgttgcacagcctgtgacagaggatgagtttgctttggaatctgcggtagagtactctcttgtgaaattaatgt

SEQ ID NO: 596343 - DNA, 604 bp, Homo sapiens
ttttctaaaacggaagccatatcttaattataccaagaaatactatttaatatgcagataactgagtttcctcagactttgttttaccatttttttggaggcgacacgcatgtatagactgacggtttttgttttctttgaagaaatgaacgtgctcatttttgtkgtatctttttgctctgtaggagtctctacagaccggatactgttgcacagcctgtgacagaggatgagtttgctttggaatctgcggtagagtactctcttgtgaaattaatgttctcactctgaatctcagtttttatattattttcttctaaaacttaacagttgtctacctatcattgttttatgttagtattaaaacgtttattagagataaccattttaaagaaatgggaggggttaattttatttttttttactttagcaaataataaatagttgataaattctttgagaggtgtgatctgaaaaaaaaattgctggaaaatacacagtgacagaaaaatgatgtttgggaatgctttcccacaacacaggagataccaattttggtctaggcttatttgagtgtttttactttgagttgtatatcatatga

SEQ ID NO: 596344 - DNA, 540 bp, Homo sapiens
aatagataatgcagaagagacagtgccttttctaccttgttttaggttatcaggtttactgcagttcagtaacaaaagttgtgtcagatatcaactggattttcagtttagcctttagggtagataatttataaggacaaattattgtctggccgtgccgttataatgcctgtcactatttgttatgggtttaagggtgagtctgcattggatatttcataggttgggagaggtggaggcagaaataggtaactgaaatgttttctaaaacggaagccatatcttaattataccaagaaatactatttaatatgcagataactgagtttcctcagactttgttttaccatttttttggaggcgacacgcatgtatagactgacggtttttgttttctttgaagaaatgaacgtgctcatttttgtggtatctttttgctctgtaggagtctctacagaccggatactgttgcacagcctgtgacagaggatgagtttgctttggaatctgyggtagagtactctcttgtgaaattaatgt

SEQ ID NO: 596345 - DNA, 604 bp, Homo sapiens
ttttctaaaacggaagccatatcttaattataccaagaaatactatttaatatgcagataactgagtttcctcagactttgttttaccatttttttggaggcgacacgcatgtatagactgacggtttttgttttctttgaagaaatgaacgtgctcatttttgtggtatctttttgctctgtaggagtctctacagaccggatactgttgcacagcctgtgacagaggatgagtttgctttggaatctgcggtagagtactctcttgtgaaattaatgttctcactctgaatctcagtttttatattattttcttctaaaacttaacagttgtctacctatcattgttttatgttagtattaaaacktttattagagataaccattttaaagaaatgggaggggttaattttatttttttttactttagcaaataataaatagttgataaattctttgagaggtgtgatctgaaaaaaaaattgctggaaaatacacagtgacagaaaaatgatgtttgggaatgctttcccacaacacaggagataccaattttggtctaggcttatttgagtgtttttactttgagttgtatatcatatga

SEQ ID NO: 596346 - DNA, 392 bp, Homo sapiens
ttccttatttttatttgtggctctataattagactaaaatcatattagaaattgtggaaatgtaactagacatggtatcatgtccatgtagtcccacctattcaagagatcaagccaggagaatttcttgagcccaggagtttaagaccaascttggcaatataacaagagcttatctctaattttaaaaagttgtggaagtctagaaatgtaaattctgttctcaaatctgtattagagaaggtttacacagtgttttccaaggcttttttatttagagtatactttaaactctttatttaattgaaaaatatgcatttttgtttaaagtaacctgtctgataaacagagactcttcatattcttatggtcagactttaatttcacaaggc

SEQ ID NO: 596347 - DNA, 552 bp, Homo sapiens
aaattgtggaaatgtaactagacatggtatcatgtccatgtagtcccacctattcaagagatcaagccaggagaatttcttgagcccaggagtttaagaccaaccttggcaatataacaagagcttatctctaattttaaaaagttgtggaagtytagaaatgtaaattctgttctcaaatctgtattagagaaggtttacacagtgttttccaaggcttttttatttagagtatactttaaactctttatttaattgaaaaatatgcatttttgtttaaagtaacctgtctgataaacagagactcttcatattcttatggtcagactttaatttcacaaggcttttgcattgtaattaaaaagaatccactcagggtctttgtatctcattctaaatttcaaatttcagaggtttttgtgcttagttattgaaaaaataattgtaaagctcctgcattactaccagcaacttgaaactagaaaacctatttgtatgtatcctggaatacacagaataagatcttgcatgtaagaaacattttaatagttt

SEQ ID NO: 596348 - DNA, 477 bp, Homo sapiens
atcaagccaggagaatttcttgagcccaggagtttaagaccaaccttggcaatataacaagagcttatctctaattttaaaaagttgtggaagtctagaaatgtaaattctgttctcaaatctgtattagagaaggtttacacagtgttttccaaggcttttttatttagagtatactttaaactctttatttaattgaaaaatatgcatttttgtttaaartaacctgtctgataaacagagactcttcatattcttatggtcagactttaatttcacaaggcttttgcattgtaattaaaaagaatccactcagggtctttgtatctcattctaaatttcaaatttcagaggtttttgtgcttagttattgaaaaaataattgtaaagctcctgcattactaccagcaacttgaaactagaaaacctatttgtatgtatcctggaatacacagaataagatcttgcatgtaagaa

SEQ ID NO: 596349 - DNA, 477 bp, Homo sapiens
atcaagccaggagaatttcttgagcccaggagtttaagaccaaccttggcaatataacaagagcttatctctaattttaaaaagttgtggaagtctagaaatgtaaattctgttctcaaatctgtattagagaaggtttacacagtgttttccaaggcttttttatttagagtatactttaaactctttatttaattgaaaaatatgcatttttgtttaaagtaacctgtctgataaacagagactcttcatattcytatggtcagactttaatttcacaaggcttttgcattgtaattaaaaagaatccactcagggtctttgtatctcattctaaatttcaaatttcagaggtttttgtgcttagttattgaaaaaataattgtaaagctcctgcattactaccagcaacttgaaactagaaaacctatttgtatgtatcctggaatacacagaataagatcttgcatgtaagaa

SEQ ID NO: 596350 - DNA, 570 bp, Homo sapiens
atactttaaactctttatttaattgaaaaatatgcatttttgtttaaagtaacctgtctgataaacagagactcttcatattcttatggtcagactttaatttcacaaggcttttgcattgtaattaaaaagaatccactcagggtctttgtatctcattctaaatttcaaatttcagaggyttttgtgcttagttattgaaaaaataattgtaaagctcctgcattactaccagcaacttgaaactagaaaacctatttgtatgtatcctggaatacacagaataagatcttgcatgtaagaaacattttaatagtttttaatgtgaatcaacaaacaggcaaatgggcttttttataatagaatgttacaggtaacataatatgcatgacatatctaataattaaatctattaaatttcttgagtgttttgaatttatcttttcttctaatgttgagaatgtataagttgaggtgacttatgttgagaaaatatgtcatatagaagaaaataaaatttagaaaagatgaaaaggaaataggaaaggtggatacagcctgttttctaat

SEQ ID NO: 596351 - DNA, 570 bp, Homo sapiens
atactttaaactctttatttaattgaaaaatatgcatttttgtttaaagtaacctgtctgataaacagagactcttcatattcttatggtcagactttaatttcacaaggcttttgcattgtaattaaaaagaatccactcagggtctttgtatctcattctaaatttcaaatttcagaggtttttgtgcttagttattgaaaaaataattgtaaasctcctgcattactaccagcaacttgaaactagaaaacctatttgtatgtatcctggaatacacagaataagatcttgcatgtaagaaacattttaatagtttttaatgtgaatcaacaaacaggcaaatgggcttttttataatagaatgttacaggtaacataatatgcatgacatatctaataattaaatctattaaatttcttgagtgttttgaatttatcttttcttctaatgttgagaatgtataagttgaggtgacttatgttgagaaaatatgtcatatagaagaaaataaaatttagaaaagatgaaaaggaaataggaaaggtggatacagcctgttttctaat

SEQ ID NO: 596352 - DNA, 500 bp, Homo sapiens
actatatttagcatatattaaaaggatgtttctaattcatttctctacttactacctacccagttaggttttctctttcagtaagtaccctgcctggttctctgaagctttttcttattttctggattcttttttttccttctgtgacattttaataatattttcttgatttctttttactttctcctctgcttttcttagggtttatgatcttctattatagttttcatttaaggcagctaaatattccccattttcctatagacaaaatcagargtgcatagaatttcagaatgttaagaaatcctagagactaaacaaaatatcttctagtacttgaatccttgcttaacatcctgatcaagtggttgttcaggtggagaacctgaaactcaaagagagaaaattatttggatacagtaaatcagataaatgggaattgcactcaggtttcttagttcaaaacccagtcttcttttacatcattctgtcattgagtg

SEQ ID NO: 596353 - DNA, 580 bp, Homo sapiens
tagttcaaaacccagtcttcttttacatcattctgtcattgagtgattttagttttagaaagagggagtggctctggtgaacacagtggaaaaggatgagaatggaatgagctgttgaacccaatgaaagtggataagaatggaatttgcaggggacagacaaatttgaagatgtagattggagattgccattgatccctgcagaagagggatccagaagggggagcccataggaaggtatttagatagtgatgaatgaaatgaagctgtaagtactcaggagggagacttttccagcagcctctctcttgagtatctgagtgtttrtgaaggttcttaagcttgctggtttttgtggacctgaataaggcaggatctatataatgacaataattggattttataatttttaatgttttaatcttctgtgaggaatattcccagagtacatttgtactttgattttttacactcagctttcaaacacttgcagtgtttcagggggctccctgtagagttctagagtaaagagaatcaatgggcaatctaagtagcttacatgctgaagatccaagactcc

SEQ ID NO: 596354 - DNA, 580 bp, Homo sapiens
tagttcaaaacccagtcttcttttacatcattctgtcattgagtgattttagttttagaaagagggagtggctctggtgaacacagtggaaaaggatgagaatggaatgagctgttgaacccaatgaaagtggataagaatggaatttgcaggggacagacaaatttgaagatgtagattggagattgccattgatccctgcagaagagggatccagaagggggagcccataggaaggtatttagatagtgatgaatgaaatgaagctgtaagtactcaggagggagacttttccagcagcctctctcttgagtatctgagtgtttatgaaggttcttaagcttgctggtttttgtggacctgaataaggcaggatctatataatgacaataattgsattttataatttttaatgttttaatcttctgtgaggaatattcccagagtacatttgtactttgattttttacactcagctttcaaacacttgcagtgtttcagggggctccctgtagagttctagagtaaagagaatcaatgggcaatctaagtagcttacatgctgaagatccaagactcc

SEQ ID NO: 596355 - DNA, 476 bp, Homo sapiens
ttggcaatatagcaagagcttatctctaattttaaaaaattgtggaatattagaaatttaaattctgttctcacacctgtattagagagggtttaccctgtgttttccaagtcttttttattaagagtatactgtaaactctttatctaatcraagaatatgcattttgtttaaaataacaacctgtttgataagcagagactcttcatatttctgtggtcagactttaacttcacaagatttttgcattgtaattaaaaaaaaatccggtcggggtctttgtatctcattctaaatttcaaatttcagaggcttttgtgcttagttattgaaaaaataattgtaaagctcctgcattcgtatgagccacttgaagctagaaaaactatttgtatgtatcttgagtacccagaataaggtcttgcatgtaagaaacattttattagtttttaatgtgaatcagcaaacagggaaat

SEQ ID NO: 596356 - DNA, 476 bp, Homo sapiens
ttggcaatatagcaagagcttatctctaattttaaaaaattgtggaatattagaaatttaaattctgttctcacacctgtattagagagggtttaccctgtgttttccaagtcttttttattaagagtatactgtaaactctttatctaatcgaagaatatgcattttgtttaaaataacaacctgtttgataagcagagactcttcatatttctgtggtcagactttaacttcacaagatttttgcattgtaattaaaaaaaaatccggtcggggtctttgtatctcattctaaatttcaaatttcagaggcttttgtgcttagttattgaaaaaataattgtaaagctcctgcattcrtatgagccacttgaagctagaaaaactatttgtatgtatcttgagtacccagaataaggtcttgcatgtaagaaacattttattagtttttaatgtgaatcagcaaacagggaaat

SEQ ID NO: 596357 - DNA, 577 bp, Homo sapiens
ttgtattatctactgattcttttttttttttctttcttatttttttgtagacagagtgttactcactgttgccctggctggagtgcagtggcatgatcttggctcactgcaacttccacctcctgggttcaagtgattctcctgcctcagcctcctgagtagctgggattacaggtgtgcaccaccacacctggctatttttgtatttttggtagagatggaatttcaccatgttggccaggctggtcttgaacacctgacctcttgtatgatctgcctgcatgggcccacaaaagtgctgggattaaagttgtgagcccccacaccyggttcttatttattgattcttaattacacgcatttcatctactcttgactttttttttactgtagtagatgctgcatgtggcattgaaaaaacaaaatatggaacctttttttgaagaccaaaatgttgataaggtaaatgaagatgtggttaaaagccaacatagaataatcagagtcgagtcctgttcaccaactcactcttatctgttaatgatctctagttttacaatggtaaattgttttattt

SEQ ID NO: 596358 - DNA, 577 bp, Homo sapiens
ttgtattatctactgattcttttttttttttctttcttatttttttgtagacagagtgttactcactgttgccctggctggagtgcagtggcatgatcttggctcactgcaacttccacctcctgggttcaagtgattctcctgcctcagcctcctgagtagctgggattacaggtgtgcaccaccacacctggctatttttgtatttttggtagagatggaatttcaccatgttggccaggctggtcttgaacacctgacctcttgtatgatctgcctgcatgggcccacaaaagtgctgggattaaagttgtgagcccccacacccggttcttatttattgattcttaattacacgcatttcatctactcttgactttttttttactgtagtagatgctgcatgtggcattgaaaaaacaaaatatggaacctttttttgaagaccaaaatgttgataaggtaaatgaagatgtggttaaaagccaacatagaataatcagagtcgagtcctgttcaccaactcactcttatcwgttaatgatctctagttttacaatggtaaattgttttattt

SEQ ID NO: 596359 - DNA, 481 bp, Homo sapiens
cccggttcttatttattgattcttaattacacgcatttcatctactcttgactttttttttactgtagtagatgctgcatgtggcattgaaaaaacaaaatatggaacctttttttgaagaccaaaatgttgataaggtaaatgaagatgtggttaaaagccaacatagaataatcagagtcgagtcctgttcaccaactcactcttatctgttaatgatctctagttttacaatggtaaattgttttatttggaaaatatttttcccatgctttattcacttgccatctccctgtctttataacgatgacaaggatcctataarggaatggaagttctccaggtaataatagaaaagaagtgtaacaacaagggaaatatatgcatgggaccaggattcctaaaaggtcatgggagtaaatgattgttaggtttgccattagggaaggaaagaagtagaaagcaacctgaaagaacagct

SEQ ID NO: 596360 - DNA, 670 bp, Homo sapiens
gattagtataaaacacctcaaaaacggtgaatttaaatgacagtagaatgtctccatatcatattatagaattattttaaatatagattaggaaaagaaagccaagtaattaaaataatgctcagattcttctgagtgacttamgggtgattttaataaaggattggaagaaaatttatgggtgactatatttaacattctgtttaacatttaaaaatagccaggagagaataacttgaatatttctagtttaaataaaacatacatatttaaggtaatgtgtatctctgttaccctcattagattatatagatggaacaaatcatcacacgtacactgaaaatatatgcatctatttattaatttaaaaattctaaatggaaagaaaatttaatcctaactttttaaaatttcagtaaagtgatgtctcatattttatctagtgaatattgtgttcatagatcatgcaaagtaaaatgtgttttaggctatatcagattttgaatgaatcattaatttttgactcctgttaaaagttttttaaagtaatatttggtatattcccaagttgcttaactaatttatttcacttttacatcatcttggcagctgttttagcctttttttgataatagagaaaataaataagtaattaaataatagaaaataa

SEQ ID NO: 596361 - DNA, 625 bp, Homo sapiens
gaaaataaataagtaattaaataatagaaaataaaaaataataaaaattaataaaaaaattaataaaaattaaaatttctggttaattttttttttttgagagggagtatcgctctgtcgcccaggctggagggtggtgggtgatctcggctcactgtaaggtccacctcccgggttcatgccattctcctgcctcaacctcatgagtagctgggactataggtgyccgccatcacgcccggctaatttttaaatatttttagcggagacggggtttcactgtgttagccaggatgccaggatggtctcgatctcctaacctcatgatctgcctgcctcggcctcccaaagtgctgggattacaggcgtgagccaccacacctagccatttctggttaatattaaaggaggtttctaatttatgttcattgaatgagaaaaaatatctttttaacctggaaccctcttaaagaaataaattattacttatttctggagctagtctgactgaccttgtgctgataacctctgtacttaagaacatacatgtgatgaatgcagtcaacactcatgattgttttctaaacaaagtacctattttgatagaatcgtaaggaaagaaata

SEQ ID NO: 596362 - DNA, 315 bp, Homo sapiens
aaactcatttcttctctctataggggttacacatcaatgatatgtgcttcattcatgtttgttagtgaactgggatgcacttggatatcaaaacattggcagttttctttaaaacaatgctgtttttgatgaaatagccattgtataaaagtacctcagaggctgctatgctatagcatatcaaactgactagaaaaaaaacaaacgagaaatttatttctttagtactaaaagtgtaactgtcaataatcatggcaaatattttgatatgtaaaagttgattaagccrggcgcggtgactcacggctgtaatcc

SEQ ID NO: 596363 - DNA, 315 bp, Homo sapiens
aaactcatttcttctctctataggggttacacatcaatgatatgtgcttcattcatgtttgttagtgaactgggatgcacttggatatcaaaacattggcagttttctttaaaacaatgctgtttttgatgaaatagccattgtataaaagtacctcagaggctgctatgctatagcatatcaaactgactagaaaaaaaacaaacgagaaatttatttctttagtactaaaagtgtaactgtcaataatcatggcaaatattttgatatgtaaaagttgattaagccgggcgcrgtgactcacggctgtaatcc

SEQ ID NO: 596364 - DNA, 378 bp, Homo sapiens
ggcaggagaatcacttgaacccgggcggcggaggttgctgtgagccgagattgtgccactgcactccagcctaggtaacagagcaagactccatgtcaaaaaagaaagwtgattagtatgaaaaaaaagtcaatggtgattcagacatttttggttacattttgtaaatgaaaatctgagtactcattagttatttgatgtgtaacatatactttttttgcataagggaatgaaaagatggcaagagaactaaagttgagaatccacgaagttgaaaatatcagaagtcttcatgactgtggataacatgagtatttttagaaaggacttttctccaagtagatatctaaactaatgattgagagcatttcctgccag

SEQ ID NO: 596365 - DNA, 378 bp, Homo sapiens
ggcaggagaatcacttgaacccgggcggcggaggttgctgtgagccgagattgtgccactgcactccagcctaggtaacagagcaagactccatgtcaaaaaagaaagttgattagtatgaaaaaaaagtcaatggtgattcagasatttttggttacattttgtaaatgaaaatctgagtactcattagttatttgatgtgtaacatatactttttttgcataagggaatgaaaagatggcaagagaactaaagttgagaatccacgaagttgaaaatatcagaagtcttcatgactgtggataacatgagtatttttagaaaggacttttctccaagtagatatctaaactaatgattgagagcatttcctgccag

SEQ ID NO: 596366 - DNA, 378 bp, Homo sapiens
ggcaggagaatcacttgaacccgggcggcggaggttgctgtgagccgagattgtgccactgcactccagcctaggtaacagagcaagactccatgtcaaaaaagaaagttgattagtatgaaaaaaaagtcaatggtgattcagacatttttggttacattttgtaaatgaaaatctgagtactcattagttatttgatgtgtaayatatactttttttgcataagggaatgaaaagatggcaagagaactaaagttgagaatccacgaagttgaaaatatcagaagtcttcatgactgtggataacatgagtatttttagaaaggacttttctccaagtagatatctaaactaatgattgagagcatttcctgccag

SEQ ID NO: 596367 - DNA, 565 bp, Homo sapiens
aacttctggtgggtaaatatgctagagccatctggctgggtaaatcatgtctggagtctctgagtgggtaaatcatgctggagcctctggtgggtaaatcatactggagcctctggtgggtggagtatcacacactggtggtgcccattgatagtggggacttcaycccatgtcccagaatcctgcaagacggccacaccccccatacattctttacagtaagttaatacgtccacagcacgctgtgttctcccccaaaaatgacatcggccaattacactttcaaatcacatgccttcctgatgggcaaaactggaaatgtgaacacactttaatcctcagataatgtaatggtttacatctggcggctcttcaggcagcccatggctggttcacgttgctcccttccaagaaatgttttgcagtatgtgtcttgtttaataacgatttaaacatggaaaataaatgctttcttcttaggcgttcacctgtctatcacccggagtctgggaggacggcccttcttttcaacggcattcgccaagccagtctccatgaatcactg

SEQ ID NO: 596368 - DNA, 565 bp, Homo sapiens
aacttctggtgggtaaatatgctagagccatctggctgggtaaatcatgtctggagtctctgagtgggtaaatcatgctggagcctctggtgggtaaatcatactggagcctctggtgggtggagtatcacacactggtggtgcccattgatagtggggacttcatcccatgtcccagaatcctgcaagacggccacaccccccatacattctttacagtaagttaatacgtccacagcacgctgtgttctcccccaaaaatgacatcggccaattacactttcaaatcacatgccttccygatgggcaaaactggaaatgtgaacacactttaatcctcagataatgtaatggtttacatctggcggctcttcaggcagcccatggctggttcacgttgctcccttccaagaaatgttttgcagtatgtgtcttgtttaataacgatttaaacatggaaaataaatgctttcttcttaggcgttcacctgtctatcacccggagtctgggaggacggcccttcttttcaacggcattcgccaagccagtctccatgaatcactg

SEQ ID NO: 596369 - DNA, 506 bp, Homo sapiens
tatggtatgcttagcaaaccaatgcaggaacagaaaactaaataccacamgttttcatttaaaagtgggagccagccgggtgtggtggctcacacttgtaattccatcacattgggaggccaaggtgtgtggatcacttaaggtcaggagtttgagaccagcctggccaacatgatgaaacctcatttctcctaaaaatacaaaaattagctgggcatggtggcgcatgcctgtaatcctagacactcggggggcactgaggcagaagactcacttgaacccgggtggtgaaggttgcagtgagctgagatcacgccactgtactccagcctgggcggcagagtgggactcagtctcaaaataaataaataaatttaaaaataaagatcctatcatgaaagagcgttaccagctgttcacagtggctcatgcctgtaatcccagcactctgggaggccgaggagggcagatcttttgcggacaggagttctagaccagcctgacca

SEQ ID NO: 596370 - DNA, 506 bp, Homo sapiens
tatggtatgcttagcaaaccaatgcaggaacagaaaactaaataccacacgttttcatttaaaagtgggagccagccgggtgtggtggctcacacttgtaattccatcacaytgggaggccaaggtgtgtggatcacttaaggtcaggagtttgagaccagcctggccaacatgatgaaacctcatttctcctaaaaatacaaaaattagctgggcatggtggcgcatgcctgtaatcctagacactcggggggcactgaggcagaagactcacttgaacccgggtggtgaaggttgcagtgagctgagatcacgccactgtactccagcctgggcggcagagtgggactcagtctcaaaataaataaataaatttaaaaataaagatcctatcatgaaagagcgttaccagctgttcacagtggctcatgcctgtaatcccagcactctgggaggccgaggagggcagatcttttgcggacaggagttctagaccagcctgacca

SEQ ID NO: 596371 - DNA, 506 bp, Homo sapiens
tatggtatgcttagcaaaccaatgcaggaacagaaaactaaataccacacgttttcatttaaaagtgggagccagccgggtgtggtggctcacacttgtaattccatcacattgggaggccaaggtgtgtggatcacttaaggtcaggagtttgagaccagcctggccaacatgatgaaacctcatttctcctaaaaatacaaaaattagctgggcatggtggcgcatgcctgtawtcctagacactcggggggcactgaggcagaagactcacttgaacccgggtggtgaaggttgcagtgagctgagatcacgccactgtactccagcctgggcggcagagtgggactcagtctcaaaataaataaataaatttaaaaataaagatcctatcatgaaagagcgttaccagctgttcacagtggctcatgcctgtaatcccagcactctgggaggccgaggagggcagatcttttgcggacaggagttctagaccagcctgacca

SEQ ID NO: 596372 - DNA, 506 bp, Homo sapiens
tatggtatgcttagcaaaccaatgcaggaacagaaaactaaataccacacgttttcatttaaaagtgggagccagccgggtgtggtggctcacacttgtaattccatcacattgggaggccaaggtgtgtggatcacttaaggtcaggagtttgagaccagcctggccaacatgatgaaacctcatttctcctaaaaatacaaaaattagctgggcatggtggcgcatgcctgtaatcctagacactcggggggcactgaggcagaagactcacttgaacccgggtggtgaaggttgcagtgagctgagatcacgccactgtactccagcctgggcggcagagtgggactcagtctcaaaataaataaataaatttaaaaataaagatcctatcatgaaagagcgttaccagctgttcacagtggctcatgcctgtaatcccagcactctgggaggccgaggagggcagatcwtttgcggacaggagttctagaccagcctgacca

SEQ ID NO: 596373 - DNA, 334 bp, Homo sapiens
gacctttcagggtacctggggaggtaagaagtaatctatgtaacaggaatggggaaagagagcaggtaggtagagagacgagtktttttttttttttttttttgagatggagtctcactctgtcacccaggctggagcgatctctgatcactgcaacctacacctcccgggttcaagcaattctcctgcctcagcctcccaagtagttgggattacaaacatacaaacacaacaaaaacaaaaaaacaaacaaacaaaaacacttttatttaggtccaggggtacatgtgtgggtttgttatataggtaaactcatgtcataggggtttgttgt

SEQ ID NO: 596374 - DNA, 521 bp, Homo sapiens
actagacttgaaagctcctcaaaagagctggaacataaatgaaaatacaaagagctttgagtctcagatctggaaaaagtctagctttatcatatacatacataaatttaaatgctggattcctcaccagtaaaagggtcttggattaagtggtataaagtagtcctgtkcttattcataggaaatacatttcaaccccatactccacccctgcctggctcccataaatgcctgaaaccacggatgctacaaagccctatatacactatgtgttatatttttctttgcctccaatgaattccctctcttggcaatgccttataagttaccgtgcaaaaaaatataaatatctcatttatctgttctcccctaccccccacaatgctatctacctctcataggactaagcattggaaaggccttagtgcagccaccacctaaccatagaaatgatccaaactcacatactactacttctttattcttcagtaaagttctccaaactaaaatgaaatatgtag

SEQ ID NO: 596375 - DNA, 521 bp, Homo sapiens
actagacttgaaagctcctcaaaagagctggaacataaatgaaaatacaaagagctttgagtctcagatctggaaaaagtctagctttatcatatacatacataaatttaaatgctggattcctcaccagtaaaagggtcttggattaagtggtataaagtagtcctgttcttatycataggaaatacatttcaaccccatactccacccctgcctggctcccataaatgcctgaaaccacggatgctacaaagccctatatacactatgtgttatatttttctttgcctccaatgaattccctctcttggcaatgccttataagttaccgtgcaaaaaaatataaatatctcatttatctgttctcccctaccccccacaatgctatctacctctcataggactaagcattggaaaggccttagtgcagccaccacctaaccatagaaatgatccaaactcacatactactacttctttattcttcagtaaagttctccaaactaaaatgaaatatgtag

SEQ ID NO: 596376 - DNA, 606 bp, Homo sapiens
ctgagtagagggaggatcacttgagccagggaggttgaggcttcaaggagccatgattgcatcactgcactcaagcctgggtgacagagtgagatcctacctcaaaaaataaataaataaataaataaataaataaataaaaataagaataaaaattgcctctggcaaaactgcacatatagaggcacagtgtgttttttttccaccaccccaatgctacctctataactcacacatgatagttttataaatataactacctggcattcaggttaaaatygcaacagcacccagaataggaaaaactataaattatgcattggactctgcaatcaccagcccctacttgtaaatttcaatggagattcactttacttcaaaattagaaaactgatctcagagtttaaaacctcatttacagcttcaaaatatttagaatctagaattatataataaatacttattttcttagcatgaaaaattatttacaaatcatttaaaaaggatgatcaacttaacagaaaaatgggcaatgacaaatagactattagttacctaaccaatagccactccccagtcacaacctgttccttacagagttcacct

SEQ ID NO: 596377 - DNA, 606 bp, Homo sapiens
ctgagtagagggaggatcacttgagccagggaggttgaggcttcaaggagccatgattgcatcactgcactcaagcctgggtgacagagtgagatcctacctcaaaaaataaataaataaataaataaataaataaataaaaataagaataaaaattgcctctggcaaaactgcacatatagaggcacagtgtgttttttttccaccaccccaatgctacctctataactcacacatgatagttttataaatataactacctggcattcaggttaaaattgcaacagcacccagaataggaaaaactataaattatgcattggactctgcaatcaccagcccctacttgtaaatttcaatggagattcactttacttcaaaattagaaaactgatctcagagtttaaaacctcatttacagcttcaaaatatttagaatctagaattatataayaaatacttattttcttagcatgaaaaattatttacaaatcatttaaaaaggatgatcaacttaacagaaaaatgggcaatgacaaatagactattagttacctaaccaatagccactccccagtcacaacctgttccttacagagttcacct

SEQ ID NO: 596378 - DNA, 606 bp, Homo sapiens
ctgagtagagggaggatcacttgagccagggaggttgaggcttcaaggagccatgattgcatcactgcactcaagcctgggtgacagagtgagatcctacctcaaaaaataaataaataaataaataaataaataaataaaaataagaataaaaattgcctctggcaaaactgcacatatagaggcacagtgtgttttttttccaccaccccaatgctacctctataactcacacatgatagttttataaatataactacctggcattcaggttaaaattgcaacagcacccagaataggaaaaactataaattatgcattggactctgcaatcaccagcccctacttgtaaatttcaatggagattcactttacttcaaaattagaaaactgatctcagagtttaaaacctcatttacagcttcaaaatatttagaatctagaattatataataaatacttattttcttagcatgaaaaattatttacaaatcatttaaaaaggatgatcaacttaacagaaaaatgggcaatgacaaatagactattagttacctaaccaatagccactccccastcacaacctgttccttacagagttcacct

SEQ ID NO: 596379 - DNA, 462 bp, Homo sapiens
agcaatactctttccccaaatgtctgcctttgcattcttatttcctttaagattctattcaaacatcagctcactgagccttctctgatggccccacttaaaataatccaacccagcccttcccgtctcttccatggctttatttttttccataaaacttaacgtcttctgacaacctataaattctacctatttgtttgactgtcttctcccttatccccactaaaatatcagctccgtgaaggaagrcaatgaactttgttttgctcactgctgtatttcctgtgcttatagaatattgcctaatacattttaggtgctaaatgattatttaagtgaattaatttagcaactatcaacaacaagctgagtataaaacagcaggaaaatgaaaaccatctaggtcagtgacaatttaattgagccattgaattacacctggacttctagtcatgtgaggta

SEQ ID NO: 596380 - DNA, 462 bp, Homo sapiens
agcaatactctttccccaaatgtctgcctttgcattcttatttcctttaagattctattcaaacatcagctcactgagccttctctgatggccccacttaaaataatccaacccagcccttcccgtctcttccatggctttatttttttccataaaacttaacgtcttctgacaacctataaattctacctatttgtttgactgtcttctcccttatccccactaaaatatcagctccgtgaaggaagacaatgaactttgttttgctcactgctgtatttcctgtgcttatagaatattgcctaatacattttaggtgctaaatgattatttaagtgaattaatttagcaactatcaacaacaagctgagtataaaacagcaggaaaatgaaaaccatctaggtcmgtgacaatttaattgagccattgaattacacctggacttctagtcatgtgaggta

SEQ ID NO: 596381 - DNA, 213 bp, Homo sapiens
aaattatattacaaagctatagtaactgtagcagcctggtactggcataaaaatagacacataaaccaatggaattgaacagawaacccagaaaaaaattttatacattttcactgaactcatttccaacaatggtgccaagaacttaaattagggaaaagacaatctcttcaataaatcatgcttggaaactggatatctacatgcaaaaga

SEQ ID NO: 596382 - DNA, 213 bp, Homo sapiens
aaattatattacaaagctatagtaactgtagcagcctggtactggcataaaaatagacacataaaccaatggaattgaacagaaaacccagaaaaaaattttatacattttcactgaactcatttycaacaatggtgccaagaacttaaattagggaaaagacaatctcttcaataaatcatgcttggaaactggatatctacatgcaaaaga

SEQ ID NO: 596383 - DNA, 213 bp, Homo sapiens
aaattatattacaaagctatagtaactgtagcagcctggtactggcataaaaatagacacataaaccaatggaattgaacagaaaacccagaaaaaaattttatacattttcactgaactcatttccaacaawggtgccaagaacttaaattagggaaaagacaatctcttcaataaatcatgcttggaaactggatatctacatgcaaaaga

SEQ ID NO: 596384 - DNA, 454 bp, Homo sapiens
gattatttattgtattatttattagcaggtactttgcagaaaatatttaaatctgtcatgttttagtgaactattatataatagtgtcagcagtgattttgacttgcatttgtagacttcatcatcaaatcctatgaatttttgttagatatagaggcagaatatactgaattgccattctacakagcaatttaatgacttggcagtggtaaagttttatttcagttttttgcactgaggaatgagattgaaatttttctgaataatattgccctcaactgttaagtcaaatgcttaatagctttgaaagttggcttttcctatagatttcataatattttgtaacaaattcacctaaaattacaaggcagaacagtgattataagtgaactttatactgtggtaaggtcacttctacaagaataatgaatcatgaaaatcaagagaaagaaca

SEQ ID NO: 596385 - DNA, 540 bp, Homo sapiens
attgccctcaactgttaagtcaaatgcttaatagctttgaaagttggcttttcctatagatttcataatattttgtaacaaattcacctaaaattacaaggcagaacagtgattataagtgaacyttatactgtggtaaggtcacttctacaagaataatgaatcatgaaaatcaagagaaagaacaaatagtaggaaaatatcttccaattccttttggcccttcatatttccacctaaactcataagcttttaaaaagataattatttttatttatacttaaaaagataatataggataatatttttgtaaaagagttcttgagatacagcactgaacataaaggaaaatatgggagcatccaactacacttgagaaataacgtctggttagtaccatatactgtaggaatgaaagcacaagccctaatgaatattcctgtttgatactaaaccaaagcttgagaagtggtagtttctcaagtttttcaagtggtttggtgcaatctgaagactgcaatcccatcaatgaactttata

SEQ ID NO: 596386 - DNA, 540 bp, Homo sapiens
attgccctcaactgttaagtcaaatgcttaatagctttgaaagttggcttttcctatagatttcataatattttgtaacaaattcacctaaaattacaaggcagaacagtgattataagtgaactttatactgtggtaaggtcacttctacaagaataatgaatcatgaaaatcaagagaaagaacaaatagtaggaaaatatcttccaattccttttggcccttcatatttccacctaaactcataagcttttaaaaagataattatttttatttatacttaaaaagataatataggataatatttttgtaaaagagttcttgagatacagcactgaayataaaggaaaatatgggagcatccaactacacttgagaaataacgtctggttagtaccatatactgtaggaatgaaagcacaagccctaatgaatattcctgtttgatactaaaccaaagcttgagaagtggtagtttctcaagtttttcaagtggtttggtgcaatctgaagactgcaatcccatcaatgaactttata

SEQ ID NO: 596387 - DNA, 516 bp, Homo sapiens
tttctgaataatattgccctcaactgttaagtcaaatgcttaatagctttgaaagttggcttttcctatagatttcataatattttgtaacaaattcacctaaaattacaaggcagaacagtgattataagtgaactttatactgtggtaaggtcacttctacaagaataatgaatcatgaaaatcaagagaaagaacaaatagtaggaaaatatcttccaattccttttggcccttcatatttccacctaaactcataagcttttaaaaagataattatttttatttatacttaaaaagataatataggataatatttttgtaaaagagttcttgagatacagcactgaacrtaaaggaaaatatgggagcatccaactacacttgagaaataacgtctggttagtaccatatactgtaggaatgaaagcacaagccctaatgaatattcctgtttgatactaaaccaaagcttgagaagtggtagtttctcaagtttttcaagtggtttggtgc

SEQ ID NO: 596388 - DNA, 492 bp, Homo sapiens
gatattccaactattgatacggttgtttttgtttgtttgttttgttttgttttgtttgtttgagacagaatctcactctgttgcccaggctggaatgcagtggtgcgatctcagctcacttcsgtctcctgggttcaggtgatgctcatgcctcagcctcctgagtagctgggactataggcatgcaccaccaggcccagctaattttcatatttttagtagagatggggtttcactatgttggctaggctggtcttgaactcctgacctccagtgatcccgaagtgctgggattacaagtgtgagccagcttacctagtcctacacatttttagttaataacaaaattcacatttgttataatcgactgatctcatcagaaaagtctttaagtattggaattagttaagcttacattgttggttgtaagtttttcaaatcttcttattgtccactcatgttctaagttgttttccttgaagtgacaggctc

SEQ ID NO: 596389 - DNA, 492 bp, Homo sapiens
gatattccaactattgatacggttgtttttgtttgtttgttttgttttgttttgtttgtttgagacagaatctcactctgttgcccaggctggaatgcagtggtgcgatctcagctcacttcggtctcctgggttcaggtgatgytcatgcctcagcctcctgagtagctgggactataggcatgcaccaccaggcccagctaattttcatatttttagtagagatggggtttcactatgttggctaggctggtcttgaactcctgacctccagtgatcccgaagtgctgggattacaagtgtgagccagcttacctagtcctacacatttttagttaataacaaaattcacatttgttataatcgactgatctcatcagaaaagtctttaagtattggaattagttaagcttacattgttggttgtaagtttttcaaatcttcttattgtccactcatgttctaagttgttttccttgaagtgacaggctc

SEQ ID NO: 596390 - DNA, 492 bp, Homo sapiens
gatattccaactattgatacggttgtttttgtttgtttgttttgttttgttttgtttgtttgagacagaatctcactctgttgcccaggctggaatgcagtggtgcgatctcagctcacttcggtctcctgggttcaggtgatgctcatgcctcagcctcctgagtagctgggactataggcatgcaccaccaggcccagctaattttcatatttttagtagagatggggtttcactatgttggctaggctggtcttgaactcctgacctccagtgatcccgaagtgctgggattacaagtgtgagccagcttacctagtcctacacatttttagttaataacaaaattcacatttgttataatcgactgatctcatcagaawagtctttaagtattggaattagttaagcttacattgttggttgtaagtttttcaaatcttcttattgtccactcatgttctaagttgttttccttgaagtgacaggctc

SEQ ID NO: 596391 - DNA, 530 bp, Homo sapiens
taaaaacagtgttccattaaaaaagcagttatttcagtttataaatcacatgatcacaaattctttcctcaagaaaaactgtggtgtgacaattattttaygctttatttctcgttttgtcacatagataattaaaagatgtgtattcatggatcaagacttaaaacattaaagatttttgctgcttcatcagtgatattctcaatgatactctacattatttttactgtagttgtagtgccagttgagaatgtgacaacttctaatacagcttggtgccagctgccttcagttttggaaatgcatcaacagttttacccaccatagcttttgcatcatgtaacaatttttgctttaattgttaaacattattttggaaactcaaggaagagtaaagtctgttttattgcccatagttttactatttgtttgttctttcttccttcaggatgttctaagaatccttctttttatcattctcctttctggttcaataacttttctcactattcttttggtgtagttttgtc

SEQ ID NO: 596392 - DNA, 372 bp, Homo sapiens
acatagataattaaaagatgtgtattcatggatcaagacttaaaacattaaagatttttgctgcttcatcagtgatattctcaatgatactctacattatttttactgtagttgtagtgccagttgagaatgtgacaacttctaatacagcttggtgccagctgccttcagttttggaaatgcatcaacagtwttacccaccatagcttttgcatcatgtaacaatttttgctttaattgttaaacattattttggaaactcaaggaagagtaaagtctgttttattgcccatagttttactatttgtttgttctttcttccttcaggatgttctaagaatccttctttttatcattctcctttctggttca

SEQ ID NO: 596393 - DNA, 372 bp, Homo sapiens
acatagataattaaaagatgtgtattcatggatcaagacttaaaacattaaagatttttgctgcttcatcagtgatattctcaatgatactctacattatttttactgtagttgtagtgccagttgagaatgtgacaacttctaatacagcttggtgccagctgccttcagttttggaaatgcatcaacagttttacccaccatagcttttgcaycatgtaacaatttttgctttaattgttaaacattattttggaaactcaaggaagagtaaagtctgttttattgcccatagttttactatttgtttgttctttcttccttcaggatgttctaagaatccttctttttatcattctcctttctggttca

SEQ ID NO: 596394 - DNA, 522 bp, Homo sapiens
tcgttttgtcacatagataattaaaagatgtgtattcatggatcaagacttaaaacattaaagatttttgctgcttcatcagtgatattctcaatgatactctacattatttttactgtagttgtagtgccagttgagaatgtgacaacttctaatacagcttggtgccagctgccttcagttttggaaatgcatcaacagttttacccaccatagcttttgcatcatgtaacaatttttgcttyaattgttaaacattattttggaaactcaaggaagagtaaagtctgttttattgcccatagttttactatttgtttgttctttcttccttcaggatgttctaagaatccttctttttatcattctcctttctggttcaataacttttctcactattcttttggtgtagttttgtctcatgactaatttttagttctcattcatctcacaatttcttgatttccctttcattactaatggatgtttttgctggatatagaattctttgttgtcagttct

SEQ ID NO: 596395 - DNA, 214 bp, Homo sapiens
taatatttaattaaataataaagaataatacatgtcttcagcataaaactgaattaattttatctacatagcagagacagagatgttgaataagctaatcagtaatcactttctattttactttttattccctgcatattaasaataaaactggattcctttttttttttttttgagagggagtctcatactatcactgggctgcagtgcaatg

SEQ ID NO: 596396 - DNA, 560 bp, Homo sapiens
gcagcaacatgtatggagctggaggctacattctttttcatcctttgtcctaaaagaagtaactcagaaccagaaaatcaaataccacatggtctcatttctaagtgggagctaaacaatgagtacatgtgaacataaagatggaagtaatagactagagattccaaaagagaaggtagaagaggaggtacacaggttgaaaactacctattgggtactaggatcactttggatgatggctgtgctagcaggccaaacctcggcattacataatctagccatgtaacgaacctgcatgtgtacccccgaatctaaaataaaatatttttttaaaaaatggtaaagaaaaaaagtattaaatgacataactgaatattctagacatcattctaccatatgttgtccaagaaaaaccacattttaccttactgtttgtcatttgaaataaaatattatgttaagatattttaaatttttaccagttcmacaaaggaactgggaagtagaaactgaagaacactttgttaaacaagtccttggggattaaagaagtaacagct

SEQ ID NO: 596397 - DNA, 538 bp, Homo sapiens
tacctatctacctatgtatccatctaatgtattatgtaatctatgtatttatctattgaatctataatctatgtatcaattrtctatctacctatcatctatccctgtagctatctctctatccagctatctatctatacatctatctatccatccatctagtgtattgtctatctacgtatttatctattgaatctataacctatgtatcaactatctacctatcatctatctgtctggctagctagctgtctatctgcctatcatctctctactatctatctatcatctactatatatccatcatctatcatccatccatctatgcatccatccatctatccatgtatctatatatgtatttatctattgaatctataatctgtgtatcaattatctatctacctatcatctatccctgtagctatcaacttacctatctacctatctatctaatgtattatctaatctatgtatttatctattgaatctataatctatgtatcaattatctacctatcatctatctgtctggtta

SEQ ID NO: 596398 - DNA, 538 bp, Homo sapiens
tacctatctacctatgtatccatctaatgtattatgtaatctatgtatttatctattgaatctataatctatgtatcaattgtctatctacctatcatctatccctgtagctatctctctatccagctatctatctatacatctatctatccatccatctartgtattgtctatctacgtatttatctattgaatctataacctatgtatcaactatctacctatcatctatctgtctggctagctagctgtctatctgcctatcatctctctactatctatctatcatctactatatatccatcatctatcatccatccatctatgcatccatccatctatccatgtatctatatatgtatttatctattgaatctataatctgtgtatcaattatctatctacctatcatctatccctgtagctatcaacttacctatctacctatctatctaatgtattatctaatctatgtatttatctattgaatctataatctatgtatcaattatctacctatcatctatctgtctggtta

SEQ ID NO: 596399 - DNA, 538 bp, Homo sapiens
tacctatctacctatgtatccatctaatgtattatgtaatctatgtatttatctattgaatctataatctatgtatcaattgtctatctacctatcatctatccctgtagctatctctctatccagctatctatctatacatctatctatccatccatctagtgtattrtctatctacgtatttatctattgaatctataacctatgtatcaactatctacctatcatctatctgtctggctagctagctgtctatctgcctatcatctctctactatctatctatcatctactatatatccatcatctatcatccatccatctatgcatccatccatctatccatgtatctatatatgtatttatctattgaatctataatctgtgtatcaattatctatctacctatcatctatccctgtagctatcaacttacctatctacctatctatctaatgtattatctaatctatgtatttatctattgaatctataatctatgtatcaattatctacctatcatctatctgtctggtta

SEQ ID NO: 596400 - DNA, 538 bp, Homo sapiens
tacctatctacctatgtatccatctaatgtattatgtaatctatgtatttatctattgaatctataatctatgtatcaattgtctatctacctatcatctatccctgtagctatctctctatccagctatctatctatacatctatctatccatccatctagtgtattgtctatctacgtatttatctattgaatctataacctatgtatcaactatctacctatcatctatctgtctggctagctagctgtctatctrcctatcatctctctactatctatctatcatctactatatatccatcatctatcatccatccatctatgcatccatccatctatccatgtatctatatatgtatttatctattgaatctataatctgtgtatcaattatctatctacctatcatctatccctgtagctatcaacttacctatctacctatctatctaatgtattatctaatctatgtatttatctattgaatctataatctatgtatcaattatctacctatcatctatctgtctggtta

SEQ ID NO: 596401 - DNA, 597 bp, Homo sapiens
gctatttagtcattagcaagggatgagggccacaagctaaaaatcatctctatttttaaaagatttctctgcttaagaataattccaggatcaaagcagaaaccaggacagaagccaagagatcaatcaggaggatgtggctatgatccagatgacatatgtcatgcatgagggtgaagaaagcaaaggcaggaaaatctgatccaatttgacaaatgtttgaggtcattcaagagacttgccaatgaattgtataagggggagataagagaaagaagagttcaaagtttccaaagtcttctgccaaaacacttctcaggggtggtggtgawtccagtgaaggctttccagatggtttgggatgggttaacttggaagccctaatcatttatctgagctgagaagttgaggatacagttacatgcacgaatctgaagtagcgaaaagatgtcaaagccagagatgggaatttaggattttgagtggatgtgtcaagtcctggggctgagtgagatcccctggagagagaaggaagcttatgtttgagccctagttcagcccagcatttagaagaacccctttgggaagaggagaaga

SEQ ID NO: 596402 - DNA, 597 bp, Homo sapiens
gctatttagtcattagcaagggatgagggccacaagctaaaaatcatctctatttttaaaagatttctctgcttaagaataattccaggatcaaagcagaaaccaggacagaagccaagagatcaatcaggaggatgtggctatgatccagatgacatatgtcatgcatgagggtgaagaaagcaaaggcaggaaaatctgatccaatttgacaaatgtttgaggtcattcaagagacttgccaatgaattgtataagggggagataagagaaagaagagttcaaagtttccaaagtcttctgccaaaacacttctcaggggtggtggtgattccagtgaaggctttccagatggtttgggatgggttaacttggaagccctaatcatttatctgagctgagaagttgaggatacagttacatgcacgaatctgaagtascgaaaagatgtcaaagccagagatgggaatttaggattttgagtggatgtgtcaagtcctggggctgagtgagatcccctggagagagaaggaagcttatgtttgagccctagttcagcccagcatttagaagaacccctttgggaagaggagaaga

SEQ ID NO: 596403 - DNA, 597 bp, Homo sapiens
gctatttagtcattagcaagggatgagggccacaagctaaaaatcatctctatttttaaaagatttctctgcttaagaataattccaggatcaaagcagaaaccaggacagaagccaagagatcaatcaggaggatgtggctatgatccagatgacatatgtcatgcatgagggtgaagaaagcaaaggcaggaaaatctgatccaatttgacaaatgtttgaggtcattcaagagacttgccaatgaattgtataagggggagataagagaaagaagagttcaaagtttccaaagtcttctgccaaaacacttctcaggggtggtggtgattccagtgaaggctttccagatggtttgggatgggttaacttggaagccctaatcatttatctgagctgagaagttgaggatacagttacatgcacgaatctgaagtagmgaaaagatgtcaaagccagagatgggaatttaggattttgagtggatgtgtcaagtcctggggctgagtgagatcccctggagagagaaggaagcttatgtttgagccctagttcagcccagcatttagaagaacccctttgggaagaggagaaga

SEQ ID NO: 596404 - DNA, 597 bp, Homo sapiens
gctatttagtcattagcaagggatgagggccacaagctaaaaatcatctctatttttaaaagatttctctgcttaagaataattccaggatcaaagcagaaaccaggacagaagccaagagatcaatcaggaggatgtggctatgatccagatgacatatgtcatgcatgagggtgaagaaagcaaaggcaggaaaatctgatccaatttgacaaatgtttgaggtcattcaagagacttgccaatgaattgtataagggggagataagagaaagaagagttcaaagtttccaaagtcttctgccaaaacacttctcaggggtggtggtgattccagtgaaggctttccagatggtttgggatgggttaacttggaagccctaatcatttatctgagctgagaagttgaggatacagttacatgcacgaatctgaagtagcgaaaagatgtcaaagccagagatgggaatttaggattttgagtggatgtgtcaagtcctggggctgagtgagatcccctggagagagaaggaagcttrtgtttgagccctagttcagcccagcatttagaagaacccctttgggaagaggagaaga

SEQ ID NO: 596405 - DNA, 603 bp, Homo sapiens
tctaatctatttatctatgtatctatccatcttatctatctacctatcatttatctatcctgtgtatcaatgtatctatcatgtatctatctgtcctagttatctatcaattatgtatctatccatcctatttatctacctattttatgtatctattaaacatctacatatctatatatattacctatcatctagctatttatctatcctatgtatttatctatcatctatttattctatctatatctatttttttctctacgtctctatctatctatctatctagagatttcttaagtccttgggaatcctgaagtcagctccatcataggatctcacagttatattaagtcaataattttctttctctgcctaacttagtctgagttgtgtttcagttgctgttgattggaacaaacctcaaaaagaaattrggactgttataatattgcatttatgggtggctgacttatgatgctgccttccttgtctctggatcctgagtcctgcatccaacccagttccacagcctgggtatctaaccgtttccctggaactcagtaacatttgaactgaaatgccattttcttgttgggatcatta

SEQ ID NO: 596406 - DNA, 342 bp, Homo sapiens
ccgcatatacaaactagttcccataacatgtgtaatataatccctcctttcccrgggtttcccggcttcctatccttccccttagctttctgtcatcagtttttcctaggatttctggttcagcctatgtcaaagtgagagtcaccaacatagttgatgataaatactgtttgattacaggaatgtaggaagatgcgcaagcattctactaaaaattcttttcccacagatagagtaaaccaaggttgcttaggttttgtaagactgccattcaactataaataggccttatgtatgtttactaaatcagaaaaaatttaatatagctaaattttaaataat

SEQ ID NO: 596407 - DNA, 342 bp, Homo sapiens
ccgcatatacaaactagttcccataacatgtgtaatataatccctcctttcccggggtttcccggcttcctatccttccccttagctttctgtcatcagtttttcctaggatttctggttcagcctatgtcaaagtgagagtcaccaacatagttgatgataaatactgtttgattacaggaatgtaggaagatgcgcaagcattctactaaaaattcttttcccacagatagagtaaaccaaggttgcttaggttttgtaagactgccattcaactataaataggccttatgtatgtttactaaatcagaaaamatttaatatagctaaattttaaataat

SEQ ID NO: 596408 - DNA, 466 bp, Homo sapiens
tttactaaatcagaaaaaatttaatatagctaaattttaaataatcaacaacagaaaataaaaatattttgctccaccatcttaaggttacaaagacttagaggtatattttatttacatgcatgcatacacacacacacacacacacacacaaattatatatasatgtgtagaaaatatagaaaagtagaaaaatgtatacaaatatttgaaatacattatgtggaatcatgtttgtatttttttagcttaggaaagaaagccattaaaagagttacatgtcaataaccatgatactataggattttagtagttgcaaagtattacattacttaaataaatgattcatggaatagtctttttttattggacaagggattttcccctccccctcaatctttgagagttagaaacaatgcagagatgagtgtctttatagttaaacctttgtacgttttataattta

SEQ ID NO: 596409 - DNA, 557 bp, Homo sapiens
aaattcttttcccacagatagagtaaaccaaggttgcttaggttttgtaagactgccattcaactataaataggccttatgtatgtttactaaatcagaaaaaatttaatatagctaaattttaaataatcaacaacagaaaataaaaatattttgctccaccatcttaaggttacaaagacttagaggtatattttatttacatgcatgcatacacacacacacacacacacacacaaattatatatagatgtgtagaaaatatagaaaagtagaaaaatgtatacaaatatttgaaatacattatgtggaatcatgtttgtatttttttagcttaggaaagaaagccattaaargagttacatgtcaataaccatgatactataggattttagtagttgcaaagtattacattacttaaataaatgattcatggaatagtctttttttattggacaagggattttcccctccccctcaatctttgagagttagaaacaatgcagagatgagtgtctttatagttaaacctttgtacgttttataatttactcatg

SEQ ID NO: 596410 - DNA, 632 bp, Homo sapiens
actaaatcagaaaaaatttaatatagctaaattttaaataatcaacaacagaaaataaaaatattttgctccaccatcttaaggttacaaagacttagaggtatattttatttacatgcatgcatacacacacacacacacacacacacaaattatatatagatgtgtagaaaatatagaaaagtagaaaaatgtatacaaatatttgaaatacattatgtggaatcatgtttgtatttttttagcttaggaaagaaagccattaaaagasttacatgtcaataaccatgatactataggattttagtagttgcaaagtattacattacttaaataaatgattcatggaatagtctttttttattggacaagggattttcccctccccctcaatctttgagagttagaaacaatgcagagatgagtgtctttatagttaaacctttgtacgttttataatttactcatgataaattttcaagttgaattcctaggccaaagggtgtacagattttaaagactttcaaagttggcagatatcactgtaggataattataccaatttatactcttaccagtaatatatgagtgtatatatttacctattccttgccagttctggaaattatgaa

SEQ ID NO: 596411 - DNA, 400 bp, Homo sapiens
cattatgtggaatcatgtttgtatttttttagcttaggaaagaaagccattaaaagagttacatgtcaataaccatgatactataggattttagtagttgcaaagtattacattacttaaataaatgattcatggaatagtctttttttattggacaagggattttcccctccccctcaatctttgagagttagaaacaatgcagagatgagtgtctttatagttaaacctttgtacrttttataatttactcatgataaattttcaagttgaattcctaggccaaagggtgtacagattttaaagactttcaaagttggcagatatcactgtaggataattataccaatttatactcttaccagtaatatatgagtgtatatatttacctattccttgc

SEQ ID NO: 596412 - DNA, 400 bp, Homo sapiens
cattatgtggaatcatgtttgtatttttttagcttaggaaagaaagccattaaaagagttacatgtcaataaccatgatactataggattttagtagttgcaaagtattacattacttaaataaatgattcatggaatagtctttttttattggacaagggattttcccctccccctcaatctttgagagttagaaacaatgcagagatgagtgtctttatagttaaacctttgtacgttttataatttactcatgataaattttcaagttgaattcctaggccaaagggtgtacagattttaaagactttcaawgttggcagatatcactgtaggataattataccaatttatactcttaccagtaatatatgagtgtatatatttacctattccttgc

SEQ ID NO: 596413 - DNA, 476 bp, Homo sapiens
ggcctgggaatgtaaatatcctttycttccccattcagcttactaatgaatctatcataatctcagctgtctgaatctaaaagagaaccagtaaaattgagataacaagtttattgcaaaataaatgacctgaaagccacaggcattgggtgcggtaggagaagggcaggtagtggtgactgaggtgactctgtgtttgggtttttgaaaagattgtagatttgaaggataaggagttcagagaagtagaaaggcaaataggggctgttataaataaggacagtggcatgagccaacggggttatctctcatatttaaagaacatggctacatctggtttccctataagttgattccttactgttattctgagttgaatgcatatcttttgtctcagtgaagcctgaatggcttttgatgtctctgatctggaaaggttatttgtgtatctcagaataagtcattttgctaaaaaa

SEQ ID NO: 596414 - DNA, 564 bp, Homo sapiens
aatagaaagctctgacctaaacttcacaagtgtcccttccaagcagggacacgtaagagtaaacaaaaaaagaagatcaaattaaactcaaagtgagaagataggaaaaaataaagatgagaatataaatcaataaaacagaaaggggaaagaaaatagagaaragtccatgaaaacaaaggctgactcaagaagatcaataagattgataaatctctagacagactgatcaggaaaaaaataagacaagatacaaattattagtatcaagaatgaggaaggtgaaatcactacagattctacaggtattaaaataataagaaacattatgatcaactccattcctttaatttgtcaagatagacgaaatgaacaaatttcttgaaagatgcaaatttatgaaaggagagacagataacctaaataggtacctattaaagaaataaaatttgttgttaaaaactgtcccacaggctgggcactggtggctcatccagtaatcccagcactttgggagacggatcacctgaagtcaggagttcaagaccagcctggccaacatgg

SEQ ID NO: 596415 - DNA, 562 bp, Homo sapiens
agcttatacatttttgaaagtgaaatctcaggattcatggtayctttacttctacttgccaaattattaaaatggtgttatatttcttaagatattttaaagcctctattgtagaacagaaatagtagaaaatggaactaatgtttattaacagttactatggaagagggaatagaaatgtgttgctcttgaacaggtttattcaactttggcgctattgacattttgggctagctaattccttgtcacgggcagtatatcctgtgtgtaggatgttaagcagcatttctggcctccatccactagatatagtagcacacccgcgcccctcccctcccccctgcccctgtgacaaccaaaaatatctttagacattgccagatgtcccttgggcagcaaaaattgctccctctccccagttaagaaccattgttctacagtacagaatcagtaccactaaataaatgttattggcgtgtttagaacgaggcctagcacatagctggtactcaagtatttgttgaataaatgagtagtcagattttcattgtgaattaaaaac

SEQ ID NO: 596416 - DNA, 490 bp, Homo sapiens
ataatagtgtgatttatccagaaggtgatagaaatatcattttcctagaccacagatataagccaaggagaatagaaagctctgacctaaacttcacaagtgtcccttccaagcagggacacgtaagagtaaacaaaaaaagaagatcaaattaaactcaaagtgagaagataggaaaaaataaagatgagaatataaatcaataaaacagaaaggggaaagaaaatagagaaaagtccatgaaaacaaaggctgactcaagaagatcaataagattgataaatctctagmcagactgatcaggaaaaaaataagacaagatacaaattattagtatcaagaatgaggaaggtgaaatcactacagattctacaggtattaaaataataagaaacattatgatcaactccattcctttaatttgtcaagatagacgaaatgaacaaatttcttgaaagatgcaaatttatgaaaggagagacagataacc

SEQ ID NO: 596417 - DNA, 562 bp, Homo sapiens
agcttatacatttttgaaagtgaaatctcaggattcatggtatctttacttctacttgccaaattattaaaatggtgttatatttcttaagatattttaaagcctctattgtagaacagaaatagtagaaaatggaactaatgtttattaacagttactatggaagagggaatagaaatgtgttgctcttgaacaggtttattcaactttggcgctattgacattttgggctagctaattccttgtcacgggcagtatatcctgtgtgtaggatgttaagcagcatttctggcctcyatccactagatatagtagcacacccgcgcccctcccctcccccctgcccctgtgacaaccaaaaatatctttagacattgccagatgtcccttgggcagcaaaaattgctccctctccccagttaagaaccattgttctacagtacagaatcagtaccactaaataaatgttattggcgtgtttagaacgaggcctagcacatagctggtactcaagtatttgttgaataaatgagtagtcagattttcattgtgaattaaaaac

SEQ ID NO: 596418 - DNA, 354 bp, Homo sapiens
gcatttctggcctccatccactagatatagtagcacacccgcgcccctcccctcccccctgcccctgtgacaaccaaaaatatctttagacattgccagatgtcccttgggcagcaaaaattgctccctctccccagttaagaaccattgttctacagtacagaatcagtaccactaaataaatgttattggcgtgtttagaacgaggcctagcacatagctggtactcaartatttgttgaataaatgagtagtcagattttcattgtgaattaaaaacagaacacaacttgatgtctgacctttcaagttgcttttacaaaagaaatgggatgtccattgaacatctgtttt

SEQ ID NO: 596419 - DNA, 611 bp, Homo sapiens
tgttctacagtacagaatcagtaccactaaataaatgttattggcgtgtttagaacgaggcctagcacatagctggtactcaagtatttgttgaataaatgagtagtcagattttcattgtgaattaaaaacagaacacaacttgatgtctgacctttcaagttgcttttacaaaagaaatgggatgtccattgaacatctgttttagatctgatttcccaatctggattattaaaatgaggaggctattttttcccagtatataaatgattctaatactttttgctgtaaaacttttggagtctctctgctaaattatgttccagtttcttagcttgggattcaagtcatawatatactagttctgtcttacctttcaatgcttttatttgttcccttttgaacatggctgaattttacctttctgtctacctgcctgccattcttgctacccctccttcctttttccactctcatctttttcccctctcatctttttcccattttccagtctgtaaatcctacctatccttttattttttaaattacaatatctcattctgttacttaggcaggagtgcggtggcacaatcatagttgactgcagcttc

SEQ ID NO: 596420 - DNA, 459 bp, Homo sapiens
tctgacctttcaagttgcttttacaaaagaaatgggatgtccattgaacatctgttttagatctgatttcccaatctggattattaaaatgaggaggctattttttcccagtatataaatgattctaatactttttgctgtaaaacttttggagtctctctgctaaattatgttccagtttcttagcttgggattcaagtcataaatatactagktctgtcttacctttcaatgcttttatttgttcccttttgaacatggctgaattttacctttctgtctacctgcctgccattcttgctacccctccttcctttttccactctcatctttttcccctctcatctttttcccattttccagtctgtaaatcctacctatccttttattttttaaattacaatatctcattctgttacttaggcaggagtgcggtggcacaatcatagttgactgcag

SEQ ID NO: 596421 - DNA, 459 bp, Homo sapiens
tctgacctttcaagttgcttttacaaaagaaatgggatgtccattgaacatctgttttagatctgatttcccaatctggattattaaaatgaggaggctattttttcccagtatataaatgattctaatactttttgctgtaaaacttttggagtctctctgctaaattatgttccagtttcttagcttgggattcaagtcataaatatactagttctgtcttacctttcaatgcttttatttgttcccttttgaacatggctgaattttacctttctgtctmcctgcctgccattcttgctacccctccttcctttttccactctcatctttttcccctctcatctttttcccattttccagtctgtaaatcctacctatccttttattttttaaattacaatatctcattctgttacttaggcaggagtgcggtggcacaatcatagttgactgcag

SEQ ID NO: 596422 - DNA, 459 bp, Homo sapiens
tctgacctttcaagttgcttttacaaaagaaatgggatgtccattgaacatctgttttagatctgatttcccaatctggattattaaaatgaggaggctattttttcccagtatataaatgattctaatactttttgctgtaaaacttttggagtctctctgctaaattatgttccagtttcttagcttgggattcaagtcataaatatactagttctgtcttacctttcaatgcttttatttgttcccttttgaacatggctgaattttacctttctgtctacctgccygccattcttgctacccctccttcctttttccactctcatctttttcccctctcatctttttcccattttccagtctgtaaatcctacctatccttttattttttaaattacaatatctcattctgttacttaggcaggagtgcggtggcacaatcatagttgactgcag

SEQ ID NO: 596423 - DNA, 574 bp, Homo sapiens
ttttgaacatggctgaattttacctttctgtctacctgcctgccattcttgctacccctccttcctttttccactctcatctttttcccctctcatctttttcccattttccagtctgtaaatcctacctatccttttattttttaaattacaatatctcattctgttacttaggcaggagtgcggtggcacaatcatagttgactgcarcttccaatttctgggcccaaatgaccctcccatctcagcctcccaagtagctgggaatacaggcacaatactgtgcccggttagttttttttttgttgttgttgttttgttttttttgagacagagtttcactcttgttgcccaggctggagtgcaatggtgtgatctcggctcactgcaacctctgcctcccgggttcaagtgattctcctgtctccgcctctcgagtagctgggtttatagtcgtatgcccccatgctcagctaatttttgtgtttttagtagaggtggggtttcatcatagtggtcaggttgggcttgaactactgacctcaggtgatctgtctgcctcggcttcccaaag

SEQ ID NO: 596424 - DNA, 574 bp, Homo sapiens
ttttgaacatggctgaattttacctttctgtctacctgcctgccattcttgctacccctccttcctttttccactctcatctttttcccctctcatctttttcccattttccagtctgtaaatcctacctatccttttattttttaaattacaatatctcattctgttacttaggcaggagtgcggtggcacaatcatagttgactgcagcttcsaatttctgggcccaaatgaccctcccatctcagcctcccaagtagctgggaatacaggcacaatactgtgcccggttagttttttttttgttgttgttgttttgttttttttgagacagagtttcactcttgttgcccaggctggagtgcaatggtgtgatctcggctcactgcaacctctgcctcccgggttcaagtgattctcctgtctccgcctctcgagtagctgggtttatagtcgtatgcccccatgctcagctaatttttgtgtttttagtagaggtggggtttcatcatagtggtcaggttgggcttgaactactgacctcaggtgatctgtctgcctcggcttcccaaag

SEQ ID NO: 596425 - DNA, 495 bp, Homo sapiens
agctgggtttatagtcgtatgcccccatgctcagctaatttttgtgtttttagtagaggtggggtttcatcatagtggtcaggttgggcttgaactmctgacctcaggtgatctgtctgcctcggcttcccaaagtgatgggattataggtgtgagccactgtgcccagcttagttttttttttttttttttttttgagatggagtctcgctgtgttgcccagcctggagtgaagtggtgtagtggtgtgatctcagctcactgcaacttctgcctcctgggttcaagtgattctcctgcctcagcctcccaagtagctgagactacaggcacatgctgccacccctggctaagtttttatattttagtagagatggggtttcaccttgttacccagctggtctcgaattcctgagctcaggcaatccacctgccttggcatcccaaagtgctaggattacaggtgtgagccaccatgcccagccattcccggct

SEQ ID NO: 596426 - DNA, 495 bp, Homo sapiens
agctgggtttatagtcgtatgcccccatgctcagctaatttttgtgtttttagtagaggtggggtttcatcatagtggtcaggttgggcttgaactactgacctcaggtgatctgyctgcctcggcttcccaaagtgatgggattataggtgtgagccactgtgcccagcttagttttttttttttttttttttttgagatggagtctcgctgtgttgcccagcctggagtgaagtggtgtagtggtgtgatctcagctcactgcaacttctgcctcctgggttcaagtgattctcctgcctcagcctcccaagtagctgagactacaggcacatgctgccacccctggctaagtttttatattttagtagagatggggtttcaccttgttacccagctggtctcgaattcctgagctcaggcaatccacctgccttggcatcccaaagtgctaggattacaggtgtgagccaccatgcccagccattcccggct

SEQ ID NO: 596427 - DNA, 495 bp, Homo sapiens
agctgggtttatagtcgtatgcccccatgctcagctaatttttgtgtttttagtagaggtggggtttcatcatagtggtcaggttgggcttgaactactgacctcaggtgatctgtctgcctcggcttcccaaagtgatgggattataggtgtgagccactgtgcccagcttagttttttttttttttttttttttgagatggagtctcgctgtgttgcccagcctggagtgaagtggtgtagtggtgtgatctcagctcactgcaacttctgcctcctgggttcaagtgattctcctgcctcagcctcccaagtagctgrgactacaggcacatgctgccacccctggctaagtttttatattttagtagagatggggtttcaccttgttacccagctggtctcgaattcctgagctcaggcaatccacctgccttggcatcccaaagtgctaggattacaggtgtgagccaccatgcccagccattcccggct

SEQ ID NO: 596428 - DNA, 640 bp, Homo sapiens
ggaccctggccttaactacatatttttttacatctgcacagtgttttggaaaaagtggttcaactgaaagaatgaaaagctgggggcagaatttgctttaaaaaaaattaaaaaaagggcattgaaaaaagtttcagtggtgttgggagggccttggaacaaggagtgaatggaagatgagggagtggagggaggccatgtatggactctttctacagaccaggctgttgaaggagagagggttaacaggaaatgaagtgcagggggaagttttttgaagatgggagaaagaggacaacttttatatatttcatttcatttgattccttataaatttgtaaggaagatagagcttgtattatgtcagtgaagttgaaaatagagtacagaaaaattaagatacagcrcccccaaaaccgagaacttctgacataatacactgttggaaatatttatttcagagtgaagaaaatattggaagttaggcttgttagttggtctgcatggttcataattactctttcttattaactatttaaggaacatgagaccagggagttaaatacccaggtatatgcagatgtatatctagaattggtaccaaagtaaatacaggcataccttggagatactgtaggtt

SEQ ID NO: 596429 - DNA, 640 bp, Homo sapiens
ggaccctggccttaactacatatttttttacatctgcacagtgttttggaaaaagtggttcaactgaaagaatgaaaagctgggggcagaatttgctttaaaaaaaattaaaaaaagggcattgaaaaaagtttcagtggtgttgggagggccttggaacaaggagtgaatggaagatgagggagtggagggaggccatgtatggactctttctacagaccaggctgttgaaggagagagggttaacaggaaatgaagtgcagggggaagttttttgaagatgggagaaagaggacaacttttatatatttcatttcatttgattccttataaatttgtaaggaagatagagcttgtattatgtcagtgaagttgaaaatagagtacagaaaaattaagatacagcgcccccaaaaccgagaacttctgacataatacactgttggaaatatttatttcagagtgaagaaaatattggaagttaggcttgttarttggtctgcatggttcataattactctttcttattaactatttaaggaacatgagaccagggagttaaatacccaggtatatgcagatgtatatctagaattggtaccaaagtaaatacaggcataccttggagatactgtaggtt

SEQ ID NO: 596430 - DNA, 421 bp, Homo sapiens
acttctgacataatacactgttggaaatatttatttcagagtgaagaaaatattggaagttaggcttgttagttggtctgcatggttcataattactctttcttattaactatttaaggaacatgagaccaggragttaaatacccaggtatatgcagatgtatatctagaattggtaccaaagtaaatacaggcataccttggagatactgtaggttccattatagactactacaataaagtgaatatcaccataaaacaaggcacacaaatattttggtttaccagtgcatgtaaatattatgtttatattctactgcagtctattaaatgttcaatagcattatatttaaaaaaccaatgtgcatactttaatttaaaaatactttattgttaaaaaatgctactgatcttctgagct

SEQ ID NO: 596431 - DNA, 392 bp, Homo sapiens
aatactcagcttttaaaagttttatttcaagaacagtaaaagaacttctggtcttacaaacattacacagataaaacgagtttctccaaacagatgtatgtaaaaatctagtacatatacccccaagttgagtcaataaggtgaaccagattctggttgaatggaatccttgaaatataactttggtgaacaaactgtttgtgttttccacttttcttaaaaaagaagtgataaagcagatttccagtaactgccagctgacaaaatgctacttaccaggtaaaaaccactaccaaaaatcagaatcacagaagagctatcagtaaaattattaatgccacaaattaacatgatgttaacasctgatttatgcatcaaaagagtatttatat

SEQ ID NO: 596432 - DNA, 392 bp, Homo sapiens
aatactcagcttttaaaagttttatttcaagaacagtaaaagaacttctggtcttacaaacattacacagataaaacgagtttctccaaacagatgtatgtaaaaatctagtacatatacccccaagttgagtcaataaggtgaaccagattctggttgaatggaatccttgaaatataactttggtgaacaaactgtttgtgttttccacttttcttaaaaaagaagtgataaagcagatttccagtaactgccagctgacaaaatgctacttaccaggtaaaaaccactaccaaaaatcagaatcacagaagagctatcagtaaaattattaatgccacaaattaacatgatgttaacagctgawttatgcatcaaaagagtatttatat

SEQ ID NO: 596433 - DNA, 529 bp, Homo sapiens
acattaaatttcattattgatctactagctttaactatttaatactagtacacttagttttgattactttgaagcaaaaacaataatcttttcttcttttaatgactttttcagttataggaaagatgatattaaaagaagatatacaaccatagcttagctacaggtataaaattgttttaaagatatgtaattktgctattgaattaaactgaaaacataaatatcaactcatgattttgaaaaaaaaatcttttttatgtttggttttggtaaaaggagagacaaataagtcagaagaacagaaaatacagaaataggcaaactttcccatattcaattaatttttgagcaaggggccaaggtaattcaagagagcaataaataatcttttagaatgatgctggaactgccaaataattcatatggaaaacaaagaaacatgaatcttatctcgtattctcttatcatatgtgtaatttaaccataaatggattttttaaacctacaagtaacactgcggcaagca

SEQ ID NO: 596434 - DNA, 529 bp, Homo sapiens
acattaaatttcattattgatctactagctttaactatttaatactagtacacttagttttgattactttgaagcaaaaacaataatcttttcttcttttaatgactttttcagttataggaaagatgatattaaaagaagatatacaaccatagcttagctacaggtataaaattgttttaaagatatgtaattgtgctattgaattaaactgaaaacataaatatcaactcatgattttgaaaaaaaaatcttttttatgtttggttttggtaaaaggagagacaaataagtcagaagaacagaaaatacagaaataggcaaactttcccatattcaattartttttgagcaaggggccaaggtaattcaagagagcaataaataatcttttagaatgatgctggaactgccaaataattcatatggaaaacaaagaaacatgaatcttatctcgtattctcttatcatatgtgtaatttaaccataaatggattttttaaacctacaagtaacactgcggcaagca

SEQ ID NO: 596435 - DNA, 529 bp, Homo sapiens
acattaaatttcattattgatctactagctttaactatttaatactagtacacttagttttgattactttgaagcaaaaacaataatcttttcttcttttaatgactttttcagttataggaaagatgatattaaaagaagatatacaaccatagcttagctacaggtataaaattgttttaaagatatgtaattgtgctattgaattaaactgaaaacataaatatcaactcatgattttgaaaaaaaaatcttttttatgtttggttttggtaaaaggagagacaaataagtcagaagaacagaaaatacagaaataggcaaactttcccatattcaattaatttttgascaaggggccaaggtaattcaagagagcaataaataatcttttagaatgatgctggaactgccaaataattcatatggaaaacaaagaaacatgaatcttatctcgtattctcttatcatatgtgtaatttaaccataaatggattttttaaacctacaagtaacactgcggcaagca

SEQ ID NO: 596436 - DNA, 652 bp, Homo sapiens
actagctttaactatttaatactagtacacttagttttgattactttgaagcaaaaacaataatcttttcttcttttaatgactttttcagttataggaaagatgatattaaaagaagatatacaaccatagcttagctacaggtataaaattgttttaaagatatgtaattgtgctattgaattaaactgaaaacataaatatcaactcatgattttgaaaaaaaaatcttttttatgtttggttttggtaaaaggagagacaaataagtcagaagaacagaaaatacagaaataggcaaactttcccatattcaattaatttttgagcaaggggycaaggtaattcaagagagcaataaataatcttttagaatgatgctggaactgccaaataattcatatggaaaacaaagaaacatgaatcttatctcgtattctcttatcatatgtgtaatttaaccataaatggattttttaaacctacaagtaacactgcggcaagcaaagattttttaataaagcataaagagcataattttttcaacttcaaaaaattaacaaatgacaaatgtcatcaaaatgaaaccctctgctgttcaataaacattgctaaataaatgaaaacaagtcacacattaggcaaaaatatt

SEQ ID NO: 596437 - DNA, 529 bp, Homo sapiens
acattaaatttcattattgatctactagctttaactatttaatactagtacacttagttttgattactttgaagcaaaaacaataatcttttcttcttttaatgactttttcagttataggaaagatgatattaaaagaagatatacaaccatagcttagctacaggtataaaattgttttaaagatatgtaattgtgctattgaattaaactgaaaacataaatatcaactcatgattttgaaaaaaaaatcttttttatgtttggttttggtaaaaggagagacaaataagtcagaagaacagaaaatacagaaataggcaaactttcccatattcaattaatttttgagcaaggggccaagrtaattcaagagagcaataaataatcttttagaatgatgctggaactgccaaataattcatatggaaaacaaagaaacatgaatcttatctcgtattctcttatcatatgtgtaatttaaccataaatggattttttaaacctacaagtaacactgcggcaagca

SEQ ID NO: 596438 - DNA, 594 bp, Homo sapiens
ttggtaaaaggagagacaaataagtcagaagaacagaaaatacagaaataggcaaactttcccatattcaattaatttttgagcaaggggccaaggtaattcaagagagcaataaataatcttttagaatgatgctggaactgccaaataattcatatggaaaacaaagaaacatgaatcttatctcgtattctcttatcatatgtgtaatttaacsataaatggattttttaaacctacaagtaacactgcggcaagcaaagattttttaataaagcataaagagcataattttttcaacttcaaaaaattaacaaatgacaaatgtcatcaaaatgaaaccctctgctgttcaataaacattgctaaataaatgaaaacaagtcacacattaggcaaaaatatttaaaaaatgcatctccaataactgacttctgtgaataatatataaaaaaaatcttagaactcaagaagatgacaagcaaatcaattggaaaaaaatggtggtagagacaaaatactttaacagacatgtcaccaaagttacacaaatggcaaaaaaaaaagacataaaaagagactcaatctaattaa

SEQ ID NO: 596439 - DNA, 594 bp, Homo sapiens
ttggtaaaaggagagacaaataagtcagaagaacagaaaatacagaaataggcaaactttcccatattcaattaatttttgagcaaggggccaaggtaattcaagagagcaataaataatcttttagaatgatgctggaactgccaaataattcatatggaaaacaaagaaacatgaatcttatctcgtattctcttatcatatgtgtaatttaaccataaatggattttttaaacctacaagtaacactgcggcaagcaaagattttttaataaagcataaagagcataattttttcaacttcaaaaaattaacaaatgacaaatgtcatcaaaatgaaaccctctgctgttcaataaacattgctaaataaatgaaaacaagtcacacattaggcaaaaatatttaaaaaatgcatctccaataactgacttctgtgaataatatataaaaaaaawcttagaactcaagaagatgacaagcaaatcaattggaaaaaaatggtggtagagacaaaatactttaacagacatgtcaccaaagttacacaaatggcaaaaaaaaaagacataaaaagagactcaatctaattaa

SEQ ID NO: 596440 - DNA, 569 bp, Homo sapiens
cttaacaagagattggtagaaaattggtccatctccttgaaaatacatgaatagtgtatctattctgaggaactaaaagtaaaaacactgggaagaaracgaacagaccctcagtaatctacaaaatatcaaatatactaacattcatgtaattagagttacagaggaagaggagagagaaatgagacagaaaaagaataagaaataaaagtcaagcttttcacaaatttggtgaaaaatatcaacttacactttcaagaagctcagcaacccccaagcaggatgaatacaaagaaaaccacacctaggcacatcatagtcagactgctgaaaaccaaatataaagagaaaatcctgaaagcagccagagaatatcaaaacattactatatacatgggaataatgatactactgacaccacacctgacttctcattagaaaccatggaagacaggaaacaatgcaacatcttttaaatgcttgaagaagaaaaacataatcatcccagaactctatattcaggggaaaaaaaggcaaaaatgcatgcagacttccacttccaggcaaaa

SEQ ID NO: 596441 - DNA, 533 bp, Homo sapiens
ctaaaagtaaaaacactgggaagaaaacgaacagaccctcagtaatctacaaaatatcaaatatactaacattcatgtaattagagttacagaggaagaggagagagaaatgagacagaaaaagaataagaaataaaagtcaagcttttcacaaatttggtgaaaaatatcaacttacactttcaagaagctcagcaacccccaagcaggatgaatacaaagaaaaccacacctaggcacatcatagtcagactgctgaaaaccaaatataaagagaaaatcctgaaagcagccagagaatatcaaaacattactatatacatgggaataatgatactactgacaccacacctgacttctcattagaaaccatggaagacaggaaacaatgcaacatcttttaaatgcttgaagaagaaaaacataatcatcccagaactctatattcaggggaaaaaaagrcaaaaatgcatgcagacttccacttccaggcaaaatgcagaaaacgtacttttccctgttctttccactaa

SEQ ID NO: 596442 - DNA, 355 bp, Homo sapiens
ccttatgtaaacaatgctattctttaatatatacttaatgatattgtaagtattttgttcctagtgacatagttcagcatattttcccctatttcatgttaattacgtttcaaatgttatggaaaagaaataaaagttatcmcaatagtaaataatctcatgattttctaaaaagagctttataaatttaattttcttgacttttggtgtcttgaaatagaagattatttttgtatgtatgtatctacctcacagaagttattgatttggtggaagagcactaggattagagtcagaaaagctgggaaaaatcctgcagcttccttatatttttaaccttttgctatagaattat

SEQ ID NO: 596443 - DNA, 355 bp, Homo sapiens
ccttatgtaaacaatgctattctttaatatatacttaatgatattgtaagtattttgttcctagtgacatagttcagcatattttcccctatttcatgttaattacgtttcaaatgttatggaaaagaaataaaagttatcacaatagtaaataatctcawgattttctaaaaagagctttataaatttaattttcttgacttttggtgtcttgaaatagaagattatttttgtatgtatgtatctacctcacagaagttattgatttggtggaagagcactaggattagagtcagaaaagctgggaaaaatcctgcagcttccttatatttttaaccttttgctatagaattat

SEQ ID NO: 596444 - DNA, 522 bp, Homo sapiens
ataatcataatacttaattgtgagaactaggagctcatattactactaaaaccaaataaaaattcaatacrtatttgttaactcaatttaaggatgtttaccttaatactgacacagtgtggatggtaacactgaccacactgagaacaggcaagtaatcttccttctgctccttggccaaaactgccacaaactacacacatatcctgaagttaagaaaacagaacatattttaaatggagactaagctaaaaacctacaaattttactttaaaaataccttcttaactaatatagctctatagctaaatattggatcacttctgtgtatatgagataaagcagaaatgtgcaaggaggaattcaatgaggaagacagtaaattgtcaagttcaaacctgattcaaagtgaatttgtcactgctagaaaacaacacaaccgtagtgtgcatagagttttcttcatcatccttatttgatgaaatatctgcagtagacacctataaaaaagcaaaatacaca

SEQ ID NO: 596445 - DNA, 522 bp, Homo sapiens
ataatcataatacttaattgtgagaactaggagctcatattactactaaaaccaaataaaaattcaatacgtatttgttaactcaatttaaggatgtttaccttaatactgacacagtgtggatggtaacactgaccacactgagaacaggcaagtaatcttccttctgctccttggccaaaactgccacaaactacacacatatcctgaagttaagaaarcagaacatattttaaatggagactaagctaaaaacctacaaattttactttaaaaataccttcttaactaatatagctctatagctaaatattggatcacttctgtgtatatgagataaagcagaaatgtgcaaggaggaattcaatgaggaagacagtaaattgtcaagttcaaacctgattcaaagtgaatttgtcactgctagaaaacaacacaaccgtagtgtgcatagagttttcttcatcatccttatttgatgaaatatctgcagtagacacctataaaaaagcaaaatacaca

SEQ ID NO: 596446 - DNA, 573 bp, Homo sapiens
cctgaagttaagaaaacagaacatattttaaatggagactaagctaaaaacctacaaattttactttaaaaataccttcttaactaatatagctctatagctaaatattggatcacttctgtgtakatgagataaagcagaaatgtgcaaggaggaattcaatgaggaagacagtaaattgtcaagttcaaacctgattcaaagtgaatttgtcactgctagaaaacaacacaaccgtagtgtgcatagagttttcttcatcatccttatttgatgaaatatctgcagtagacacctataaaaaagcaaaatacacaaaatacgaagttatatttttcacttgttttacacttaactggaaagcttcagaaaattcataatcaaaacatatatttttgctaaggtctagaataacaattccaaatattaatgctaagatagtactataaaatggagtcatgacattttattattcacctaattctctctttagaggtagaattcctatagaccaataagtaatgagaaaatataataaacctgtcttagtaagacttgattattcagaattct

SEQ ID NO: 596447 - DNA, 522 bp, Homo sapiens
ataatcataatacttaattgtgagaactaggagctcatattactactaaaaccaaataaaaattcaatacgtatttgttaactcaatttaaggatgtttaccttaatactgacacagtgtggatggtaacactgaccacactgagaacaggcaagtaatcttccttctgctccttggccaaaactgccacaaactacacacatatcctgaagttaagaaaacagaacatattttaaatggagactaagctaaaaacctacaaattttactttaaaaataccttcttaactaatatagctctatagctaaatattggatcacttctgtgtatatgagataaagcagaaatgtgcaaggaggaattcaatgaggaagacagtaaattgtcaagttcaaacctgattcaaagtgaayttgtcactgctagaaaacaacacaaccgtagtgtgcatagagttttcttcatcatccttatttgatgaaatatctgcagtagacacctataaaaaagcaaaatacaca

SEQ ID NO: 596448 - DNA, 612 bp, Homo sapiens
ctccttggccaaaactgccacaaactacacacatatcctgaagttaagaaaacagaacatattttaaatggagactaagctaaaaacctacaaattttactttaaaaataccttcttaactaatatagctctatagctaaatattggatcacttctgtgtatatgagataaagcagaaatgtgcaaggaggaattcaatgaggaagacagtaaattgtcaagttcaaacctgattcaaagtgaatttgtcactgctagaaaacaacacaaccgtagtgtgcayagagttttcttcatcatccttatttgatgaaatatctgcagtagacacctataaaaaagcaaaatacacaaaatacgaagttatatttttcacttgttttacacttaactggaaagcttcagaaaattcataatcaaaacatatatttttgctaaggtctagaataacaattccaaatattaatgctaagatagtactataaaatggagtcatgacattttattattcacctaattctctctttagaggtagaattcctatagaccaataagtaatgagaaaatataataaacctgtcttagtaagacttgattattcagaattctaat

SEQ ID NO: 596449 - DNA, 524 bp, Homo sapiens
accaacaagcacacacatacataaaactccaagaaaattctgctgtctcttgtcaaaaaagcagggaagcggcaggctaccaagaaaaaaaaaactcacagacaacaactacccagtttaagccaaagggtacaattaaaaccccaagccatataccttttgcaaagrcttaaaaggaggacatagtcagccattccccactcctacccacagacaacataataccacagcaggccaagtggggaccaggacacttatacccactgagcagtaacgcggcttcctccctctagagagtgggtggaaaaaaagtggggagcctgagttcaacacccacccaatgataaggacatatccctatccctccctctacagagatatgacagcagaggcctactggagaatccaaactcaaagcactgctcagtgataacttaaccacccctccatcccagtgtcagtggaggccaagtgaaaagcaggaaccttttgagccagggtggtattcacaaaggtataatgca

SEQ ID NO: 596450 - DNA, 612 bp, Homo sapiens
ctccttggccaaaactgccacaaactacacacatatcctgaagttaagaaaacagaacatattttaaatggagactaagctaaaaacctacaaattttactttaaaaataccttcttaactaatatagctctatagctaaatattggatcacttctgtgtatatgagataaagcagaaatgtgcaaggaggaattcaatgaggaagacagtaaattgtcaagttcaaacctgattcaaagtgaatttgtcactgctagaaaacaacacaaccgtagtgtgcatagagttttcttcatcatccttatttgatgaaatatctgcagtagacacctataaaaaagcaaaatacacaaaatacgaagttatatttttcacttgttttacacttaactggaaagcttcagaaaattcataatcaaaacatatatttttgctaaggtctagaataacaattccaaatattaatgctaagatagtactataaaatggagtcatgacattttattattcamctaattctctctttagaggtagaattcctatagaccaataagtaatgagaaaatataataaacctgtcttagtaagacttgattattcagaattctaat

SEQ ID NO: 596451 - DNA, 612 bp, Homo sapiens
ctccttggccaaaactgccacaaactacacacatatcctgaagttaagaaaacagaacatattttaaatggagactaagctaaaaacctacaaattttactttaaaaataccttcttaactaatatagctctatagctaaatattggatcacttctgtgtatatgagataaagcagaaatgtgcaaggaggaattcaatgaggaagacagtaaattgtcaagttcaaacctgattcaaagtgaatttgtcactgctagaaaacaacacaaccgtagtgtgcatagagttttcttcatcatccttatttgatgaaatatctgcagtagacacctataaaaaagcaaaatacacaaaatacgaagttatatttttcacttgttttacacttaactggaaagcttcagaaaattcataatcaaaacatatatttttgctaaggtctagaataacaattccaaatattaatgctaagatagtactataaaatggagtcatgacattttattattcacctmattctctctttagaggtagaattcctatagaccaataagtaatgagaaaatataataaacctgtcttagtaagacttgattattcagaattctaat

SEQ ID NO: 596452 - DNA, 598 bp, Homo sapiens
acacctataaaaaagcaaaatacacaaaatacgaagttatatttttcacttgttttacacttaactggaaagcttcagaaaattcataatcaaaacatatatttttgctaaggtctagaataacaattccaaatattaatgctaagatagtactataaaatggagtcatgacattttattattcacctaattctctctttagaggtagaattcctatagaccaataagtaatgagaaaatataataaacctgtcttagtaagacttgattatkcagaattctaatcaagaaactataaatgataatattatatgtatgtacacacacaaatctatcactattttaatgacacacacttgggatctgcaatgtagttagtctgaactgagatgtcctgcaaacataaaatacagcacataattacatattacatgttgaaatggtaatattttagatatatcgaaatggaaggcattaaaattaattttgcctgttcactataacctttgttttgagaggagtttcactcttgttgcccaggctggagtgtaatagcatgatctcagctcgttgcaacctctgcctcctggttcaagct

SEQ ID NO: 596453 - DNA, 524 bp, Homo sapiens
accaacaagcacacacatacataaaactccaagaaaattctgctgtctcttgtcaaaaaagcagggaagcggcaggctaccaagaaaaaaaaaactcacagacaacaactacccagtttaagccaaagggtacaattaaaaccccaagccatataccttttgcaaaggcttaaaaggaggacatagtcagccattccccactcctacccacagacaacatrataccacagcaggccaagtggggaccaggacacttatacccactgagcagtaacgcggcttcctccctctagagagtgggtggaaaaaaagtggggagcctgagttcaacacccacccaatgataaggacatatccctatccctccctctacagagatatgacagcagaggcctactggagaatccaaactcaaagcactgctcagtgataacttaaccacccctccatcccagtgtcagtggaggccaagtgaaaagcaggaaccttttgagccagggtggtattcacaaaggtataatgca

SEQ ID NO: 596454 - DNA, 524 bp, Homo sapiens
accaacaagcacacacatacataaaactccaagaaaattctgctgtctcttgtcaaaaaagcagggaagcggcaggctaccaagaaaaaaaaaactcacagacaacaactacccagtttaagccaaagggtacaattaaaaccccaagccatataccttttgcaaaggcttaaaaggaggacatagtcagccattccccactcctacccacagacaacataataccacagcaggccaagtggggaccaggacacttatacccactgagcagtaacgcggcttcctccctctagagwgtgggtggaaaaaaagtggggagcctgagttcaacacccacccaatgataaggacatatccctatccctccctctacagagatatgacagcagaggcctactggagaatccaaactcaaagcactgctcagtgataacttaaccacccctccatcccagtgtcagtggaggccaagtgaaaagcaggaaccttttgagccagggtggtattcacaaaggtataatgca

SEQ ID NO: 596455 - DNA, 565 bp, Homo sapiens
aatctagtaaggatatagccytgtcttatttataccagcaagcagtgttgtcacttaatgctctcatttttcacgtaaatgactgacattttcccaagtcttcacaagtgatttttgaagacgttgctgcattgagcagagactatgtcattgtaattgcagaagtttttaaattaaatatgtttaataaaattttagagcctgtttctgtggaacacataacacataatggtggtgtaatgtgtatttaaccataaattagcttcacaaaaatttgtgtacttaaaagtgtttatatccaaagaaattcttatttactgctcagtaatctcttgtgtagaagaaaatatgtaacatagtttgctgagtctttgataataacccccagtgtaaaataaagccgtaaagatgaaatgagagttgatactcaatgaaactgatgtgagtgaatacaaactatgaaactgtgtctaggggagagaggaggacatggggctgctattgtgaagaaggaatttgtacaagttagtcaattttctgtaacttttatattctaataaaggaa

SEQ ID NO: 596456 - DNA, 506 bp, Homo sapiens
aatgctctcatttttcacgtaaatgactgacattttcccaagtcttcacaagtgatttttgaagacgttgctgcattgagcagagactaygtcattgtaattgcagaagtttttaaattaaatatgtttaataaaattttagagcctgtttctgtggaacacataacacataatggtggtgtaatgtgtatttaaccataaattagcttcacaaaaatttgtgtacttaaaagtgtttatatccaaagaaattcttatttactgctcagtaatctcttgtgtagaagaaaatatgtaacatagtttgctgagtctttgataataacccccagtgtaaaataaagccgtaaagatgaaatgagagttgatactcaatgaaactgatgtgagtgaatacaaactatgaaactgtgtctaggggagagaggaggacatggggctgctattgtgaagaaggaatttgtacaagttagtcaattttctgtaacttttatattctaataaag

SEQ ID NO: 596457 - DNA, 381 bp, Homo sapiens
caacataataccacagcaggccaagtggggaccaggacacttatacccactgagcagtaacgcggcttcctccctctagagagtgggtggaaaaaaagtggggagcctgagttcaacacccacccaatgataaggacatatccctatccctccctctacagagatatgacagsagaggcctactggagaatccaaactcaaagcactgctcagtgataacttaaccacccctccatcccagtgtcagtggaggccaagtgaaaagcaggaaccttttgagccagggtggtattcacaaaggtataatgcaagtccagagttttcattcctactcagcatttactaggtgtacgtctccatcaatgagtcaacaaaggccta

SEQ ID NO: 596458 - DNA, 490 bp, Homo sapiens
cttcacaagtgatttttgaagacgttgctgcattgagcagagactatgtcattgtaattgcagaagtttttaaattaaatatgtttaataaaattttagagcctgtttctgtggaacacrtaacacataatggtggtgtaatgtgtatttaaccataaattagcttcacaaaaatttgtgtacttaaaagtgtttatatccaaagaaattcttatttactgctcagtaatctcttgtgtagaagaaaatatgtaacatagtttgctgagtctttgataataacccccagtgtaaaataaagccgtaaagatgaaatgagagttgatactcaatgaaactgatgtgagtgaatacaaactatgaaactgtgtctaggggagagaggaggacatggggctgctattgtgaagaaggaatttgtacaagttagtcaattttctgtaacttttatattctaataaaggaaaaccatatcttcatatttataaaa

SEQ ID NO: 596459 - DNA, 506 bp, Homo sapiens
aatgctctcatttttcacgtaaatgactgacattttcccaagtcttcacaagtgatttttgaagacgttgctgcattgagcagagactatgtcattgtaattgcagaagtttttaaattaaatatgtttaataaaattttagagcctgtttctgtggaacacataacacataatggtggtgtaatgtgtatttaaccataaattagcttcacaaaaatttgtgtacttaaaagtgtttatatccaaagaaattcttatttactgctcagtaatctcttgtgtagaagaaaatatgtaacatagtttgctgaktctttgataataacccccagtgtaaaataaagccgtaaagatgaaatgagagttgatactcaatgaaactgatgtgagtgaatacaaactatgaaactgtgtctaggggagagaggaggacatggggctgctattgtgaagaaggaatttgtacaagttagtcaattttctgtaacttttatattctaataaag

SEQ ID NO: 596460 - DNA, 565 bp, Homo sapiens
aatctagtaaggatatagccttgtcttatttataccagcaagcagtgttgtcacttaatgctctcatttttcacgtaaatgactgacattttcccaagtcttcacaagtgatttttgaagacgttgctgcattgagcagagactatgtcattgtaattgcagaagtttttaaattaaatatgtttaataaaattttagagcctgtttctgtggaacacataacacataatggtggtgtaatgtgtatttaaccataaattagcttcacaaaaatttgtgtacttaaaagtgtttatatccaaagaaattcttatttactgctcagtaatctcttgtgtagaagaaaatatgtaacatagtttgctgagtctttgataataacccccagtgtaaaataaagcygtaaagatgaaatgagagttgatactcaatgaaactgatgtgagtgaatacaaactatgaaactgtgtctaggggagagaggaggacatggggctgctattgtgaagaaggaatttgtacaagttagtcaattttctgtaacttttatattctaataaaggaa

SEQ ID NO: 596461 - DNA, 513 bp, Homo sapiens
tgctgcattgagcagagactatgtcattgtaattgcagaagtttttaaattaaatatgtttaataaaattttagagcctgtttctgtggaacacataacacataatggtggtgtaatgtgtatttaaccataaattagcttcacaaaaatttgtgtacttaaaagtgtttatatccaaagaaattcttatttactgctcagtaatctcttgtgtagaagaaaatatgtaacatagtttgctgagtctttgataataacccccagtgtaaaataaagccgtaaagatgaaatgagagttgatactcaatgaaactgatgtgagtgaatacaaactatgaaactgtgtctaggggagagaggaggacatggggctgctattgtgaagaaggaatttgtacaagttagtcmattttctgtaacttttatattctaataaaggaaaaccatatcttcatatttataaaaatgggattttactggtttgatcacaggggtggtgagaataatgaagaa

SEQ ID NO: 596462 - DNA, 562 bp, Homo sapiens
atgctttgtgatatatacatgatatattaatcaattaatcattatgttgtaaaacccattcagcttactctgaaagaggcagatcccagttcaaaagtagccatgagaaggaaggattcaccacctccaggaaaaggtaaatttgccaatacaaatttcatctggaaagaaggacatraatatattggaaatgttcatggtcttctgattcttatttcttttaccccaataagatagaaggatttgatctaaatgatgctgatgctgttgttagtgtctatgattataaaatgatatttagaagaacaaggaaaagaaatgtttaaaatgtgagctctagctcagatgcttttccttttaggttgtgataaatatccaatgtggaatttgtatgcatgttaggggttcaaggaggtgaattttgaaactataaatatttttcagtgtttcaatttctggttgcaatactgtcctttacctagagaaaagctataccagctgacattacaattgtgttagaacttcaacttctttatgtcggtgttgccacactgagaacctt

SEQ ID NO: 596463 - DNA, 614 bp, Homo sapiens
tgattaccagcttttgaatttctgcatgtctatgtgcgtgtgtgcttttgtttgtgagtttgggtgtgtgtgatacctctgattctggaaaatgaataaagtcattaatcattttttggtgactctttggtagatacagggttttaaagcaatgattctgagctgttttagccttagaatcttttctactactacaattcattgcctacaggtaaccaacaacctgaattaatgttggtttgtttgttttgtattatacataagttcagggatacatgtgaagaacatgcaggttttttacataggcatacatgtgccatggtggtttactgtacccatcaacccatcagctacattaggtatttctactaatactatccctcccctaggaccccaaacccctgacaggccccggtgtgtgatgttcgcctccctgtgtccatgtgttctcattgttcaactcccacttacgagtgagaaaatgtggtgtttggttttcttttcctgtgttagtttgctgagaatgatggtttcaggcttcatccatgtctttgcaaaggacrtgaactcatccttttttatggctgcatagtattccatgatgtgtatatgcc

SEQ ID NO: 596464 - DNA, 570 bp, Homo sapiens
cctaaaaccataataaccctagaagacaacctaggcaataccattcaggacattggcatgggcaaagacttcatgactaaaacaccaaaagcaatggcaacaaaagccaaaattgacaaacgggatctaattcaactaaggaacttgtgcagctttatttggaagtgtgcaatgaggtacgtctgagtttcaaaaatgaagaaagtaagtagtcatgctttcctgactctttggtagacagccttttargacggtgattctgagctgttactgttttgggttttctataatactaaagcttactgccgacatgtaaccaagagcttgaattaattaaaaagaaatcacccaaatgcacattaaaaacctcttacaacatatgtgcacattcatagataacatgtagaacttgattttgtgtattaaaaacttgtagaaaagttcaggcagtgcacttattgaatgcaacttggtctttgtaaaatcagtgatatatatttcagatctatccaccttgacccagtgaggtatttcttgatttattgtatgatctcatgatatgccatgtga

SEQ ID NO: 596465 - DNA, 570 bp, Homo sapiens
cctaaaaccataataaccctagaagacaacctaggcaataccattcaggacattggcatgggcaaagacttcatgactaaaacaccaaaagcaatggcaacaaaagccaaaattgacaaacgggatctaattcaactaaggaacttgtgcagctttatttggaagtgtgcaatgaggtacgtctgagtttcaaaaatgaagaaagtaagtagtcatgctttcctgactctttggtagacagccttttaggacggtgattctgagctgttactgttttgggttttctataatactaaagcttactgccracatgtaaccaagagcttgaattaattaaaaagaaatcacccaaatgcacattaaaaacctcttacaacatatgtgcacattcatagataacatgtagaacttgattttgtgtattaaaaacttgtagaaaagttcaggcagtgcacttattgaatgcaacttggtctttgtaaaatcagtgatatatatttcagatctatccaccttgacccagtgaggtatttcttgatttattgtatgatctcatgatatgccatgtga

SEQ ID NO: 596466 - DNA, 570 bp, Homo sapiens
cctaaaaccataataaccctagaagacaacctaggcaataccattcaggacattggcatgggcaaagacttcatgactaaaacaccaaaagcaatggcaacaaaagccaaaattgacaaacgggatctaattcaactaaggaacttgtgcagctttatttggaagtgtgcaatgaggtacgtctgagtttcaaaaatgaagaaagtaagtagtcatgctttcctgactctttggtagacagccttttaggacggtgattctgagctgttactgttttgggttttctataatactaaagcttactgccgacatgtaaccaagagcttgaattaaktaaaaagaaatcacccaaatgcacattaaaaacctcttacaacatatgtgcacattcatagataacatgtagaacttgattttgtgtattaaaaacttgtagaaaagttcaggcagtgcacttattgaatgcaacttggtctttgtaaaatcagtgatatatatttcagatctatccaccttgacccagtgaggtatttcttgatttattgtatgatctcatgatatgccatgtga

SEQ ID NO: 596467 - DNA, 593 bp, Homo sapiens
tgtgtattaaaaacttgtagaaaagttcaggcagtgcacttattgaatgcaacttggtctttgtaaaatcagtgatatatatttcagatctatccaccttgacccagtgaggtatttcttgatttattgtatgatctcatgatatgccatgtgatgactacagcatattatgctctcttcatgctgataccatatggacttaaatatgatgacataccagcatggatatgcttacgtggttggttttattgatttgtactatattagaaatgaaacagaagtattggaaatcctagcaagcatagctgtatctctcycatggctgtgttaattgcaactgtttcccccttaaagcatgtctgtttgacatgtcctaactctgagaaaatccagtgtgtgcttttcagagaatagcagtaaggagtggaaatggccaatggtcaaagtgtcacttgtcctcttggctccccttcatgaatgttaaactctaaactactcaggtcacaatttagaacccctttgttgatccctatagagtgttcccagatatcaaatgacaaataggtctttgatgaagaaacaccctgtaaagc

SEQ ID NO: 596468 - DNA, 593 bp, Homo sapiens
tgtgtattaaaaacttgtagaaaagttcaggcagtgcacttattgaatgcaacttggtctttgtaaaatcagtgatatatatttcagatctatccaccttgacccagtgaggtatttcttgatttattgtatgatctcatgatatgccatgtgatgactacagcatattatgctctcttcatgctgataccatatggacttaaatatgatgacataccagcatggatatgcttacgtggttggttttattgatttgtactatattagaaatgaaacagaagtattggaaatcctagcaagcatagctgtatctctcccatggctgtgttaattgcaactgtttcccccttaaagcatgtctgtttgwcatgtcctaactctgagaaaatccagtgtgtgcttttcagagaatagcagtaaggagtggaaatggccaatggtcaaagtgtcacttgtcctcttggctccccttcatgaatgttaaactctaaactactcaggtcacaatttagaacccctttgttgatccctatagagtgttcccagatatcaaatgacaaataggtctttgatgaagaaacaccctgtaaagc

SEQ ID NO: 596469 - DNA, 615 bp, Homo sapiens
attatgctctcttcatgctgataccatatggacttaaatatgatgacataccagcatggatatgcttacgtggttggttttattgatttgtactatattagaaatgaaacagaagtattggaaatcctagcaagcatagctgtatctctcccatggctgtgttaattgcaactgtttcccccttaaagcatgtctgtttgacatgtcctaactctgagaaaatccagtgtgtrcttttcagagaatagcagtaaggagtggaaatggccaatggtcaaagtgtcacttgtcctcttggctccccttcatgaatgttaaactctaaactactcaggtcacaatttagaacccctttgttgatccctatagagtgttcccagatatcaaatgacaaataggtctttgatgaagaaacaccctgtaaagccatattgctctggtttttgtgtgtgagtgtgtgtgtgtgtgtgtatgtgtgtgtattttcttctcttttgaaaactgtaaatagaggaattttcattacaaatgaaaatgtttctgttccatatttatttcctgtctaatgtactttgctcttcctggatctagtaaggatctcagcttgtctttttt

SEQ ID NO: 596470 - DNA, 549 bp, Homo sapiens
tttcccccttaaagcatgtctgtttgacatgtcctaactctgagaaaatccagtgtgtgcttttcagagaatagcagtaaggagtggaaatggccaatggtcaaagtgtyacttgtcctcttggctccccttcatgaatgttaaactctaaactactcaggtcacaatttagaacccctttgttgatccctatagagtgttcccagatatcaaatgacaaataggtctttgatgaagaaacaccctgtaaagccatattgctctggtttttgtgtgtgagtgtgtgtgtgtgtgtgtatgtgtgtgtattttcttctcttttgaaaactgtaaatagaggaattttcattacaaatgaaaatgtttctgttccatatttatttcctgtctaatgtactttgctcttcctggatctagtaaggatctcagcttgtcttttttatacctgcaaaaaattacatcaagcttcatttttcatgtcaattactgacatattttcaagccttcacaagttatttctgaatatttggtgcatcaaggagagactgt

SEQ ID NO: 596471 - DNA, 553 bp, Homo sapiens
aaactgtaaatagaggaattttcattacaaatgaaaatgtttctgttccatatttatttcctgtctaatgtactttgctcttcctggatctagtaaggatctcagcttgtcttttttatacctgcaaaaaattacatcaagcttcatttttcatgtcaattactgacatattttcaagccttcacaagttatttctgaakatttggtgcatcaaggagagactgtcattgtagttaaagaagtttttaaataggttatattcaataaaatttcagagcttgtttctctggaaagcatagacatagtggtgttatgggtagttaaacataaaatagctccacaaagtgttgtgtacataaaagtgttcatatcctggaaaattctactttattgctcagtactgtctgctggagaggaaaataggtaagataggctgctgagcctatgataataactcataatatgaggtgaaagcatagagacaaaatgagagatgatagatactcaaacggatgtgagtgaagaacagctgtgaacgtgtctatgggagata

SEQ ID NO: 596472 - DNA, 553 bp, Homo sapiens
aaactgtaaatagaggaattttcattacaaatgaaaatgtttctgttccatatttatttcctgtctaatgtactttgctcttcctggatctagtaaggatctcagcttgtcttttttatacctgcaaaaaattacatcaagcttcatttttcatgtcaattactgacatattttcaagccttcacaagttatttctgaatatttggtgcatcaaggagagactgtcattgtagttaaagaagtttttaaataggttatattcaataaaatttcagagcttgtttctctggaaagcatagacatagtggtgttatgggtagttaaacataaaatagctccacaaagtgttgtgtacataaaagtgttcatatcctggaaaattctactttattgctcartactgtctgctggagaggaaaataggtaagataggctgctgagcctatgataataactcataatatgaggtgaaagcatagagacaaaatgagagatgatagatactcaaacggatgtgagtgaagaacagctgtgaacgtgtctatgggagata

SEQ ID NO: 596473 - DNA, 556 bp, Homo sapiens
ggaaagcatagacatagtggtgttatgggtagttaaacataaaatagctccacaaagtgttgtgtacataaaagtgttcatatcctggaaaattctactttattgctcagtactgtctgctggagaggaaaataggtaagataggctgctgagcctatgataataactcataatatgaggtgaaagcatagagacaaaatgagagatgatagatactcaaacggatgtgagtgaagaacagctgtgaacgtgtctatgggagataggaggccatggggctgcttttgtgaagaaggaatttgtacacgttagtcaagtgtcttgacacatttaacattttaataaagcaaaaccttatcttcagatgtgtcagaatrggattgtacagatgtcacattacagtggtggtgaaaataatgaagaaacgaatgtagaggtcaaagaatcaagtccaccaatatggatattagatttatgaacgaaaaagagtgtatgtcaaattgggcaggtgtaaacaaagaaagcagctagctaggtaatttggaggtttctgatg

SEQ ID NO: 596474 - DNA, 627 bp, Homo sapiens
tacccatagtttattggctaactttatgtcttccttaaattatgaaattctataaagtatccttgtctattttaaaattatactcatttttataacttacatgctttatttgtatatatccaggatactagatatttgtaatccaaattggaggttattttttgtcatttgattttttttctgtaatgtgtgttctcaccacatagaagyttttacatttttatgtagtcagatttattcatgtttttatttatggttatgttaaagattatagctattagggacctatttcttcagggtttataatttatgtatgttgttacaaatagagaaattactttttctttgacccaataggtagagggcacttttgtggactcagaaagcttgcctctcctattttattttaggaaaatttctgagaatctgcctcctcatttccaagccagagtttaaaatatttacatttttacttcatagtgttaagacattgtgtaatgtaagtataatgtgtaaaaaaaaatcttaaaaatctaatagtgatttggcagagaccaaagcagggagggccttgaaatgctgctctatttgttatctattattataaagcaattaccataaacttaa

SEQ ID NO: 596475 - DNA, 627 bp, Homo sapiens
tacccatagtttattggctaactttatgtcttccttaaattatgaaattctataaagtatccttgtctattttaaaattatactcatttttataacttacatgctttatttgtatatatccaggatactagatatttgtaatccaaattggaggttattttttgtcatttgattttttttctgtaatgtgtgttctcaccacatagaagcttttacatttttatgtagtcagatttattcatgtttttatttatggttatgttaaagattatagctattagggacctatttcttcagggtttataatttatgtatgttgttacaaatagagaaattactttttctttgacccaataggtagagggcacttttgtggactcagaaagcttgcctctcctattttattttaggaaaatttctgagawtctgcctcctcatttccaagccagagtttaaaatatttacatttttacttcatagtgttaagacattgtgtaatgtaagtataatgtgtaaaaaaaaatcttaaaaatctaatagtgatttggcagagaccaaagcagggagggccttgaaatgctgctctatttgttatctattattataaagcaattaccataaacttaa

SEQ ID NO: 596476 - DNA, 544 bp, Homo sapiens
ctatttgttatctattattataaagcaattaccataaacttaatatcttaaaacagcacccatttacttaggtcagaactcagggcaggctcaactgtgctctctgtttaaggtctcacaggattcaaatcaaggtgttacctgggtggaggctccgggggtgaatcctcttctggggcattcaggtgtgggaggaattcagttctatgmagttgtagggctgagcttgccattttctttttcttttctttttttttttttttttgagacagagtcttgctctgtcgcacaggctggagtgcagtggtgcagtctcggctcactgcaacctctgcctcctgggttcaagtgattctcatgcctcagcctcccaagtggccgggattacaggcgtgcaccaccatgccggctaatttttttttttgtatttttagtagaaacggggttttaccgtgttagccaggatggtctcgatctcatgacctcgtgatcctcctgccttggcctcccaaagtgctgggattacaggcatgagccaccacac

SEQ ID NO: 596477 - DNA, 544 bp, Homo sapiens
ctatttgttatctattattataaagcaattaccataaacttaatatcttaaaacagcacccatttacttaggtcagaactcagggcaggctcaactgtgctctctgtttaaggtctcacaggattcaaatcaaggtgttacctgggtggaggctccgggggtgaatcctcttctggggcattcaggtgtgggaggaattcagttctatgaagttgtagggctgagctygccattttctttttcttttctttttttttttttttttgagacagagtcttgctctgtcgcacaggctggagtgcagtggtgcagtctcggctcactgcaacctctgcctcctgggttcaagtgattctcatgcctcagcctcccaagtggccgggattacaggcgtgcaccaccatgccggctaatttttttttttgtatttttagtagaaacggggttttaccgtgttagccaggatggtctcgatctcatgacctcgtgatcctcctgccttggcctcccaaagtgctgggattacaggcatgagccaccacac

SEQ ID NO: 596478 - DNA, 570 bp, Homo sapiens
ggctggagtgcagtggtgcagtctcggctcactgcaacctctgcctcctgggttcaagtgattctcatgcctcagcctcccaagtggccgggattacaggcgtgcaccaccatgccggctaatttttttttttgtatttttagtagaaacggggttttaccgtgttagccaggatggtctcgatctcatgacmtcgtgatcctcctgccttggcctcccaaagtgctgggattacaggcatgagccaccacaccctgctgagctcaccattttcttactgcctattggcttgggtcaccctcagttcctagaggccactctttggtttttgctcctggctctttttatcttcaaagatagcaacagtgtactgaaatgttcccttgctatgaatttcccttttgctagtagctggataaaactccgctttcaaagaggttatttgattagattaggcaaatctcccttttgattaattcaaaggcagttgattgatggctttaatcacatctgcagaattcctttgccatatagtatattaatggcattaccttgccgtgatatttcatc

SEQ ID NO: 596479 - DNA, 576 bp, Homo sapiens
tctcggcttcatcatcttgttcgtcgtttacatttgatgcagcaaatacttcaaactgactgaaatctgcaaaatttggttgctctggtatctgctgaggtgaggtactagtgtgagttatgaggccatcggcatccactgggcgatgcacagcaggaccaggagcctgtgcaatggttcagaacagaggaacacacattctatcagcctatcagtgtcacagagtcatcttcttcttcttygaaaacttagtatataaagatgacctgttttattatctgtaagttcagagaggtgtattatagtaacatttagctctaaagaaatgattaaaccataagtgaaaagctaagacactaaaaaaaaaattaagatgataaacctccaataaaaagatattttttttcaaaaactgtattgcaaagaaagtacactgaaggagagggtaggtctggccctacccccattctccacttgcatgtgtttttttcttaattggactaatgcacaatagtttcttccttaaataagttatttttttttaatgtttcactgtttcttaaaaagcttgctcta

SEQ ID NO: 596480 - DNA, 576 bp, Homo sapiens
tctcggcttcatcatcttgttcgtcgtttacatttgatgcagcaaatacttcaaactgactgaaatctgcaaaatttggttgctctggtatctgctgaggtgaggtactagtgtgagttatgaggccatcggcatccactgggcgatgcacagcaggaccaggagcctgtgcaatggttcagaacagaggaacacacattctatcagcctatcagtgtcacagagtcatcttcttcttctttgaaaacttagtatataaagatgacctgttttattatctgtaagttcagagaggtgtattatagtaacatttagctctaaagaaatgattaaaccataagtgaaaagctaagacactaaaaaaaaaattaagatgataaacctccaataaaaagatattttttttcaaaaactgtattgcaaagaaagtacamtgaaggagagggtaggtctggccctacccccattctccacttgcatgtgtttttttcttaattggactaatgcacaatagtttcttccttaaataagttatttttttttaatgtttcactgtttcttaaaaagcttgctcta

SEQ ID NO: 596481 - DNA, 559 bp, Homo sapiens
gtgcaatggcacgtctcagctcactacaacctccacctcccagattcaagagattctcctgcgtccactccagagtagctgggattacaggcatgcgccaccacacctggctaattttttgtatctttagtagagacagggtttcaccatgttggccaggctggtcttgaactcctgacctcatgatccgcccacgttggcctcccaaagtgctgggattacaggtatgaaccaccgcacctggctgagacttggtagtttataaagaggagaggtttaattggcttatggttctgcaggctttataggaagcatggtgctggcatctgcttggttttctcaggaggcctcagggaacttccaatcatggtggaaggtgaaggggaagcaggcacatcacatgaagaaagcaggagcaagagagtgagacagtgggggatgggtggaggtgccacacacttttaaatgaccagatctctcaggaactcactatcamgaagacagcaccaaaccatgagggatctgccccccgtgacccaaacacctcccgccagatctc

SEQ ID NO: 596482 - DNA, 640 bp, Homo sapiens
gtctttgggacaaagctaagtttatttttgtttaaactgaaaagctaaattctttagagagtttttctttaaaaatrtggcaacatgagacccaatatatcacaggaaaattaaccttacgaattaaacttgttctgttttaaagtatgtaacttacctgtctatttaatgacttgttgctaaaaggtgtccaggcactaaatctggtgtggaagctctccatttctggagttctccaggaagaatccccagctgacgtctcagcaaattttcttccacttctagaaactacaggtttatttcaataggtgtgcaattaagatcacctagaaataaccaatatgttaatgtccttataggaattatataattatagaaattcacatataacatatagatagaattataattcatgtgtgtacgtgtgtatatataaaattcatctgtgtatatgataagccatacaaatatacacaaaaatcccattaacttcaaatcattgcaattattctattcttacctgctttcacccaaatctgaatttaaacaaaagttgttttttactttgctgggaaaatgggaagcattaagaacgttccaggaaatgctacttagaaactgccgtgattcatcagccaag

SEQ ID NO: 596483 - DNA, 354 bp, Homo sapiens
tgtttgtagataaagttttttyagcacccagctacacccactcatttacatattgcccacagctgcttttgtgctacaacagcagaggtgagtaactgcaacagagactctatggctctcaaagcctaaaatactcattgttttgctctttacaggaaaagtctgctgacccctcaagtagcaggtgaatatatttagagaattaaagacaaatgccaaaggaaaaaaaaatcttgaaaattggatggttgtttatcctaataagccatatagaactatttgacactttaaacaagatgattttattactttgataaaaataaaagctaagtaaaaaagaagtgttaatatgta

SEQ ID NO: 596484 - DNA, 548 bp, Homo sapiens
aatacaagcatgcttgacagaaggcaggcaattgcaagaataatgatgagccatttgaacactctggcttcttcccttccagaagaacttttacctattatagcactggctctctattgggattcttagcaagtgtattagcacttaactttccactttaatgaacgactgacatgtataattctatggagagcataggccaatattttattagtttctgatagtattacaatggtttgagtctattgaactgatatagaagatctatgggaagagaagagagagggctacatatattgggaagttgcccattaatttggtctgtatatgagtcagarttcattttttcttctatatttctatgtatccagagaagcctgttcatgattgagagacacatcaaaaacctcatgacctcattagcttttgtaatgtcgcctctggttttgggttgagctatggctcctcggcccctgagaaagtatttgagcacgttttcattatttggttcagaaagtagcagtatttgacaaaatgtttctgaaaag

SEQ ID NO: 596485 - DNA, 451 bp, Homo sapiens
aattcaaaaaaaaaaaaagaaaaaaagaaagaaagaaagaggaagagagacctgagttgacmtggtcttgccttctcaccatgtgatgccctccaccatgccatgacacagcaagaaagtcctcaccagaagtggcccctggaccttggacttcccagcctccagaagcatgaatgaaataaagtcattttctttataaattacccactcttgggtattctgttatagcaacagaaaatcagaggatatatgcatatttgttaaaaacagttgctttgggattaagatgattataaatgtgtcaggaaaaggagggccaatgggtcacatggcatgaaataaaaacaatcactcaatcggtggcatcttgctggccactgatgttacctagtccaagagctgggaggtgtatacaattatgagcgaagctgaacaattgtttttgtttatt

SEQ ID NO: 596486 - DNA, 451 bp, Homo sapiens
aattcaaaaaaaaaaaaagaaaaaaagaaagaaagaaagaggaagagagacctgagttgacctggtcttgccttctcaccatgtgatgccctccaccatgccatgacacagcaagaaagtcctcaccagaagtggcccctggaccttggacttcccagcctccagaagcatgaatgaaataaagtcattttctttataaattacycactcttgggtattctgttatagcaacagaaaatcagaggatatatgcatatttgttaaaaacagttgctttgggattaagatgattataaatgtgtcaggaaaaggagggccaatgggtcacatggcatgaaataaaaacaatcactcaatcggtggcatcttgctggccactgatgttacctagtccaagagctgggaggtgtatacaattatgagcgaagctgaacaattgtttttgtttatt

SEQ ID NO: 596487 - DNA, 556 bp, Homo sapiens
  misc_feature 450: n = A,T,C or G
ttttttaaccattcattataaaatgaaaggtacagaaaatcacataaaatgtagcatttagttggttattaaaagtttggcatctttttaacagtggtgacagttctcctttcactgattcagtgctgctcagcaggccctgctctggacttagagcacaacactatattgctttggattctttgccgtggccttaattgtcagatctggcccagggtacccaacactgtcttgtttcacacatactcagacacacatacacaaacagccaaatgtttcttgagaggatatgattttggggggaatgaaattacttataatgcttattgtgataaatgagaaaacataggtactgtaaatcaaaaaaataaaaatctcatttcttctattttattttattatgtttatttatttatattttttgagacagtctctctctctgttgcctgngctggagtgcagtagtgcgatctcggctcactgcaacctccacctcccgggttcaagmgattctcctgcctcagcctcctgagtagctggaattacaggtgcctgc

SEQ ID NO: 596488 - DNA, 386 bp, Homo sapiens
tttttcctaaggccttacctttgatatgttggttcagaaactctgggagtggagtccagagatcttgttttaatgaagtcttccgggtgattctgatacacacaagcactgtggaaccactgctgtattctaacacatattatcataattactttaatcagttcttgaccttactctcacataaatggatcaactgaacatttctcccattccattctgtttcctccacatgmactggatttttttcctgtgcccctgggtgagaagtcttgctgctgcttccccagcagtttaaggcttttgcttcagagacagaaggaggcagggaagtgagagggtttgtgtttgttccagtgcaggctttcatcacctcctgcatgcctgtg

SEQ ID NO: 596489 - DNA, 609 bp, Homo sapiens
aggaaacgacattgaaaccctttttaaagatcattcatagttaaatataaatatactctcgttctctctmtatatatatttatatatgtatatataataaatatttatatatgtatatataatatatatataaattgtatatataatgtatatataatatatataaattatatataatgtatatatattatatatatctataaatatatatattatatatattatatatatatacattttatgtagacagggtctcactatgctgcccaggctggtcttaaactctagctcaagtgatctgccagcctaggcctcccaaagtgctgggattacgggcataagccactgcgcctggcccacagttaaatatcttaaagtcaaaactgataattgtacttcctttcacttcttctcttcattcttgaaaggaattcaacactgaaaaagaggtggagacctaactgaggcattcacaaataagaactttagaaaaatgaaaaaacatagttatataaatcatttctaatgatttgttcatcttcaaaacataggccaatatttctattttacccaactttactcagctgtaggatgcagtccagaaacatc

SEQ ID NO: 596490 - DNA, 558 bp, Homo sapiens
  misc_feature 1, 2, 3, 4: n = A,T,C or G
nnnnttaatagtcttcagagtaattttaggagatgaaatataattttatgactttttttactttttacgaacatatggagatatatacacactaatacaagtttcaaatgtattactgaataactgattaaatgtgggttttgtttacattcttttaaatgagaattaaggaaagaaaaaaatgagtgcttcttcatacctacgagaatgcctaaaatgaaacagaaggaaaatacagaatgttggtgaccacatrgagcaaccagaactctcatacactaatagtgagaatattaattggtatagctacttctgaaaattgttgagtcatatctactataggccaatgtacatactttctataaatcagacatttcttccccccgaagcatatactcaacagataggcacacatatgttcaacaacagcagcaacaaaaaagaaactggaataattgtaacagacttacctgtaatgacctaaaatggaaaattacttaaatctccatcaagaacatacagaaattgtcttatattgtaccacagaacactttcgag

SEQ ID NO: 596491 - DNA, 574 bp, Homo sapiens
caatgtacatactttctataaatcagacatttcttccccccgaagcatatactcaacagataggcacacatatgttcaacaacagcagcaacaaaaaagaaactggaataattgtaacagacttacctgtaatgacctaaaatggaaaattacttaaatctccatcaagaacatacagaaattgtcttatattgtaccacagaacactttcgagaaatgaggactgatcatgcaccattggacacaaaatacgaaggaatcttacaaacatgttgttgagtgaaataattcagtaacatgatctcatttgtatacatttcaaaatgataaaattattcaatagtaaaataaattataatagaggttatccttgtgtggaggcagctagagatggaaggcaattatgaaggcagcagcttggttgtagaatatcatcggtatttttttctcaatatacattgtattttttaaagtgttgagcygtatatttataatttgtgcacattattgtcttcaaagtaatttttctacaaaaacccaaccattaagactcagattttctaaaaagaaaaga

SEQ ID NO: 596492 - DNA, 610 bp, Homo sapiens
acacatgtaaaaataattcattcaaatcatgtgtatcctttgccaagtgttctccaataatattgttgggacaatgatattgctatagtcaagtttcaggaaaattccatcaccccaaatatgccacacgttgcagacatccttatcttattccaaatcttaagggtaaagcactgtgtctttcatcactaagtataatattggctgtaggtacttktaggtaattttagtaacttgagaaagttattctgtttatgtttctgatagtctttatctaaaatggtatagactttgacagttttgttctcaattgatatgattatatcatttgccttcctaagcctatttatattgtggattacattgattaattttggaatatcgaacaaaccttgcgttagtgcaattaaccctaattagactaatataattatatttaaatagaaaatattttttaatgattttttttgtctatattggtaattggcccgtagtttttttctttgtttttattttgtgcttgttggtttttatattggggtaataccaatttcaaatagcaaattgggaaatgcttccttctcatattttgtggaagaaattttgtaga

SEQ ID NO: 596493 - DNA, 543 bp, Homo sapiens
taatggggtgtgagtgatcatcatggcttgcacaaaatgctgtggggactcagggtttccttccagcagcagagctcagtgaggctaaaatgcaaggtgaggcaaaggaaggagcctgagatgaagctggacagaaagagtgagaaagagattgcggccaagtcttccataasaagctaaggtgtttcttttaaaacaagtgcctggcaatagatgtaccttgtgttgtgttttagaaagatcatcccagggattaaagggggggttgacagctgctaagcagggcaagactctgtccaatggcacaagttaagaagctgctaccagagtcaaaagagtagcccagaattaggccaaagcatctggatggagatgggaaaggattgaggcacattcagaatggaatttcagaagacagaggagagcagagttggttaaggagaaggggaaaataagcctaagtggtcccaggtggtgacttcagcaggatttggaagcctggctcaagagcaaggacatcccgctaattgggaaggaattaaa

SEQ ID NO: 596494 - DNA, 543 bp, Homo sapiens
taatggggtgtgagtgatcatcatggcttgcacaaaatgctgtggggactcagggtttccttccagcagcagagctcagtgaggctaaaatgcaaggtgaggcaaaggaaggagcctgagatgaagctggacagaaagagtgagaaagagattgcggccaagtcttccataacaagctaaggtgtttcttttaaaacaagtgcctggcaatagatgtaccttgtgttgtgttttagaaagatcatcccagggattaaagggggggttgacagctgctaagcagggyaagactctgtccaatggcacaagttaagaagctgctaccagagtcaaaagagtagcccagaattaggccaaagcatctggatggagatgggaaaggattgaggcacattcagaatggaatttcagaagacagaggagagcagagttggttaaggagaaggggaaaataagcctaagtggtcccaggtggtgacttcagcaggatttggaagcctggctcaagagcaaggacatcccgctaattgggaaggaattaaa

SEQ ID NO: 596495 - DNA, 552 bp, Homo sapiens
tttctgcttgcccagcctcccttcccctctcctaatactgatgtctccttttcccttaggaaagttctcctcccacatccatttgattttaataaggctgttaatcataagactcagctgctgctgctgctgcttcctgtaccgtcacccttgccaccaccacstccctaagctaaaagagaggatcgtgactaagaaaaaccaatcagactctgtcgcccagaaatttgaaccaagcagagaatgctgaggcagaaagcagttggaaccaagaaacagcccacagtatctactgctgagagccctggagtagcctacctggttgctcaaatcccccgtttttctataatattcctaccgtcctaaaaaatcattttcttgctttagttaatccattagtttctgttgcttgtgtaaaccaaaaagtatctgagacaggttttaatccattttgaagtttattttgccaaagttatggaccatgacctatgacacagcctcaggatatcctgagaatatgtgcccaaggtggttaggttatagcttggtttt

SEQ ID NO: 596496 - DNA, 466 bp, Homo sapiens
cccaaaccaaaaggggagagagtcaagtcccaggtttgtgaacagcagcaggttcaaagagtttccccctttttagaaaactgagaaataacagctgggaacagaggggaatccgaatcaggaactcccatttatcttattccattgggcagaagccaacagtcactcagcatgaaaaycctaaaatttaaggcagaaagagggaaatcgctttttctgggctatgtctaattaacccttggagcaacatggctattttgttttactgcaatttctcgcttaagaagactccaaaataaagattaaatatggggtgttcatgagtggttattctcaccaggatgtaacagcagaggccatcaatcctcctgcccaaagaagccaactggggccaaccagaacatctctgctgcttgctaagggaatgagtttgttttctggagctgctgcctatgattgcagtgga

SEQ ID NO: 596497 - DNA, 560 bp, Homo sapiens
agtaacttgttttggttatctagagttgggggtaggaatagagagtgacggcaaatggacataagggattttaagggtgacagaaatcttctaatattggattgtggtaatggttatataactatatgattttattttaaaaaaatcactgaagaacatgcttaaaataattttatgtaatgcaaattgtacctcaaataaagctgctaaaaatattgtcaaccccctagcaagattagttaagagaaaaattctaaaataacaattcagaaatgaaaaatggtataatggcagagcctacagatattaaaaagataatatggtaacactataaataattctatgcraataaattcaaaaatttaggtaaacaaattccttgaaaaattaacttaacaaaactgacacaagaagaaatagaaaatttcagtcaccctatatttattaaattaaagttataataatttttaaaaccttctacaaagaaaactgacaggcccaaagggtttcattggtgaattctatcaaaaacttaagaaaaaaaacccaaaattacacaa

SEQ ID NO: 596498 - DNA, 529 bp, Homo sapiens
cttcaagaggtaattatttagctcaaggggtagtgagacatgactactgtacatttaaaatgcctctctgggcctgataatttaaaggggctcgaattccatagagcaaaagttttttttgttttgtttttcataaccctcatgtttagttaacattgctgacattcatgaatcaaaaaacccaaaccacaaaaaaacaagctatttttattatcacttctgctacctagcatgtcaggcagtcatgttatgtttaaattgccttcaaatggtttcaggaacttttcccatatgtatgttattgaaccactccagaaaatcgtaaatcccttttgtagaggaagagatgattagacgagaaatacttagtgtctggcacagatttatacagaaraaaatttttgtttttagtttctggtctttgttgttactttgttggtagtaaaaaatgagttttttttttaattagccaggctttaggccttatccagtgaaggacaacttgaagatgagatagagcataaaattc

SEQ ID NO: 596499 - DNA, 645 bp, Homo sapiens
aggcccgtggctcgggtgggaggtgtccatccagcttggcccgagcttcggtggtcagcgcgcatttctcttgagggtcatcggtggtgaccttttgactttttcaccccaccctcccatctctttgtctcgcatttgtgttcccgattcagagatggtagaaccaagtccattttaaagtaccctgatgaacactttccgtttttatttctgaaagttccctgcttggtctttactgcgaatttaataacatgttgactacatggcattgtccagtgattactatttttacctctgaaatycagcgatctttccagtagaattctggtccgtcagtccattgtgttttgagataagcatccagcaagtacctccttggcaattagaacatctgttttttcattcattcattcattcagcagctgtttagtaccgtactcagatgaagaggtttggtgtgaaggtaaagtatcctttcatggaagaggatgctttgactgaagtataatagatggacctttaaatgagacagttacataagtgatgtctgttaaggaaggtatggttatattctgggtcattttttaagcagtatatctggaagttcaagtgtaataggaagtagaattagatttggtctaaata

SEQ ID NO: 596500 - DNA, 567 bp, Homo sapiens
tctgtttgtccttctaaagggtaaacaaaattgatagactgccagctagatgaaccaagaaaagagagaagattcaaataagcacaraaatggcaaagatgtcattacagtggataccatagaaatacaaagatccttagagactactgtggacatttttatgtgcacaaactagaaaatttagaggaaatagataaacatctggaagcacacagccttccaagagtgaaccaggaagaaatcaaaatcctgaacagaccaataacgagttataacgttgaatacataataaaatctaccaaccacaaaaagccctgaaccaaaaggattcatagccagattttactagatgttggtagaagagctgataccaatcttactgaaactattccaaaaaaatcaaggtggagagatatcctccctaactcattctttgaaaccagtatcatcccaatatcaaaatctagcaaggacacaacaacaaaaagaaaaacagaaatgcaggccagcatccctgatgaagatagaggcaaaaatcctcaacaaaatactagcagactgaatcta

SEQ ID NO: 596501 - DNA, 630 bp, Homo sapiens
tagtcaccttcacctccttgatctgtctcctcaacttggcaaagtttccatactgtgtttggtgtgaccctttctgcacagtgttctggaaagagcctcctgccagaatggcaggacagttataggacttacctaatttgttttccttctgtctgttgctagtgtctgacaacagtttcttatattctgtccaatttctagttgttactgtaagagggtaaatctgatcccaattactctaccatgttagaagcagaagttatattaatttttatttttagagttgcctcaagaactgctgttctaaaataaactgaaccctatttaatatataatggataatactggacagtgaaatrttttttccttaggaaaatctaaacagctgtgggtctgggttaaaccatattaacagccttgctaatgaaatgtaaaaagtaaaagaagaaacgttaggtgcttccaggacactcatacttgaagtacaggttgaacatcccaaatccaaacatctgaaatctgaaatgctccaaaatatgaaactttttgaatgccagcatgacgctcaaaggaaatgcttattcaagcatttgggatttgggatgctcaactggcacatatataatgcag

SEQ ID NO: 596502 - DNA, 539 bp, Homo sapiens
ctaaacagctgtgggtctgggttaaaccatattaacagccttgctaatgaaatgtaaaaagtaaaagaagaaacgttaggtgcttccaggacactcatacttgaagtacaggttgaacatcccaaatccaracatctgaaatctgaaatgctccaaaatatgaaactttttgaatgccagcatgacgctcaaaggaaatgcttattcaagcatttgggatttgggatgctcaactggcacatatataatgcagatattccaaaatctgaaaaaattagaaatgaaacactttttggttacaagcattttggataaaagatactcaagctatagtagatttcatttttcaattggtaaatactgtttggtgcttattatgcgccaggcagtatgcttagacttcaagatgagtaaatacaacaagcattacctatcttcttggagtttatagtctagtgaagaagaggattaattgtaaaaataaacaattagaactctgatgagtacaatgaaagagaagaacatggtgccatgaaagt

SEQ ID NO: 596503 - DNA, 215 bp, Homo sapiens
tttatcgagtgagtacaaaggcatggcaagagatgtaaggtttggaaggccccaaatgccccaatgacaaaagaaattcctaatgaaatgactaacaatatttgcttccttgtgttaggacataaatgtgcttacgttaatccttatcttctatcaaattatactcagctcactgagggyagaaactgacttctatttcctttggttcctacatc

SEQ ID NO: 596504 - DNA, 492 bp, Homo sapiens
tatgaaggtacatttaccaaggtaagaagacagacatatctaaagagatttttatttaaagcctgatggcttgactcataacttttaaatatttagacctaacatacgtgggcctccacttgcattctttgccctgggtcctgcaaatgttagagagggcctgttcctttactggagctgtcagctctggattccctgtggtctatcctgccctgcttctttataacgtcaacacatctttgatctcctcactccaccttcctcactctacctcagccatctactcctgtgttcataactcaayctttgtcattacaaggaaattttgctgtactatctgcaaaacttacatctcaaacatcctaggctcagaccagccactgactcatatttgtccagcttattccctcaagttacccaaccctgacaattttttgtgctcatcaagacctcccatccatgatccatgaaccctaccacttttccactgtt

SEQ ID NO: 596505 - DNA, 611 bp, Homo sapiens
gaactcctcctaagcatgcacaagcatctgttttccccttcctcctgggcacacatccagaccacacttcccagcctcccttgcagctaggtggagtcatgtgacagagttccagccaatgggacatgagtagataggatgtgtgcacaggagggggattcagaatggcagtgatgataaccacagtgaccttggaagcctgggaccctaacttgcacccacctagaacattttccctggggtattaaggaaaaggaaatctatttaatctgagccattgcattttgttacatcagctgcattcctatatcgcctcactgaaatcactcccctgcatgtagccaggagggcaagcaccaacgtggcacagggttaagagcagggattgtccaaccaagaccacctgggtcatattctggctccacaacatactggctgtgctatctgagcaagttatttctcctctgtgcctctgtttcctcacccrtaaaatggagatgataatggaacctactcctagatccgtttgagacccacaggtctggtaagcaagtactgtagaacaatgagaccctgcctgccacagtgaacgctatatatctgccaccact

SEQ ID NO: 596506 - DNA, 580 bp, Homo sapiens
tatcagtctaccatggtcagcttctgattatctacaactagaaagaacattccacatatttacatatgtgcgtttgtgtgtttgtgtgtgtgtatgattgatttcagaaagcattttgctatttctgatggaatgtaattatctctgatattctgcaaattcaaaatgcttttctgtaacccagatgcagtgttgggccttcttcttccttttcatgcaattctttcttgtcaacctgttagggttccttgttaacctattaaggggctgactcagaaaaagaggaaaatatagtgaattcaggtttcttgtctcttgtcccaggrgagctgtcttggggacacctggtctttggatacctctgaggctgggatggggaaaggagagaagaggaactgtaggcctttcaaactcagcctctgctggagccctgagggatgttcaagaagaggttgcactccaccagagtatctcttcccttgtcatcccagaccacacacaatggattgcactgaagatgtttctttggctaaggtagtcaggtgaatatcaccaagctgttgcagggtgcagaaactga

SEQ ID NO: 596507 - DNA, 580 bp, Homo sapiens
tatcagtctaccatggtcagcttctgattatctacaactagaaagaacattccacatatttacatatgtgcgtttgtgtgtttgtgtgtgtgtatgattgatttcagaaagcattttgctatttctgatggaatgtaattatctctgatattctgcaaattcaaaatgcttttctgtaacccagatgcagtgttgggccttcttcttccttttcatgcaattctttcttgtcaacctgttagggttccttgttaacctattaaggggctgactcagaaaaagaggaaaatatagtgaattcaggtttcttgtctcttgtcccaggggagctgtcttggggacacctggtctttggatacctctgaggctgggatggggaaaggagagaagaggaactgtaggcctttcaaactcagcctctgctggagccctgagggatgttcaagaagaggttgcactccrccagagtatctcttcccttgtcatcccagaccacacacaatggattgcactgaagatgtttctttggctaaggtagtcaggtgaatatcaccaagctgttgcagggtgcagaaactga

SEQ ID NO: 596508 - DNA, 298 bp, Homo sapiens
ttaagcttggtcatagtggaaaaagtgatgccctattctactcaagtctataaaagctcaagctatgggtaagcatgtatgaccccagaggaggggacaggaatggacaccccactccccactctgggtgaacacaggatggagctacacagctacaaatgacaggcctagaccccctccraattcaggagcttattggcacctgcatgggcctctctgccttctggcaaattgccagtgatggcaaggccttggccacacaggtgcagagaccggcactttcacccgctcttcagag

SEQ ID NO: 596509 - DNA, 298 bp, Homo sapiens
ttaagcttggtcatagtggaaaaagtgatgccctattctactcaagtctataaaagctcaagctatgggtaagcatgtatgaccccagaggaggggacaggaatggacaccccactccccactctgggtgaacacaggatggagctacacagctacaaatgacaggcctagaccccctccgwattcaggagcttattggcacctgcatgggcctctctgccttctggcaaattgccagtgatggcaaggccttggccacacaggtgcagagaccggcactttcacccgctcttcagag

SEQ ID NO: 596510 - DNA, 507 bp, Homo sapiens
ttcctaatcttgctagagaggtagacatctggatataagaaatccagagaacatctgtgacaaactattcaaaatgaacataacaaagaaattaagtcactacactgtccaaggtcaatattaaagaaaaaaaaatgttaaaggcagctaaagacagagatcagatcacatacaaagggaaccctatcatgctaacagcagacttctcagtataaaccttaccaaccaagataggctggtggcctattttcagcattctaaaagacaagaaattgtatttcgcagagaaatacaaaagactctcagagactattatgaacacctctgtgcacacaaactagaaaatttagaggaaatggattaatttctggaaacacacaaggccccaagattgaatcaggaagaarttgaaacactggacagatcaatgtgaagttccaaaattgaatcagtcacaaaaaaagccccagaccagatggattcacagttgggtgaattctgccagat

SEQ ID NO: 596511 - DNA, 572 bp, Homo sapiens
ggaattctgttgagactagccaactggagtcacgtcaccctccacatagcctgctgggacaatgtctaagatgacccaaggccagctccccagagggtccccaaactagtcccagagccacttcattcaccctctggtctgtaacctctttaaaatttccatctaagggccgggcatggtcgttcatgcctataatcccagcactttgggaggccaaggtgggtggatggctggagttcaggagttcgagaccagcctggccaacatagtgaaaccctgtctctactaaaaatacaaaaaattagccgggtgtggtggcaggcacctgtaatcccagctactgctgaggcaggagaatcgcttgaacctgggaggcggagggttgktcattcattttgaggctgtaagatgcttccttgtctggcttcagtgtgacgtatttgtgctttctcccgtcctggcctttccagtgcttttgcttaaatgcatgatcccgcggggcacattttggcacctgtgtcctggtgcacgcctccatctgcttctctactggagtccaaagggggaattgt

SEQ ID NO: 596512 - DNA, 627 bp, Homo sapiens
tgctatgattggaaacctcagaggtacaacattgtggttaaaatctgcccttggctttaaaaatatcaggaaaataagcaagggaaattgtgtgaaataagttattgatattttaaaaagcaaatatattggaaayattgaaatatctttaaaatggcacctctataacatacatcctaagttgctaagagaattggctaatgggtttaaagaaactcttaccattatgttcagggcacactggatgcattatttcagaaagttgtcaaaggaggaaaaaaataagaaaaaatcagcacatggggaccctaatttcttcttattctccttcctaaaaaaagacctcccaactacatcaaggctgttgaatggatctctattattctagacatgctaacttgaaactagagagtcagcacttctgttttccactcccctcacttccattattccccaaatcctgggtgatttggcttcccagaattgctcagattttgctccttctcattgtaacagtcatagtccaggctgcatccccagctgatggtgaggagtattaaaatgttaaggattgagcccaggagtatggcctggcacaaagcatatcaccataatattttttttctt

SEQ ID NO: 596513 - DNA, 579 bp, Homo sapiens
ttgctgttgcttacctgaaaatacgcagttgaaatttcatccttttatcttaagcctttactattttaatctaatttgacttaatacaatttaatttaaagttttaattgctagaagcttaaaattaagactgataaaccatttaagaaatttgcaaaatgatactaaggattgaaaaataggaaaatgacatttgaatcattaaatgaaacaagttgaatattatttagtaaaaatttaaagttarataaattggtcattaagaaactgaaatgcaggctgggcacagtggctcacgccggtaatcccagcattttgggaggccaaagtgggcagatctcctgaggtcaggagtttgagaccagcctgaccaacatggagaaaccctgtctctactaaaaatacaaaattagccaggtgtggtggcacatgcctgtaatcccagctactcagttaggatgaagcaggagaatcgcttgaactggggtgcagaggttgcggtgagccaagattgtgccactgcactctagcctgggcaacaacagtgaaactctgtctcaaaaaaaaaaaaaaaaaaga

SEQ ID NO: 596514 - DNA, 579 bp, Homo sapiens
ttgctgttgcttacctgaaaatacgcagttgaaatttcatccttttatcttaagcctttactattttaatctaatttgacttaatacaatttaatttaaagttttaattgctagaagcttaaaattaagactgataaaccatttaagaaatttgcaaaatgatactaaggattgaaaaataggaaaatgacatttgaatcattaaatgaaacaagttgaatattatttagtaaaaatttaaagttagataaattggtcattaagaaactgaaatgcaggctgggcacagtggctcacgccggtaatcccagcattttgggaggccaaagtgggcagatctcctgaggtcaggagtttgagaccagcctgaccaacatggagaaaccctgtctctactaaaaatacaaaattagccaggtgtggtggcacatgcctgtaatcccagctactcagttaggatgaagcaggagaatcgcttgaactggggtgcagaggttgcggtgagccaagattgtgccactgcaytctagcctgggcaacaacagtgaaactctgtctcaaaaaaaaaaaaaaaaaaga

SEQ ID NO: 596515 - DNA, 570 bp, Homo sapiens
agaccaacaaaaatcttatttgttctcatgatgacctcatcagagctttaaaaaatatatatcgggaaagttctaacttccycttaacccacgttctttatctccttccctgttatgtgttatcaccttcttacataccatataaggtgttttaaattttgtttattgtctgtcttcccttattaaaatctaagggtataaattctctgctgtgtctctagcaactagaaccatgcctgacagtaatgctccaaatgaatcaagcataaattctttccctcctttatttctctgctctgtagatgttctaagtgtcactaggctgctggttgggtgatctagcacagcctcagcctcaggtctcagtgggttccagggacaggtggtaggtcccacatttgccaggaatggagatctgatgggtactgattggggatttgagggatgctgtgtgggcaaggaccaagactgagtctgacaaaactcatggtgggatttccatatctgagacaggatggtagtggacactttaaattgggccttttctaattgtaccctgaagtcaactgc

SEQ ID NO: 596516 - DNA, 570 bp, Homo sapiens
agaccaacaaaaatcttatttgttctcatgatgacctcatcagagctttaaaaaatatatatcgggaaagttctaacttccccttaacccacgttctttatctccttccctgttatgtgttatcaccttcttacataccatataaggtgttttaaattttgtttattgtctgtcttcccttattaaaatctaagggtataaattctctgctgtgtctctagcaactagaaccatgcctgacagtaatgctccaaatgaatcaagcataaattctttccctcctttatttctctgctctgtagatgttctaagtgtcactaggctgctggttgggtgatctascacagcctcagcctcaggtctcagtgggttccagggacaggtggtaggtcccacatttgccaggaatggagatctgatgggtactgattggggatttgagggatgctgtgtgggcaaggaccaagactgagtctgacaaaactcatggtgggatttccatatctgagacaggatggtagtggacactttaaattgggccttttctaattgtaccctgaagtcaactgc

SEQ ID NO: 596517 - DNA, 600 bp, Homo sapiens
tgagggatgctgtgtgggcaaggaccaagactgagtctgacaaaactcatggtgggatttccatatctgagacaggatggtagtggacactttaaattgggccttttctaattgtaccctgaagtcaactgcttctgtccttttcaagttgtaccctgaagtcaactgcttagtgtgcctgctagcatcagkgccagcaaacctggtttcatttttttttattaatttcaacttttattttagattcaagggggaaatgtgcagatttgttacatgggtatattgcacaatgctaaggtttggggtatgattgatcctgtcacacaggtactgagcatagtaccaatagttattgaatccttgccccactcccttcctcctcactctagtagtccccagtatctattgctgtcatatttacgtccctgagtacccaatgcttatttagctcacacttgtgggaatttgtgatatttgttgtttttattcctgtgttaatttgcttaggataatggcctccagctatgtctatgttgctgcaaaggacattcagtctttttatggctgtatagtataccatggtgtatgtgtaccacattt

SEQ ID NO: 596518 - DNA, 600 bp, Homo sapiens
tgagggatgctgtgtgggcaaggaccaagactgagtctgacaaaactcatggtgggatttccatatctgagacaggatggtagtggacactttaaattgggccttttctaattgtaccctgaagtcaactgcttctgtccttttcaagttgtaccctgaagtcaactgcttagtgtgcctgctagcatcagggccagcaaacctggtttcatttttttttattaatttcaacttttattttagattcaagggggamatgtgcagatttgttacatgggtatattgcacaatgctaaggtttggggtatgattgatcctgtcacacaggtactgagcatagtaccaatagttattgaatccttgccccactcccttcctcctcactctagtagtccccagtatctattgctgtcatatttacgtccctgagtacccaatgcttatttagctcacacttgtgggaatttgtgatatttgttgtttttattcctgtgttaatttgcttaggataatggcctccagctatgtctatgttgctgcaaaggacattcagtctttttatggctgtatagtataccatggtgtatgtgtaccacattt

SEQ ID NO: 596519 - DNA, 600 bp, Homo sapiens
tgagggatgctgtgtgggcaaggaccaagactgagtctgacaaaactcatggtgggatttccatatctgagacaggatggtagtggacactttaaattgggccttttctaattgtaccctgaagtcaactgcttctgtccttttcaagttgtaccctgaagtcaactgcttagtgtgcctgctagcatcagggccagcaaacctggtttcatttttttttattaatttcaacttttattttagattcaagggggaaatgtgcagatttgttacatgggtatattgcacaatgctaaggtttggggtatgattgatcctgtcacacaggtactgagcatagtaccaatagttattgaatccttgccccactcccttcctcctcactctagtagtccccagtrtctattgctgtcatatttacgtccctgagtacccaatgcttatttagctcacacttgtgggaatttgtgatatttgttgtttttattcctgtgttaatttgcttaggataatggcctccagctatgtctatgttgctgcaaaggacattcagtctttttatggctgtatagtataccatggtgtatgtgtaccacattt

SEQ ID NO: 596520 - DNA, 601 bp, Homo sapiens
tgagaaacatgttttgtaagaaatgcatagagggagaactacatggatatgagatatttaagctggaccctcaaagatgacaacacatcactaagtcttgatgatcttagctcctaaatacgtctctaatctctctgcttttttccatctctgctgctagaccctcatcagagctgacaacatgtccagcctgcactactgcaagaacttctttgtctatggtagtgtggtcaactgaagaagccggcttagttgctccagtcaggtgctcacactaagaaaggatgggtgaaggttataaagtggctgtgaatgagaactcggtctgggctctaccaagcagagaagccatgcagagatgagaaaggtgaaagccatgaaaccatgttaagcagaaaaataaaaattcawaacagaatgggtgtagcattatatagtgttctgtggagtaccatgatccttcttcatgaaacaacttcaaggcagacatctggtggttttttccattgcccccaaggcagagagtaacagaaaggatggcagatgtgcaaagaagaagtaaaaagatggaatcagaagtagaagagaagagaacaaaaag

SEQ ID NO: 596521 - DNA, 678 bp, Homo sapiens
gaagttatagaatgggagaacatattttcagaccaaatacctgacaaagaatttatatatataaaaaaaagttttcaaaagtcaacattaaaataaccaaagaatccaattagaaaatgggtgaaaatcataaagagacagtttaataaacaggatatatagcttgagcccaggagttcaagaccagcctaggcaacatggagacaaaaaattttgtagagacaatgtctatacaaaaaatttaaaaattagcckggcatggtggcgcatgcctgtggtcccagctacttggaaagctgaggcagaggatcgcttgagtccaagaggtcgaggctgcagtgagccatgatcatgccattgcactcgagtctgggatacagagtgagaccctgtctcatagaacaaaaaaaattaaacaataggaatggaatgaaaagaatacgtacatggtaaataagcacacaaaaacgtgttcaacatcgttagtcattagataaatacaaattaagaccataataagatatcactacaccactagtagaaaagctaatttatagtgacagtaccaaatgctggtgaggatgtagaaaaactgtatttcttacacattgctattgggattgtaaaatgggacccccactcttgaaaattagctgtcagtttcttaaaacaaaacaa

SEQ ID NO: 596522 - DNA, 579 bp, Homo sapiens
tatacagaatgaaaaaaatgcagtgatctgcaaaactttttatgaaagaggatatatttgagctaagtataaaaggtagtctaagaattatatggggcaagaaaagaaaaacagataagataggtgaggtggcaacatgataataaaygtaatcagaaatgcaagatacgaataaaagacatagaatacactgatgtgactgaagaggatgaaagagacaaaataaactgtagttaagatttataaagaggttagagctgagaccagctcagtcggggagaccctaacccagcagcactagaggaattaaagacatacacacagaaatatagaggtgtgaagtgggaaatcagcggtctcacagcctttagagctgagagccctgaacagagatttacccacatatttattaacagcaagagagtcattagcgttgtttctatagatattaaattaactaaaagtatcccttatgggaaatgaagggatgggctgaattaaaggaataggttgggctggttaactgcaacgggagcatgttcttaaggcacaggtcactcatgctattgtttgtggctt

SEQ ID NO: 596523 - DNA, 579 bp, Homo sapiens
tatacagaatgaaaaaaatgcagtgatctgcaaaactttttatgaaagaggatatatttgagctaagtataaaaggtagtctaagaattatatggggcaagaaaagaaaaacagataagataggtgaggtggcaacatgataataaatgtaatcagaaatgcaagatacgaataaaagacatagaatacactgatgtgactgaagaggatgaaagagacaaaataaactgtagttaagatttataaagaggttagagctgagaccagctcagtcggggagaccctaacccagcagcactagaggaattaaagacatacacacagaaatatagaggtgtgaagtgggaaatcagcggtctcacagcctttagagctgagagccctgaacagagatttacccacatatttattaacagcaagagagtcattagcgttgtttctatagatattaaattaactaaaagtatcccttatgggaaatgaagggatgggctgaattaaaggaataggttgggctggttaactgcaacrggagcatgttcttaaggcacaggtcactcatgctattgtttgtggctt

SEQ ID NO: 596524 - DNA, 593 bp, Homo sapiens
atataactactttgatatacttcaggggctttaccaacttcaactatgttaaattgagtgggttgaattggccacatggacggccagtgctgtagagagacaattgaaatgtccgctcctgtatctaccaaacctttaaacttccttccctgaatagttatttcacaggtaggacgtttatcagtaattcgatttacccaacaagctgctttgccatgtttatttgtgcttccaaatcctcctattcatttaatttcacttctccccattcccacatacggcacaatcaggagctgtgctatgcactctcctggctctgctctccagggaacagaagtagatataataatttgaatttccccattgtaatctaaatcaatgactcctgtatgtattcstacccattttaaacttaaactagaccttcctagaagtaatcctattgtccccgctggcaagggtccacagactcctgttggggccttttgcgggggttccccaggcagaaggctcacagcttttgtgcagcataaatctactatggcactactggctgtggtgggggacagacattgtacaggggtgagggaatg

SEQ ID NO: 596525 - DNA, 590 bp, Homo sapiens
atgtagctataatatttgcctgttgatctagggggtgtattctaacagggaactgccaagcctctaaacacccccttctcatctagcttgctgaattcctgcctgaatagaagtaagagcagtggcttgaggcctgctttgaacagttactgaggcaactactttttgccagtgttcttctggaaaagaaagatctggagggtcaggccaccctttttcttcaaaataataaggagggggtgcagaaaggtagggawgaacctctccctcctttgccactttagcttaagctggcaaataaaccttctctgtaacctcttctgttacttcattatactctccttcctcctcatcttctgtgtgaaaaagttccaaggtggaacgaaccacagcccacacttgtcccattgttaccctgatgcttctgagctccccttcttactcaccatggggattgctttaagagtattcaggtgtcctccagctagttccacgttctccaaccgctgctccggtgacccttcgacctggatctgagcccccaagatggacgccacttgccgagaccagctctgttggggagaccctaa

SEQ ID NO: 596526 - DNA, 629 bp, Homo sapiens
cagcccactgctgcactgtgggagcccctttctgggctggccataggccggagcctgctctctcagcttgcaggaggtgtgagggaagacgccagtgggaccggggctgcgcccgccttgcgggccagctggagttccgggtgggcatgggcttggcgggccctgcactctgagcagctggccggccctgycggccccgggcaatgaggggcttagcacctgggccagtggctgcggagggtgtactgggtcccccagcagtgccagcccaccggcgctgccctcgatttctcactgggccttagctgcccacggggcagggcttgggacctgcaggctgccatgcctgagcctcccacctcctccatgggctcccgtgaggcccgagcctccccgatgagtgctgccccctgctccatggcacccagtcccatcgaccacccaaaggctgaggagtgtgggcacctgcacgggactggcaggcagctccacctccagtcctggtgagggatccactgggtgaagccagctgggcacctgagtctggtggggacgtggagaacctttatgtctagcccagggattgtaaataccccatcagtacttggtatctagctcagggtttgtga

SEQ ID NO: 596527 - DNA, 629 bp, Homo sapiens
cagcccactgctgcactgtgggagcccctttctgggctggccataggccggagcctgctctctcagcttgcaggaggtgtgagggaagacgccagtgggaccggggctgcgcccgccttgcgggccagctggagttccgggtgggcatgggcttggcgggccctgcactctgagcagctggccggccctgccggccccgggcaatgaggggcttagcacctgggccagtggctgcggagggtgtactgggtcccccagcagtgccagcccaccggcgctgccctcgatttctcactgggccttagctgcccacggggcagggcttgggacctgcaggctgccatgcctgagcctcccacctcctccatgggctcccgtgaggcccgagcctccccgatgagygctgccccctgctccatggcacccagtcccatcgaccacccaaaggctgaggagtgtgggcacctgcacgggactggcaggcagctccacctccagtcctggtgagggatccactgggtgaagccagctgggcacctgagtctggtggggacgtggagaacctttatgtctagcccagggattgtaaataccccatcagtacttggtatctagctcagggtttgtga

SEQ ID NO: 596528 - DNA, 603 bp, Homo sapiens
gctgaggccatggcacaagaacataaatttgaagatttcatggacatttattagttccccaaattaatatttttataatttcttacgcctgtctttactgcaatctctgaacataaattgtgaagatttcatggacacttatcacttccccaatcaatactcttgtgatttcctatgcctgtctttactttaatctcttaatcccatcttcttcataaactgaggatgaatgtcacctcaggaccctgtgatgattgcgttaactgcagaaattgtttaaacaatatgaaatctgggcactgtgaaaaaagaacaggataacagcgttgttcagggaacaagggagataaccttaaaggctggctgcctgtgggccaggcagaacagagccacatttctcttccttcaaaagcaaataggagaaatatcgctgaattccttttctcagcaaggaacatccctgagaaagagaatgtgttcctaaggggaggcctctgaaatggccgctttgggaaygtctgtcttttacgcttacagataagggatgaaataagccccggtcccccgtagcgcttccaggctaattaggatgaggaaattgcc

SEQ ID NO: 596529 - DNA, 551 bp, Homo sapiens
agaatgataggactttctgtaatataaatatcctattaactaatccctgtactgttaagttgcagggctttgaccactgggtctgaaaaaaggcactgatccctgctaaatcttgagtattgacacaaaagcagaaatgaaataaaataacaactattcaatccctctaggcccagggactatcacagaagaggtgggcacatgagaccrcaagagctgaatttgagggataagattagctcagagtgtttctataaactaaacattaatatcaaaagcacactaatgcaaggccagcaactggacctctatgtctaaataacatggttttcttggagcattaatctgctctttagtagaaaactgtaaaaagttacaaaaagttcatggaaatcttaccttgtgatcaaactgattaaagttagatagatttgtttataaagttttattaaaattagttttgacattaataatacaacatacaaaggtaaaatttggttttctcttttgaacaaaattttcatgtaagagataataagagatttctattt

SEQ ID NO: 596530 - DNA, 591 bp, Homo sapiens
ctgaaactcactatatggtgcttttggacaatggggtgtcagacccctcacttataatgattgcttaaccaaccatctgcttcctgtcgaccaactcctcttccttacccctccctaattcctgtcttcccacacagggttacatttctttcctgctatataaacccataattttagtccatcagggagatggatttgaggctaatctttcatctccttggaagcagcacctgattaaagccttctcctctggcaatactcattgtctcagtgaatggctttctgtgcagtgagcagcaagacctacactgaatctttggtgtttcagtaacaaattccggttccctgaccaggaacayattgctggtggcttggttgctgtgggtcaggaatttcaaaagaccttctaagtagccgcttgaccctttttttttttttttttttttttggctggacatgggtctgtttccctctctggtcctgctgctgctggccccagctgctttcctgaatgcctagaaagaacaatctttaaatttgatatctgcattgggacaggtgaaatttcctttgtaggcccagatagcatga

SEQ ID NO: 596531 - DNA, 553 bp, Homo sapiens
agattgtaccactgcactacagcctgggtgatagaaccagaccttgtctcaaaagaaaaaaaaaaaagcaaaatcaaatactataaatatctctctctccagctatggccctatattattgcttcatgccacagccatacttcttaagagtttactttcttggccaggcayggtggctcactcctgtaatcccagcactttgggaggccaaggtgggtggatcacctgaggtcaggagttcaagacctgcttggccaacatggtgaaaccctgtccctactgaaaacacaaaaattagccagacgtgatggcaggtgcctgtgatcctagctacttgggaggctgagacaggagaataacttgaacctgggaggcagaggttgcagtgagcctggatcacaccattgcactccagactgggtgactgagtaaaactctgtctcaaaaaaaaagtgtttactttttcaaagaattgcctagttgcccatatctgctattctatttactcatcctctattattccttatttacaatattacttctgcctctatta

SEQ ID NO: 596532 - DNA, 616 bp, Homo sapiens
gttcatagcattaatgcctatatcaaaaagtctgaaagagcacaaatagacaatctaaggtcatacctcaaggaactatagaaacaagaacaaacaaaactcacagccagcagaagaaaagaaataacaaagatcagagcagaactaaatgaaattgaaaaaaaaaacaaaaaacaaaaacagaaaacataaatggaacaaaaagctgtttctttgaaaagataaaattcatagaccattagtgagattaaccaagaaaagaatagagaagatacaaataagctcaattagaaatgaaacaagaaatattacaactgatactacagaaatacaaaagatcattcaaggctactatgaacacctttacacgcacaaactagaaaacctagaggagacggataaattcctggaaaaatacaaccttcmtagattaaaccaggaagaaatagaatctgaactgcccgataataagcagtgatactaaaatggtaataaaaaattggcaacaaaagatgtccaggaccagatggattcacagctgaattctatcagacattaaataaagaattgataccaattctatggaaattattctaaaagatagaggaagagagaa

SEQ ID NO: 596533 - DNA, 527 bp, Homo sapiens
tctgtcctaattttatttccagaaacatgcaactggtagagttttcaaaaacattttctttgtctactttcgttttaaaattttttaatttatgcagcacactttaaaagatagaaaataatataatgtgtatmtatatgtatgtgtgtgtatatatatatatacactaaaatggatgttaacattttgtctttactttagaccttacctttctaaaagaataagaagaagatgatacatattcctctaaagtcccaacaggaaccttttcccctcactccctccccagagatgtgtatcatttccatgagtgtctgtacttttacaacatgtgcatattaataaacaaaatatgacaaattattttgtcttaatatttgcataaatctagccatactctacaccacttttgcaactttcactattatatattttgaagattatccgtgtttatgcacataagtttatcattttaactgttgaatagtgtttcattatatgaattaaccataattcatctatttccc

SEQ ID NO: 596534 - DNA, 553 bp, Homo sapiens
aaaatatttgcaaactatgcttctgacaaagaactaatatccagaatctccaaggaattcatacaactcaacaagaagaaaacaaacaactccattaaaaagtgggcaaaaggcatgaacaggcatttctcaaaagaagacatacatgcagccaacaatcatatgaaaatgtactcaacaccactaatcatcagagaaatgcaaatcaaaaccacaatgagataccatctcacagcagtcagaayggctactattaaaagtaaaaaaaaaaaaaaaattgttggagacgatgcagggaaaagagaatatttatatgctcctggtgggaatgcaaataaatacaacctctatgaaaaaacagtaaggagatttcttaaagagctaaaaaaaaaaaactacaattcaatccaacaatcctactactaagtatctactcaaaggaaaagaaattgtcatatcaaacagatacctgcactcatatttattgcataactattcacaatagtaaagttatagaatcaacctaagtgtccattaatggatgattggataa

SEQ ID NO: 596535 - DNA, 540 bp, Homo sapiens
ttgaaaagattagcttcatatatgttttaactcagtattcaacatgctgggtttacatttcaaaaaattttaatgaacaataaatacatttataaagttaataattcaattcatcatgatttcctgaagacttttttttttkatttcctgaagacttttaaagatgctattgaatctttaacaattaagtgagtaccaagggaagagaacatatgtttcttttagctctcatttattaatatggcccatttaggacctgacatagtataaagttcagcttacatatacctatcagttaataaaaatctgcaatgggaaaactatttaactatttaactaaatcaagagcatagaattatcttagacagataacagaatttaatgtaaatcccgaatttctgtgtgttatcttgaatttcattttgaattgaagaaagcttaaatgtgaaaaaataagaatgccgttttttaaatcttttatgaaaatattcaatctgcaaatacaattttgccatattctacctatgtacataaataaca

SEQ ID NO: 596536 - DNA, 575 bp, Homo sapiens
taagcttgactacactggatatacaggcatatcttggagatattgtgggtttggttccagaccacccctataataaaaatatctcaataaagtgagtcacacaaaattcttagtttactaatgcatatagaagtcatggtggaaaggggcagagtaaaatggtggaatagaagtcatcgctgatagtcgcccctacaggaacactaaatttgacaactatctacatcaaaaacaccttcataagaattacaaatcaggtgagtactcacagtacctggctttaatttcatattgctgaaagaggcaatgaatagagtaggaggccatcttgaaatgctgaagccacctgtcccgcctctttcctcacacactcttttccacagtggccccatggtgcagagaaatctgtgccctttggcagagggttagctcagcgattgtgagactttgcattgaacttcgtgctgccctgtcagagcagaaagcaaaaccsggctgaacttcgctgatgcccgcccaccaagggagcattcagaccagcctgagccatagtggaattgcccaacccagaagtt

SEQ ID NO: 596537 - DNA, 575 bp, Homo sapiens
gaaaccacctccttgaaggaaaggacccagtcttggcagtatccatcacctgctgactaaagagccatttggccctgaataaccagcagtgatacacaggtagcacgccatgggtcttggtgagattccgagacatttgggcatcaggtgagacccagcacattcacaactatggtggctatggtaatgaagtggcatcattgtctggagtaagtacctagggtttgtcatcttgtgctgagaagattaacgacacggacacacacacacagtgtgttagggagcagaaagcttaatagggagaagaaaggagagaggagagcaggtctctctcttttgggagagaggcatctgaaaagagaagagctgtgactgcagcagattttataggcaggcttggggaggtggcgtctgatttatgtagggctcacagattggttcaaccaggtgtgatgtttacatagcacaagggaaaggctagtcrtcccatcctaatcttattatgcaaatggactatttggctggcaccatctggtctgttcctacaagtgactggcaaagggaagggaagatgg

SEQ ID NO: 596538 - DNA, 575 bp, Homo sapiens
gaaaccacctccttgaaggaaaggacccagtcttggcagtatccatcacctgctgactaaagagccatttggccctgaataaccagcagtgatacacaggtagcacgccatgggtcttggtgagattccgagacatttgggcatcaggtgagacccagcacattcacaactatggtggctatggtaatgaagtggcatcattgtctggagtaagtacctagggtttgtcatcttgtgctgagaagattaacgacacggacacacacacacagtgtgttagggagcagaaagcttaatagggagaagaaaggagagaggagagcaggtctctctcttttgggagagaggcatctgaaaagagaagagctgtgactgcagcagattttataggcaggcttggggaggtggcgtctgatttatgtagggctcacagattggttcaaccaggtgtgatgtttacatagcacaagggaaaggctagtcatcccatcctaatcttattatgcaaatggactatttggctgrcaccatctggtctgttcctacaagtgactggcaaagggaagggaagatgg

SEQ ID NO: 596539 - DNA, 503 bp, Homo sapiens
gttgttggccttaaatcagaagtagagaaagagatagagtaggaagcrtacccaatgggataataaaagagaatttcccaaatctaaagaaagatatcaatagccaagtacaagaagattatagaacacaacgcagatttaacccaaagaaacatgtctcaaggcatttaataaactcccaaaggttgaggataaagaaaggatcctaaaaacaacaagagaaaacaaacaaataacatatactggagctctaataagtctggcagcagacttttaaggggaaacttcacaggccatgagagagtagaatgccataaagtgctgaaagaaaaacatttttaccctagcatagtatatccagtgaaaatatccttcaaacatgaaggagaaatagagactttcccagacacaaaaaagctgagggatttcatcaacaccagacctgtcctacaagaaatgctaaagggagtacttcaatcagaaataaaaagacactaaggaaa

SEQ ID NO: 596540 - DNA, 503 bp, Homo sapiens
gttgttggccttaaatcagaagtagagaaagagatagagtaggaagcatacccaatgggataataaaagagaatttcccaaatctaaagaaagatatcaatagccaagtacragaagattatagaacacaacgcagatttaacccaaagaaacatgtctcaaggcatttaataaactcccaaaggttgaggataaagaaaggatcctaaaaacaacaagagaaaacaaacaaataacatatactggagctctaataagtctggcagcagacttttaaggggaaacttcacaggccatgagagagtagaatgccataaagtgctgaaagaaaaacatttttaccctagcatagtatatccagtgaaaatatccttcaaacatgaaggagaaatagagactttcccagacacaaaaaagctgagggatttcatcaacaccagacctgtcctacaagaaatgctaaagggagtacttcaatcagaaataaaaagacactaaggaaa

SEQ ID NO: 596541 - DNA, 503 bp, Homo sapiens
gttgttggccttaaatcagaagtagagaaagagatagagtaggaagcatacccaatgggataataaaagagaatttcccaaatctaaagaaagatatcaatagccaagtacaagaagattatagaacacaacgcagatttaacccaaagaaacatgtctcaaggcatttaataaactcccaaaggttgaggataaagaaaggatcctaaaaacaacaagagaaaacaaacaaataacatatactggagctctaataagtctggcagcagacttttmaggggaaacttcacaggccatgagagagtagaatgccataaagtgctgaaagaaaaacatttttaccctagcatagtatatccagtgaaaatatccttcaaacatgaaggagaaatagagactttcccagacacaaaaaagctgagggatttcatcaacaccagacctgtcctacaagaaatgctaaagggagtacttcaatcagaaataaaaagacactaaggaaa

SEQ ID NO: 596542 - DNA, 394 bp, Homo sapiens
ctttcccagacacaaaaaagctgagggatttcatcaacaccagacctgtcctacaagaaatgctaaagggagtacttcaatcagaaataaaaagacactaaggaaaaacaagacatcatctgaaggtacaaaactcactgtcaatagtaagtacacagaaaaacacagaatattataacactgtaactgtagtgtgcaaactactgttatcttaagtagaaagactcaaagatgaaccaaacaaaaataatagctacaacaacttttcaagacatagacagtacaataagataaartagaaacaataaaaagttaaaaagtggggaaacaaagttagagtgtagattttttaaattaattttctttttccttgtttgcttatataagcagcatt

SEQ ID NO: 596543 - DNA, 584 bp, Homo sapiens
tttcgcaaccgacttggaacttgaagaggaaaagggataatttgtgtccccaaatcccagcaatactcaatgaacaattatctgataaatggaatgatgactggttgagtgactaagtgagccaaagtgcttcccaatgatatggaagttaatctgtagaggtgtgatgagtgtttataccaacccaaagaataatgtttgagacatgtataggacaataaaggcatttctgttccagtgaggaaaaagccagaatcaggctttgagtatacttgggagggttgaattcaggatattgatgagtctcttttaggggacagtggactgctgggtggcactttargagaaactctataattcaataagaaaagaggattttgagcaccctgacatctctaggtatagcctcagccacatacttatcagccctcttggctccacagtaaatctgaatcttgttttataataacgctggtaaatgtttattttggttttaaaaatttaggagataaattcagtcttgggtttattccataaaataaacatgctgttagcagaggctaaactaggatggattctcgatt

SEQ ID NO: 596544 - DNA, 577 bp, Homo sapiens
aatctcccaagtaactagcagagatcttggagcataataggtactaaataacctcataagcaaatgaatgaatgaatgaatgatactactactgttactgctactagtagctgaaggagaaactcaaggaaacacagaattttactttaggagacaggactccagtgtcagatgtacctgattttgaatcctagctcccctatttactaactgggtggactaattttttgcctttcgagacctgggtttttatatctttgagaaggaaataatactgttacctaactctagctttatgcaaggtttaagataataaatatagatgctcagtgcactgcctaaagcttagtaggcacttattaagtacttaccattttataaatattactatttcctatagtttctcttttgtcatttatagtagaagcagacgaaaaaagtggcaatatgtcttctcaatgtaaatttaataatagtgstttacatttgttgacaaaagaataaaagggctccccaaaccttcttttgaaatgttaattagtcctgacatattaataattttcacaatttgaaattc

SEQ ID NO: 596545 - DNA, 575 bp, Homo sapiens
cccagaactagtgaataggttgccttatatggcaaacaaaaattaagattgcagatagaattaaggttgctgattagctgactttaatatagggagattmtctcttgatgggcccagtataatcacaaaggtccttaaaagtggaagaataaggtagaagagtcggagtgattcaatgtgagaaggactcaatccttcctgactggctttgaagatggaagagggctcctgagctagagaaagcaagaagcttctaaatactgggaaatgccagaaaacagattctcccttacagcctccaaaaggaaggcagactctgagactaccttgattttagcccagtgagacacatgccaacattttaacctataaaactacaagaaaattaggttgtgttgctttaagctattaagttcatggtaatttgttataacagcagtaataaccaatacattgcctcaaaattaacatgggcaaaatcaaatttttaatcattttccttaaatttgctccttctctgggctttcacactcaagaaacagcctggcatccttacagctgctgaaatcatacat

SEQ ID NO: 596546 - DNA, 575 bp, Homo sapiens
cccagaactagtgaataggttgccttatatggcaaacaaaaattaagattgcagatagaattaaggttgctgattagctgactttaatatagggagattctctcttgatgggcccagtataatcacaaaggtccttaaaagtggaagaataaggtagaagagtsggagtgattcaatgtgagaaggactcaatccttcctgactggctttgaagatggaagagggctcctgagctagagaaagcaagaagcttctaaatactgggaaatgccagaaaacagattctcccttacagcctccaaaaggaaggcagactctgagactaccttgattttagcccagtgagacacatgccaacattttaacctataaaactacaagaaaattaggttgtgttgctttaagctattaagttcatggtaatttgttataacagcagtaataaccaatacattgcctcaaaattaacatgggcaaaatcaaatttttaatcattttccttaaatttgctccttctctgggctttcacactcaagaaacagcctggcatccttacagctgctgaaatcatacat

SEQ ID NO: 596547 - DNA, 575 bp, Homo sapiens
cccagaactagtgaataggttgccttatatggcaaacaaaaattaagattgcagatagaattaaggttgctgattagctgactttaatatagggagattctctcttgatgggcccagtataatcacaaaggtccttaaaagtggaagaataaggtagaagagtcggagtgattcartgtgagaaggactcaatccttcctgactggctttgaagatggaagagggctcctgagctagagaaagcaagaagcttctaaatactgggaaatgccagaaaacagattctcccttacagcctccaaaaggaaggcagactctgagactaccttgattttagcccagtgagacacatgccaacattttaacctataaaactacaagaaaattaggttgtgttgctttaagctattaagttcatggtaatttgttataacagcagtaataaccaatacattgcctcaaaattaacatgggcaaaatcaaatttttaatcattttccttaaatttgctccttctctgggctttcacactcaagaaacagcctggcatccttacagctgctgaaatcatacat

SEQ ID NO: 596548 - DNA, 575 bp, Homo sapiens
cccagaactagtgaataggttgccttatatggcaaacaaaaattaagattgcagatagaattaaggttgctgattagctgactttaatatagggagattctctcttgatgggcccagtataatcacaaaggtccttaaaagtggaagaataaggtagaagagtcggagtgattcaatgtgagaaggactcaatccttcctgactggctttgaagatggaagagggctcctgagctagagaaagcaagaagcttctaaatactgggaaatgccagaaaacagattctcccttacagcctccaaaaggaaggcaractctgagactaccttgattttagcccagtgagacacatgccaacattttaacctataaaactacaagaaaattaggttgtgttgctttaagctattaagttcatggtaatttgttataacagcagtaataaccaatacattgcctcaaaattaacatgggcaaaatcaaatttttaatcattttccttaaatttgctccttctctgggctttcacactcaagaaacagcctggcatccttacagctgctgaaatcatacat

SEQ ID NO: 596549 - DNA, 616 bp, Homo sapiens
ttaaacctggcaaacatagatactaaagatcaaaccatagagtaattgcatgtttgaatacaggtgtaaagatcatataaataaatattaacaaattttagcagtatatttcaggtatgttacaaaataatgaagtgtgattcaaacctgaaatgtaaggatgattcagaagtataaaatctattaacatgggaggggaaaatatgatcttaattaatggtggaggcatttgacaaaattaaatttccatcattagtaatggagaaaaatattcaatagttcctaattatttttctttcaaaattttctgacacacatattaatttttattctaaaaagcaggttaggwatagagacagtgctagttcaaaaattgatttaatgtaataaaaatattttaacaaatttaacaaacaatatttaactagcactattacaaaagtctagaaataaactgtttatcttcatagaagaacctaaattttctagatatcttaaattcagcagacaaaattcactttaaatcattagtaaatattatgatcggtatgtagaaattaggttatagtaaattttactcaaattatattaaaacgtctaggattaaaatgccaag

SEQ ID NO: 596550 - DNA, 616 bp, Homo sapiens
ttaaacctggcaaacatagatactaaagatcaaaccatagagtaattgcatgtttgaatacaggtgtaaagatcatataaataaatattaacaaattttagcagtatatttcaggtatgttacaaaataatgaagtgtgattcaaacctgaaatgtaaggatgattcagaagtataaaatctattaacatgggaggggaaaatatgatcttaattaatggtggaggcatttgacaaaattaaatttccatcattagtaatggagaaaaatattcaatagttcctaattatttttctttcaaaattttctgacacacatattaatttttattctaaaaagcaggttaggaatagagacagtgctagttcaaaaattgatttaatgtaataaaaatattttaacaaatttaayaaacaatatttaactagcactattacaaaagtctagaaataaactgtttatcttcatagaagaacctaaattttctagatatcttaaattcagcagacaaaattcactttaaatcattagtaaatattatgatcggtatgtagaaattaggttatagtaaattttactcaaattatattaaaacgtctaggattaaaatgccaag

SEQ ID NO: 596551 - DNA, 616 bp, Homo sapiens
ttaaacctggcaaacatagatactaaagatcaaaccatagagtaattgcatgtttgaatacaggtgtaaagatcatataaataaatattaacaaattttagcagtatatttcaggtatgttacaaaataatgaagtgtgattcaaacctgaaatgtaaggatgattcagaagtataaaatctattaacatgggaggggaaaatatgatcttaattaatggtggaggcatttgacaaaattaaatttccatcattagtaatggagaaaaatattcaatagttcctaattatttttctttcaaaattttctgacacacatattaatttttattctaaaaagcaggttaggaatagagacagtgctagttcaaaaattgatttaatgtaataaaaatattttaacaaatttaacaaacaatatttaactagcactattacaaaaktctagaaataaactgtttatcttcatagaagaacctaaattttctagatatcttaaattcagcagacaaaattcactttaaatcattagtaaatattatgatcggtatgtagaaattaggttatagtaaattttactcaaattatattaaaacgtctaggattaaaatgccaag

SEQ ID NO: 596552 - DNA, 542 bp, Homo sapiens
agaaataaactgtttatcttcatagaagaacctaaattttctagatatcttaaattcagcagacaaaattcactttaaatcattagtaaatattatgatcggtatgtagaaattaggttatagtaaattttactcaaattatattaaaacgtctaggattaaaatgccaagccccaggtgagttcacatgactggtctaaggtagaattkccaaactttttgttcccaggacccctttaccctcttggaattactgaggattccaactattttttggttatctgggtcatatctattaatatttactatgttagcagttaaaataactatttttaaaatagtaagaataaacatcattttcttttagaaggaaatctttgccatatcacccaagctgatcttcaacgaactggactcaagtattcctcccacctcggcctccagggtaggtggtctacagatgtgtgtgctactgtgcctgactaattttctttatgcttattttttaaagaagggctttcactatgttgctcacattggtc

SEQ ID NO: 596553 - DNA, 590 bp, Homo sapiens
aaaccatttttctttattaccttatggggcatgtaagaagacataagcctaatagtgtctcatttagggaatgaaatgaataatttattttaaggctctggtgttaaagatttatataactattcataaatgagtaaaaggaggttatgaatcaatcatcagattatttttctattattacccatgtaaaaaattactgtgtcctcgttttataccaatgttcaatttataaagacagttttaagtttttgtctagctttctcttttttgcaagttgaatatggaataaaggatggagaaggcagacagaagaaggtgaagatggaagttgtgattaaaataaataattmatcaatttcttttaatatttgtcttctaaccagaggatataagcatttcatccagtcagaaaattcatttattgcacatagaattcgaggactactctgagtttcatacctataaattttggagctatcaaattataattcaattcattaaagcagacccaagactttggaaaagaacattatattaaaatgttcccttgggcatttcaattaatgtgtttatgtgaatataaaatacat

SEQ ID NO: 596554 - DNA, 600 bp, Homo sapiens
aaataattaatcaatttcttttaatatttgtcttctaaccagaggatataagcatttcatccagtcagaaaattcatttattgcacatagaattcgaggactactctgagtttcatacctataaattttggagctatcaaattataattcaattcattaaagcagacccaagactttggaaaagaacattatattaaaatgttcccttgggcatttcaattaatgtgtttatgtgaatataaaatacatacacttggtataatatgaaaaatgtagtctaaagtttctctcctacccgtctctttttcccaagacttttactagatacttttccagagatggacgacagtatatgtgtattactgcttttattacaaatgatagtctcctatgctactgaaagcatcatgctttttcttaayttcatataatttttcttaatttcatataattacaattcagtacatatagagtatatcattctttttgaccagcttcatgtactcgactagtcattttttattagacatctatattgtttttcttttgctattataaataagctgcaatgaatacctttgtacatgtcctttgtatatg

SEQ ID NO: 596555 - DNA, 600 bp, Homo sapiens
aaataattaatcaatttcttttaatatttgtcttctaaccagaggatataagcatttcatccagtcagaaaattcatttattgcacatagaattcgaggactactctgagtttcatacctataaattttggagctatcaaattataattcaattcattaaagcagacccaagactttggaaaagaacattatattaaaatgttcccttgggcatttcaattaatgtgtttatgtgaatataaaatacatacacttggtataatatgaaaaatgtagtctaaagtttctctcctacccgtctctttttcccaagacttttactagatacttttccagagatggacgacagtatatgtgtattactgcttttattacaaatgatagtctcctatgctactgaaagcatcatgctttttcttaatwtcatataatttttcttaatttcatataattacaattcagtacatatagagtatatcattctttttgaccagcttcatgtactcgactagtcattttttattagacatctatattgtttttcttttgctattataaataagctgcaatgaatacctttgtacatgtcctttgtatatg

SEQ ID NO: 596556 - DNA, 305 bp, Homo sapiens
atggttaaatttgtaatcacttattataccaaaatatatttcagatggatcagagatttaaataagaaaaataaaactaggacttaataaatgtgtaaagaaaaatctaagaattaaccaatctaagaattataccaaatcctgaccacaaaacgtagataattgctatttattgtaataktgaaattatctatattaaaatttaaaattatctataagaaaaataataataaaaataaataacaaacaacatgtatttaccataagtactacacacagagggctagtgtctttaatgcataaag

SEQ ID NO: 596557 - DNA, 613 bp, Homo sapiens
ctaggtgcaatccaacctgaatttttgcctctacttgggtgattaatcatatggtgaatctggcctcactggctctaataatagggcttgcctttggctctttgtggaccagggaaataagagcatctttcccgagtgtcagaatactccccttttgttaatggtgccagcaggtctacmccactggcagttaaagctaatatgagcctttcattctcaaattgcacacaagaatttttttttaagtactacagttttgaaagaaagagtaacatatacggcaacaggaaaaaaattactaaaaaagattttaaattggataaaattaagtgcaagtctttgatttacctgaatctgttttaattatttcttcatgatgcttggaagaatacaatgaccaccaaagcaatagatgcctattcttttctgatattctttcctgatacgatatgtgcttactgtatgcttttaaaaaaagtaattcaaatatcataatacttttcacaacaccattcagttgttttcagtatattcacaaaactgtatagccattaccactctctaattccaagccattttcatctcctcgatgtcacactccatacccattagc

SEQ ID NO: 596558 - DNA, 509 bp, Homo sapiens
gtggtagagagggatccttaccataatctgatttatcgcttggttattacgatcattttgttctattctccaccctggactaatgaaagactattaccatagagccatgacaagttttattctcttgaactgtctagctttgttactttcccttgctaatagtcacttactgagtcagagatgctgcagacattgcaaatagaatgattcctcatatgtcactagggatacagttttctgagatacagatctagcaagggcatgagaaagagaagaaagcaaaaaagaaatcatctctgctaattcaattgtgggtttccttggatcaaagactacctattayagcataccaagttcaagactattcataggatgctggaggccctctcctcatgatttatattaagcactatacatggtacacatgtggcctctatggaagtatacttaaatgattcttttttatcactggcagactaaggaatagcatacaaggaggtctcgttcta

SEQ ID NO: 596559 - DNA, 552 bp, Homo sapiens
tggtaattcttacaatatttaaaaattttcactatgattatatctgtgatggtggtctgtgatcagtgatctttgatgttcctattgtaattgttttagggcaccaccaactgcattcatataggacggtgcacttaattggtaaatactgtgtgtattctaactgctccaccaatcaggtgttgcctcatctttctcctgctccttggactctcaattccctcagacacaacagtgttgaaattagaccaattaatatccctacaatggcctctaagtgttgaagtgaaagaaagagttkcatgtttctcactttaaataaaaagctagatatgattaagcttagtgagtgtattagtctgttctcatgttgctaatagagacatacctgagactgggtaatttataaagaaaagaggtttaatggactcaccactccacatgattggggagacctcacagtgatggtgaaagacgaaggaagagcaaagagacatcttacatggtgtcaggcagagagagcttgtgtaggggaactcccttttataaaac

SEQ ID NO: 596560 - DNA, 552 bp, Homo sapiens
tggtaattcttacaatatttaaaaattttcactatgattatatctgtgatggtggtctgtgatcagtgatctttgatgttcctattgtaattgttttagggcaccaccaactgcattcatataggacggtgcacttaattggtaaatactgtgtgtattctaactgctccaccaatcaggtgttgcctcatctttctcctgctccttggactctcaattccctcagacacaacagtgttgaaattagaccaattaatatccctacaatggcctctaagtgttgaagtgaaagaaagagtttcatgtttctcactttaaataaaaagctagatatgattaagcttagtgagtgtattagtctgttctcatgttgctaatagagacatacctgagactgggtaatttataaagaaaagaggtttaatggactcaccactccacatgattggggagrcctcacagtgatggtgaaagacgaaggaagagcaaagagacatcttacatggtgtcaggcagagagagcttgtgtaggggaactcccttttataaaac

SEQ ID NO: 596561 - DNA, 531 bp, Homo sapiens
gcatgggaaagacccgcccccatgattcmattacttcccactggttccctctcacagtgtgtggtaattatggaaattataatttaagatgagatttgggtggggacacagataaactatatcagtgaggaaagcatgttgaaagctgagagaggtcaaaagctaggcttcttgtaccaaactgttagacaacttgtgaatacagaggaaaacttcttgcaggaaattaaaagtactactccagtgaacacaagaataataagaaagtaaaatggccttattgctgatgtgcagaaagtctgggtattctggataggagaccaaatcacccacaatattctctcaaaccaaagccaaattcagagcaaggccccaactcacttcaattctatgaaggctgtgagaggatgaggaagccacagaagaaaaatgcgaattgagtagaggtgggtccatgaggtttaaggagaaaagccatctccattgcataaaagtacagggtgaaacagcaagtgctgatgtaaaagctgc

SEQ ID NO: 596562 - DNA, 578 bp, Homo sapiens
attggaggaagtaaccatagatgtggtagaaatagtgaaagaaatagaatcagaagtgaaacctgatgtgactgaattgctacaacctcatgttcaaatgaaaagatgaggaggtggcagttcttatggataagcaaagaaagtagattttcaggacagaatctactgctggtgaaggtgctatgaacattgttgaaatgacaacaaaggatttagcaatattacataaacttagtagataaagcagtggcatggcttgagaggattgatttcaattttgaaataagtcctactgttgttaaaatgctactaaatagcattgcatactacagagaaatctttgggaaaggaagagtctatcaatgaagtatgtttcattgttgccttgtttaagaaattgccacagctaacataaccagcaactatcaccctgactagtcaatagccatcaatattgagacaagattctccaccagcaaaaaaaattgaagactcattgaaggctcagakggctgctaacatttttttagcaataaagttttttaaaattaaggtatgtatattttatagtataaaca

SEQ ID NO: 596563 - DNA, 599 bp, Homo sapiens
ggatttgtttctgggttctgtattctgtttcactgttctatgtatctgtttttataccagcaccatgctgttttggttactataactctgtagtataatttgaagtcaggtaatgtgattcctctagttttgttctacatagctttggctattctgggtcttttgtgctttcatggaaattttaggttttttaaaaacaattctgtgaataacatcatggtattttgatagggattgcattgaatccatatattgctttgggtagtacagacatttaaacaatattgattcttctaatccgygattatggagtatctctccattttgtgtgtgtgtgtgtcctctttaatttcttgcatcaatgttttataatttttattggagagatctttcacttttttggttaatttctaggtattttatttaatttttagctattataaatgggattacattcttaattcatttttcaggttgcttgtttggcatgtaaaaatgctactgatttttgtatgttgactttgtatcctgcaactttacagaatttgttaaccagttatactgtctttatttgtgtggagtcttcaggtttttccaaa

SEQ ID NO: 596564 - DNA, 582 bp, Homo sapiens
tgcagcatcagttgagattatcatatggttttcatccttcattatgttgataggatgtatcacattgattgatttgtgtatgtcaaaccatccttgcattcctggaataaatcccacttggtcatgatgaatgatcttttaaatgtagtattgaattcagtttgctagtattttggtgaagatttttkcataattattaattggtggtattagcttgtagttttctttttgtatgtgtctttgtctggttttagtatcacggttatactgaccgcatagaatttggaagtattccctcctctttgtttttgaatagtttgaacagaattagtattgattcttctttaaacatttggcttcagcagtggagccatctgtcctgggtttttctttgctgagagactttttactatggcttcaatctcattacttgctattggtctagtcaggtcttgggtttctttatggttcaatgttgagaggttgtgtgcatctaggaatttattcatttcttctaggttttccattttattggcatattgttcctcatactagccactaatattgctttacatttctgca

SEQ ID NO: 596565 - DNA, 582 bp, Homo sapiens
tgcagcatcagttgagattatcatatggttttcatccttcattatgttgataggatgtatcacattgattgatttgtgtatgtcaaaccatccttgcattcctggaataaatcccacttggtcatgatgaatgatcttttaaatgtagtattgaattcagtttgctagtattttggtgaagattttttcataattattaattggtggtattagcttgtagttttctttttgtatgtgtctttgtctggttttagtatcasggttatactgaccgcatagaatttggaagtattccctcctctttgtttttgaatagtttgaacagaattagtattgattcttctttaaacatttggcttcagcagtggagccatctgtcctgggtttttctttgctgagagactttttactatggcttcaatctcattacttgctattggtctagtcaggtcttgggtttctttatggttcaatgttgagaggttgtgtgcatctaggaatttattcatttcttctaggttttccattttattggcatattgttcctcatactagccactaatattgctttacatttctgca

SEQ ID NO: 596566 - DNA, 524 bp, Homo sapiens
cattctccttttcaaactgatatgacacagtatatgactaagagaggcatggtatatatgcttatgagtggattttctatatttttataagggtgcatattacctgaaagtattgatttacactttgaagcagagccacatgtcatcagatttggcatacatcaaatagttggaaaataagcaaatccaaccaatacagggtgaggagaaatctgaagaaatattcagggctgatggcaagttgtatttcaaacatttcaatcatctttgattttggttcctaagtaaggaaccgaatcaagagtccamgtttaacctaggaatctgtggttaataaggaatttcagttaaaatactgcaaaaggagaaacaagtcgattaaattttaagaagtgtaaatacaccaaaggtgagaattattcactggtgtaacttaggaatcaagttgaattacacagatagagagggacctttaaaacatcaggttaaattgagaatattctagagcagaaataaaattgaca

SEQ ID NO: 596567 - DNA, 590 bp, Homo sapiens
tctgggcagaaacttttttttttttttttgagacagagtttcactctgttgcccaggctggagtgcagtagtgcaatctcggctcactacaacctccacctctcaggttcaagtgattctcctgcctcagcctcccaagtagctgggattacaggcgcctgtcaccacgcctgcctaatttttgtatttttagtagagatggggtttcactatgttggccagtctgttttcgaactcctgacctcaggtgatctgcccacctcagcctcccaaagtgctgggattaaaggcatgagtcactgtgcctggtctgagcagaaactttttatgagaagtagctggtgactgttgcaaaatattgttctagaaaagaatgtccactttttcacacaggaatttattgtggtgttaattgsacagtcctttgtttttttcttttacataacctacattccctgtgctataatttaaattaggatttctcaagcatggccccaaatcacttgcatctgtacattagcacttcttgttaaaactgcagatttctgtgccttaactcagagctaaagaatctctgaagtggcacctag

SEQ ID NO: 596568 - DNA, 590 bp, Homo sapiens
tctgggcagaaacttttttttttttttttgagacagagtttcactctgttgcccaggctggagtgcagtagtgcaatctcggctcactacaacctccacctctcaggttcaagtgattctcctgcctcagcctcccaagtagctgggattacaggcgcctgtcaccacgcctgcctaatttttgtatttttagtagagatggggtttcactatgttggccagtctgttttcgaactcctgacctcaggtgatctgcccacctcagcctcccaaagtgctgggattaaaggcatgagtcactgtgcctggtctgagcagaaactttttatgagaagtagctggtgactgttgcaaaatattgttctagaaaagaatgtccactttttcacacaggaatttattgtggtgttaattggacagtcctttgtttttttctttyacataacctacattccctgtgctataatttaaattaggatttctcaagcatggccccaaatcacttgcatctgtacattagcacttcttgttaaaactgcagatttctgtgccttaactcagagctaaagaatctctgaagtggcacctag

SEQ ID NO: 596569 - DNA, 544 bp, Homo sapiens
tttctttggtgaatgaaacacaaatattaactattgcttcttctcccactcacttcataatcatgtaacagccagttatcaaggctacaaaaggtctgagtctgaccttctaacctgctcttggacataagcaagcacagcaggcaatgtatttcaaggcaattacaggcataactcgagtatttataggatacaacattgtaatagaactatctttttggtatttccgaggtaacacwtaaatcctgcaacagtggtggcccatcagtggtgggaaaagaccagttcctcctgagggtggaaaataatcttgtagttcaagttagtgaaggatgggcatttcttcttccattatattcaaagtggaatgagtgtgctgcagcttttttttttttttttttcatgatttcctcatgataatgttgcggttactttagcagggggtggaaaactgataagtgtaattgctgtaatcacaggatgtataggatgtaaatatttgcagggcaattaaaaactatttgcctctttagcttcttaaaat

SEQ ID NO: 596570 - DNA, 371 bp, Homo sapiens
tttacaaagtaggaatgaaaaagtactgtgaaaaattgatagcgtaacaatyagagctataagtatgtatattaaagcttataaaggtaaccagtataagaactaacaaataatttgtaaattctgatatgtgtaaatagatggggaatgggatacagtaggtgagtgaaatccttattttccgtgttggagaactaataggtattgtctaaattagataaaacagtaaatagaagttcaaatacatatagttatgaaagcatcataaaaattatagaatgcatgctatgggcaaagggcataactgttgcttttcactaacttttctgtagtatttgacttgttatcaagtatctgcagtgctttgataa

SEQ ID NO: 596571 - DNA, 371 bp, Homo sapiens
tttacaaagtaggaatgaaaaagtactgtgaaaaattgatagcgtaacaatcagagctataagtatgtatattaaagcttataaaggtaaccagtataagaactaacaaataatttgtaaattctgatatgtgtaaatagatggggaatgggatacagtaggtgagtgaaatccttattttccrtgttggagaactaataggtattgtctaaattagataaaacagtaaatagaagttcaaatacatatagttatgaaagcatcataaaaattatagaatgcatgctatgggcaaagggcataactgttgcttttcactaacttttctgtagtatttgacttgttatcaagtatctgcagtgctttgataa

SEQ ID NO: 596572 - DNA, 612 bp, Homo sapiens
cctgaaggagatagctgagagatcatctgtttcgtcctgctgattttttttaaagcagagagtacttatcaatattactatagttacatattaacatgggcttttaattttctgaagaaactcaaaacaatgcaattgtgcattatgtgaataaatgtcctcatatagatgtatttgtgtggtagcaaagattctataatgtttgtactctgtgatcaaaggagtggcttttaccctctgatcccagtatcattctttatggtttgggaacttggcaattaagaccatagattattttcttggtatccatcagtttgataaatcttagacagctacatgagttctttaaaggaaataataaatctaataaatataccttggtaaccatttcagtctatatttatgccttgaaatctaaagctttcattaagctttctcaagtgttcttgtagagagttagaaygtagcttcaaatgatattttctaagttttatgtgattccttactgagaaagagtcaaactttcttttttcttttactgaatgagattagataacacccactttaggaaacagaatgtttcattcttacgggttttaatttttttttaat

SEQ ID NO: 596573 - DNA, 268 bp, Homo sapiens
tgtgttcattcattcaaaagtatttattatgtacctcagacatgaaagaaacatactattggagtatcaggaaagcatatatagatagcctttaatgtgtatttctatacgtagggtctctactacattaaaattagctagatcatgttttcttaggtactttgctttctttttgaatgccamaactttcatttgaacttttctgtttgctaggctttccttcagttttcataaattaaccctgattctgccctccaaaaccagtgca

SEQ ID NO: 596574 - DNA, 268 bp, Homo sapiens
tgtgttcattcattcaaaagtatttattatgtacctcagacatgaaagaaacatactattggagtatcaggaaagcatatatagatagcctttaatgtgtatttctatacgtagggtctctactacattaaaattagctagatcatgttttcttaggtactttgctttctttttgaatgccacaactttcatktgaacttttctgtttgctaggctttccttcagttttcataaattaaccctgattctgccctccaaaaccagtgca

SEQ ID NO: 596575 - DNA, 582 bp, Homo sapiens
aacaatgaccctatatatttacaaagtataactataattatttattattgataagtcatattatgaataaacaattttaaaatgcataaacctaaaaacataatttttcaaggtagagactgtaacacacatttctgtatttgtgagtgtgtgatatacagatatttttactgtcattagctagtccctatgaatcaaatggtgaaaatatcataagtattagtacacctttaattcagtaagaaaaataaactatattcagttttgaaggttctgttttattagaatcaaactgtccaaacacctcatattttagcatttttgttttttattacacatatcaccttctatgtttattttttcttttaaaaatctttcaatagaatatatatacrtgcctcattttccttctgagagcaaaaagtgtaatcataggtagtaactgcccatcattacttaatgaagaagattgatataatacaaaaccaccataatatggcaaagtttagtaagagatcattgaatttagcttgcttgtggacattgctgtggtagaaaacaataaagtttactaactctact

SEQ ID NO: 596576 - DNA, 542 bp, Homo sapiens
aaagatctggagttgaatggaaagctaacataagaaataattggttttggatttttaaaaaatgtaaccttgctatttctctgcatgttcctactaggtttgggtgtattttaaaaaaggcactagtctgaccaacatggtgaaacccrtctctactaaaaatacaaaaattagctgggcgtgttggcacgcacctgtaattccagttacttgggaggcagaggcaggagaatcgcttgaaccaggaggcagaggttgcagtgagccaagatcgcgccactgcactccagcatgggtgacagagcgagactccgtctcaaacaaaacaaaacaaaacaaaacgaaacaaaacaaaacaaaacggcactgggtaaatgcggaacattggtttaaaaataactaaaaattagactatacattatttaaatcctgacgaagaaaataattaagctactacactctgtcagtggactgaaacccctaataaaaaaagaaacacactttgacttcattcaaccaaaatatacttgtgttttaatcag

SEQ ID NO: 596577 - DNA, 542 bp, Homo sapiens
aaagatctggagttgaatggaaagctaacataagaaataattggttttggatttttaaaaaatgtaaccttgctatttctctgcatgttcctactaggtttgggtgtattttaaaaaaggcactagtctgaccaacatggtgaaacccatctctactaaaaatacaaaaattagctgggcgtgttggcacgcacctgtaattccagttactygggaggcagaggcaggagaatcgcttgaaccaggaggcagaggttgcagtgagccaagatcgcgccactgcactccagcatgggtgacagagcgagactccgtctcaaacaaaacaaaacaaaacaaaacgaaacaaaacaaaacaaaacggcactgggtaaatgcggaacattggtttaaaaataactaaaaattagactatacattatttaaatcctgacgaagaaaataattaagctactacactctgtcagtggactgaaacccctaataaaaaaagaaacacactttgacttcattcaaccaaaatatacttgtgttttaatcag

SEQ ID NO: 596578 - DNA, 593 bp, Homo sapiens
caaaagttcacacttgcaataggagattatatgacatttgcaaatattgttccaaaaggaaactccaaagtgttggaaagcattcattctagttatttagctacacaatgtgaattttttttaatgatggaattataattgtatgcaaatggaatataggtttatggattaccccaaatacatacaatactatagtaggttttatatgttgattagtactcaagaaaatttgccttttagtattcatctrtgataatgattttcttcagttactggctgtatatataacaaggattacaagaagtagaaattaaatatatattccatctaaactataatatatttttatttttaatttcaattggacttagacaacttagtcatttgatttacaaataattctgcatggggaaagtctttagatataatttactacaagagaaagtgaccaaccatgtgattttaaaaattatgcataaatttgtatgttgaaagattaaattttattttaagccacttatgaaagatgtaaaatacaattttgcattctgagatttgtctgtttgcttgctttttgttattttggaatcata

SEQ ID NO: 596579 - DNA, 568 bp, Homo sapiens
acattctcattctctcttgctgctatttcattctcccccaaaatgcagaagagatgtctatttcctctttccttgtggtgggacatgacggcctgtcttacgakggtgttttagctctgggtagacagaacaaagaaaatgtccccagactgaaatgtatgcctttctcagacccattccccaaatctttatccagaattggtttacagatggtagtacctattgcttgtatttgtttaattggtttggggtttttttgtttgtttcttttgcccagtaagctttctcatctccctcctcctggaaacagaacccgctctcctcaccacaaaaacagttcttggcccatcacgagcccttcctttctggcagcgtgattgattcaagggtgagaacagcacaaaacaaagccaatcagggtccttctgtgagatcaatatatggaccctggggaaggggactgtctttcttcaggagtggttaaaactgggaggatgtgatctctgtggtcagctgcttccctagcacagggagagcatccaagaagcacagcagaaacaagcagtga

SEQ ID NO: 596580 - DNA, 621 bp, Homo sapiens
ttgccctcttttagagtattcatttttttggcacacaaaagtctgagttaatttaagacactttattgtcaaaaatgattggagggaactaatgtataccaaattataagacatgggaagatggtcttctggtggaattatgaataactacatgtcagtgtttttataaatgtagcggataacatattcatatgtaaaacaaacagtttagtattcctatattcttaccttgtttctcttcatgtaatttaaacagcagctgagacatacacttaacctcagagaagtgattacccagagaatcaacagaacaaagactaaatatttatttcttgggacatgacaaaagatttgggaggataccctatgcattaagagtgaatatgttttacctttaaaactagatagataaagctaaataaagctttatcaaccgagggatagttgaaaagaagagagaagaagagtaagagagtttagatagcagcctgtcactgaaagaaagggatctatgtsctgcatttcacatagatcagcaacctggaagtgggaagggagaaataaacaaattcatacattgaggatctgagtcttatgcaagcaaggtagcaacatctcaaa

SEQ ID NO: 596581 - DNA, 252 bp, Homo sapiens
tatcttctaccttatcaaagaagtagagaggaacatgaggcagtttaaaattctgaaagatttggggaagcttttatttagtttattttgtgaacatttataagtaagwaaaagagatttcaaaatcagttcagttagtctctaatttaataagggccaatcctagcaagatatttagcagcctctctttgtctatctctttgaatcaccatttcatcctttgtaccagtgtctactttctttgagcacatt

SEQ ID NO: 596582 - DNA, 645 bp, Homo sapiens
ctttgtctatctctttgaatcaccatttcatcctttgtaccagtgtctactttctttgagcacattcgatgtacaatgttgttttttcctttcgtaatctcaagtttttactattaaaatttccaaataaacagaaaaattcaaacacaagtacaaagaacatggtatacatgtcatgtagattgaaaaattaacatactgctatatttattttatatatttctctgtataagtacacrtattttttctgaaatatttgagaattaattgcagtcatgatgctttcacacttaaattcttgaaaataaggacattctgttatataactataatactattaacaagataacaaattaaaaatcccttgctattatctaatattgaatccatattcaaattttgccacttatgccaaggatgtgttttctagatcctttttatccccaaataattcaatttaggttcatacattgtgtgagatgttgcatctctttgggatcttttagagaatagttttctctacacacacatctctatcatgatactcactttttgaaaagtccagaccaattttctcataaaatgtttcatattctgaatttgttttattgcttcctcattgcatagtttaacatgttgcccaat

SEQ ID NO: 596583 - DNA, 645 bp, Homo sapiens
gtgctgggataattggcaagccacatgtaggagaatgaaactggatcctcatctttcaccttatataaaaatcaactcaagatggatcaagaacataaatctaagacctaaaactataaaaactctagaagacaacattgraaaaatccttctagacattggcttaggcaaggatttcatgataaagaacccaaaatcaaatgcaataaaaacaaagatgaatagatggtacttaattaaattaaagagcttttgcatgacaaaaggaacagtcagttgggtaaacagatgacccacagagtgggagaaaatcttcaatctatacatctgacaaaggactaatatccagaatctacaacgaactcaaacaaattaggaagaaaaaaacaaacaaccccatcaaaaagtgggcaaacgacatgaatagacaattctcaaaagaaaatatataaatgaccaacaaacatatgaaaaaatgctcaacatcactaatgatcagaaaaatgaaaatcaaaaccacaatgagataccacctcactcctgcaagaatggccataatcaaaaaatcaaaaataatagatgttggcatgcatgcagtgaacagggaacatttctacattgctggtaggagtgtaaactagtact

SEQ ID NO: 596584 - DNA, 644 bp, Homo sapiens
tgaaagtctgggggtgggagtgggggcggatgggcaggacataatttgacctgaggataataaaaacagagtatttgaatctggtcatcatatggcatttaagacagccaccacttccatccttcccaaagcagacctggttaaccaattttaacactctcagtccagacttgggtttagcattamaacatattgatcactatgctaactatttaacccatttaacctcattatcctttaagataattacattcaatttcattgagtagcctgaggctcagatgggaaaaacttttggccaacaacaaccactggcaggcagtgtagccagcattcttgcctaattctttccacctgcaaggcctgtgctcttgaagactgcactgtattgcctttcctcatagtaagaataagaggatttgaaagatgaattcaaattgagcctcaatgttatttcattcatttcattccaaatgtttattgtgcttctgcaatttgccaggcactgttctcaatgtaggtgatatatcagtcaataaagcagaacaaaatctagtatgtatacttatgggaacacaaataacaaacaagatcagtaaatgcaatctaaggtagtattagtactttgtctatgctacagagaa

SEQ ID NO: 596585 - DNA, 653 bp, Homo sapiens
atgaggaaaggcaatacagtgcagtcttcaagagcacaggccttggaggtggaaagaattaggcaagaatgctggctacactgcctgccagtggttgttgttggccaaaagtttttcccatctgagcctcaggctactcaatgaaattgaatgtaattatcttaaaggataatgaggttaaatgggttaaatagttagcatagtgatcaatatgttttaatgctaaacccaagtctggactgagagtgttaaaattggttaaccaggtctgctttgggaaggatggaagtkgtggctgtcttaaatgccatatgatgaccagattcaaatactctgtttttattatcctcaggtcaaattatgtcctgcccatccgcccccactcccacccccagactttcattgcatggagatctttgaaatcagtaaaagaaaattgtgacaacttaggtagcttatttggtttcaaagctgaaatatgagtaaaaaaaatcaagtaagattcttttcattatctttaatatcttacctatttttggtcgtatattaatttcaccatccatttttgccatgcactttcacaagtttcctagagaattgtgacttggaaggtatccttaaattatttaatctatattctcaatttttacaaa

SEQ ID NO: 596586 - DNA, 490 bp, Homo sapiens
ctagagaatgtgacttggaaggtatccttaaattatttaatctatattctcaatttttacaaatgacagaggtgaagcccagactgaggctttctcaaagacccacataggttttggaagaccagggacagatctgagatatagaagaaagcaaacacattatgatacagaagttctggaaggtaggtgtttttcagtgagaaaactgcaggttggatgagatgatataacacggccacaaggtcacataacagaaggctctctgmcagaaagctcagttttttccattatactacttcgtgtcttctttttactaatgaagaattccaatcccagtaatgctgatctgtgggatcctgctgagaaggtgccttgtggcttaatggtctcctggtaacagccagtatggactaaatggtgctctgtgaagattcctcatgatttaaattgacttgcgtttgtgaggccacatttgaatttataacctaac

SEQ ID NO: 596587 - DNA, 592 bp, Homo sapiens
tgccagaaagctcagttttttccattatactacttcgtgtcttctttttactaatgaagaattccaatcccagtaatgctgatctgtgggatcctgctgagaaggtgccttgtggcttaatggtctcctggtaacagccagtatggactaaatggtgctctgtgaagattcctcatgatttaaattgacttgcgtttgtgaggccacatttgaatttataacctaacaaactgccacagtctgttttgaaagaacacaattcacacatgattcacsctctcctcacaatgcctacaaaataatcattcttttaaggcttttatatttcctgagacgagttttcttcctcttgctttttcctgaacaaggaagtacttataatctcacctcttaaattacattttaaggcctcacaaaccatagcaaaggaagggacagagtcagcactaatttcataaactatctgtaagggaattaattacaacctgacttatttttcttttagaaagaagttataaaggaatcccataaattttgaaggaggaataaattctttctcaggaggggtgagagctgtagtaaaatgttaaaa

SEQ ID NO: 596588 - DNA, 592 bp, Homo sapiens
tgccagaaagctcagttttttccattatactacttcgtgtcttctttttactaatgaagaattccaatcccagtaatgctgatctgtgggatcctgctgagaaggtgccttgtggcttaatggtctcctggtaacagccagtatggactaaatggtgctctgtgaagattcctcatgatttaaattgacttgcgtttgtgaggccacatttgaatttataacctaacaaactgccacagtctgttttgaaagaacacaattcacacatgattcaccctctcctcacaatgcctacaaaataatcattcttttaaggcttttatatttcctgagacgagttttcttcctcttgctttttcctgaacaaggaagtacttataatctcacctcttaaattacattttaaggcctcacaaaccatagcaaaggaagggacagagtcagcactaatttcataaactatctgtaagggaattaattacaacctgacttatttttcttttagaaagaagttataaaggaatcccataaattttgaaggaggaataaattctttctcaggaggggtgagarctgtagtaaaatgttaaaa

SEQ ID NO: 596589 - DNA, 577 bp, Homo sapiens
tagattattttgtttcgttgaacaatttacatatacatatttaaaatcattttaagattgccctattatctctagttcctcaggtgtgaattcctcgccttagtggcctatggattatattccttgatgatagactgctttttgtgttttgtaacttttgccttaagcacatcttctgtgaaagttgtctttcttggagactaagcataccttcagctgtggaagctttcctaacagatgggtttttatagctgctacagcctggcctctatgttagtctttcacctcagggactttctacagctcattactcacccttattcatggcagtctaaggattctggttttatttattttttttggtggggttgggggtgaggggagagataaatctgtttttgattgatcacagtttcatgtaggccaattgcctcttgttttcccccaggactagtggggtagagaatttttaatycttcttccagattgggcagagattttcttcttttttatgccagttaccagctatgtaatcttgggtaagttaatttaccctttcctactccagttccttcaa

SEQ ID NO: 596590 - DNA, 545 bp, Homo sapiens
ctactgttattcttatgtagacaataaacctcagcccctatcatattgagaatgtatattatcttggatgtattagattcatctttatgactatattttctacttgcctttttataaattgaatttctgttttaacgtttttgctcttgagtgtatatatctattttaaaatttaaaacacctttaccaagtatttatttatgtttggagagtgtaagtgtgtgttaaaggtaggtcaagtagatgggaagaattcctatatcaacttagtctactatcttgacccaaagtcatagcttctgatacttgttcttattacagatgttctttttgttattattactggactcgcctcatctctaacactgcaaagtatgttgtatgagttaggattctttacatcataagtcacacacacacacacacacacaccccaaaccaaaatgccttaatcaaatagggaatttattagttcatgtaacaaagtmaaaagggagattattaactcagctatatttggactcaaaatataccacaattcagat

SEQ ID NO: 596591 - DNA, 613 bp, Homo sapiens
ggaatgcagtttatattttcctaagttgaaaaaaagtccttactttgagttacttttcttcaaacctagaaagatatttttatttaaatagggtaattgaagtggtatttattttggagtccagcagggctttgaggtatttaaagaataagataataaaatgatctaggaagttaataaattgtaattacctctactctcctaagagtagaggtcttattttaatgtataaaagttggtccagtgtaacaattgtgtgaataatggtgatagttgatatctgttattacttggtcttgtattttaacattatmtcttaaacattttccagaatggaaaagagcatatttctattatttcctgtatttccttttgctatgaaatgtaaaaaaaaaatacaaagacaaaataattgttatccaaaattaacccttattaatgttttattatattttcttcaagtttctttttttgaaattttacattcaaggttacatgtgcaggatgtgcaggtttgttacataggtaaatatgtgccatagtagtttgctgcttcatgtgtgttgttctccctgtgtccatgtattatcattattcagctcccccttgtaag

SEQ ID NO: 596592 - DNA, 546 bp, Homo sapiens
cacttcttttgtgattcttcacttgtttcaggccatctgggcatataacttgcaggtcacagggtatatgatggcttagcttgggctcagaggcctgacactgcatgcctgtagtcccaactactcaggaggctgaggtgggaggattgctggagcctagcagttggaggctgcagtgagctatgattatggactccagccttggtgaaaaggtcaggagatcgagaacatcctggctaacacgatgaaaccccgtcactactaaaaatacaaaaaattagctgggcgtggtggcgggygcctgtagtcccagttactcgggaggctgaggcaggagaatggcatgaacccaggaggtggagctttcagtgagccgagatcatgccactgcactccagcctgggcaacagagcaagactgtgtctcaaaaaaaaaaaaaaaaaaaaaaaaaaagtgagaccctgtctcaagaaaaaggaaaagaatggaagaaagggaaggaaagaaggaaagaaaaaaagaaagaaagaatagatgacacaaaca

SEQ ID NO: 596593 - DNA, 595 bp, Homo sapiens
acttggattattgcaatagccttctaaatggtctcttggtaatctatccatgaccctttaatagtctgttcgaaacacagtaggcagggtgatcatttgtacaatgaatgagctcatgtcattcccttgcttgaaatcctccaatggctctccagtacacccataataaaagctaaagtgctcacagagrcctgtaaggctactcagtctacccctccttaacctctctgaccgtcatctcctactaccctccccttcatcccatttgttccagtcaacatgggttccttgctgttctagaaacatagcaggcatgtataggaaaccaaaatatttcactccagaatatacttctttaacatatttcaagatggctattcagaaaggctggaaatacaagaatagctgaaaggctgtcttttgtgggcgagatttgcatctgtagagaaaatctgcattgatgcagtcagcctttctccgaggccctcttttgtctgatctaggaaagattaactgaaagtctgacacctttaaaggtataaaagaaacagtcaccatctatttttctctgatagctgctacctgtgaggtttct

SEQ ID NO: 596594 - DNA, 604 bp, Homo sapiens
ggtacatacctgtattcccaggtacttaggaggctgaggtgggaggagcctttgagcccaggagtttgaggttgcagtgagctatgatcatgtcaccagggtgacagagtgagaccccatctctcaaaaaaaaaaaaaaaaaaaaagaggkagagagagaatgaaaatgaaaactccacatatctaaatagatgggtctccaaattatgagtttctggcattcagctgcttattttgaaaaggtttctgacttttctctaggcccatctgtgtgcttctttgtaaaatcatgtaatgagttcctattttttattcacttggcatccatttttaatcttctcgatgaacatacccaaactctgtcttgacaaaccttaaattctttctctgtaagtttgctaccctgttttttctttttctttctttcttttttttttaagttgagttttactcttttgcccaggctggagtgcagtagcataatcttggctcactgcaacctccacctcccgggttcaagcaattcttctgcctcagcctcctgagtagctgggattacaggtgcccaccacaatgcctagctaatttttgtatttttagtaga

SEQ ID NO: 596595 - DNA, 592 bp, Homo sapiens
cccaagtcaggggctccgggtctcgggcccagccgccaggcgggctgctgcgggtgggtggggagcgccgcctagctggagccgaagcggggcgaggcgctagttgggagcctggaggttcccgcccggccacacccacctcaggtatactagcaacagtcacatagggatgagcagatgaaatgtattcataaaaaaatgttcaaattagccaggcgtggtggcgggcgccagtagtcccagctacttgggtggctgaggcaggagaattgcttgaacccaggaggcagaggttgcagtgagccgagatggtgcccctgcactccagtctgggcgaaaaagcgagattgtctctcagaaaaaaaaaaaaaaaagtgttcaaaaagtgaaatgtataaacatataattatgttcggtaatagtgtgcacccagctttataactgcggtcatctgatataccatgagagacaacctaactcttttgacaggatgggtcaccatgacgtcaccactgtgccagtcacccgargagccaagatcctgagaaatttcatctttcacaaatgcagatgtacagaaaagacacttatt

SEQ ID NO: 596596 - DNA, 584 bp, Homo sapiens
ctcatgactctgaccagtgccttatcctgctgtgactgagctagtatacagggtgcaagacaaagtcctccccatccttccctctcctctcctaaagtggaaggaaggagtctcttttgaagccacaagctgtgcagcctggactaggtgagagttgatgccagcactcccacaactgccctggctggtgtctcagtaggccatgtgccccctgagtccactggctctgggcccatttcagccctaggactcacctaggagttgtggtccttgtggcctagactgcctttcaagtttacttacagccccaaagtactttagatcattgtcatgatacttgagggaactcaacttctgactgctgggattggtgatttcctgttggctagggctgctttaagtattttctccacgggcaggtgtcagctgagwtttgtccagttttcctttctgctataacagggcagcactgagttcagcgccttaaatttgctgcattcccccttccccagtgcacagaaatgctctttacaccatgcaaccattgctggggagtgtgggaggagtggtgttggcaattcaag

SEQ ID NO: 596597 - DNA, 594 bp, Homo sapiens
attgtttatatgaatgtttgaaaaattatataagtccatacaagtatgctgggaatgatggctcatgcctataatcccaacactttgggaggctgaggtcagaggattacttatagccaggaatttgtgtccagcttgggcaacaaaacaagaccctgtctctattaaaacaaaacaaaacaaaacaaaaacaaaaaaaaccaaaaaaaaamcaagcatggtggtacaaacgtgtagtcccagctacttgagaggctgaggcagaaggattgcttgagtccaggagtttgagattgcagtcagctatgaatgtgccactgcactctagcctgggcaatagagcaagaccccatctttaaaaaaaattcgtacaaatgtattatattaccagtcataattctggttatcttaaaatactgtatataatagcaataaataaatgttcttctcagttgttaacttcatcagatttttaaccatggctattttaagtttttgtcatccatattattgttttgaattcttttttaaaaaacagactcctggaaaatattctaacaagtactcttttatttttatttatttatttttgag

SEQ ID NO: 596598 - DNA, 412 bp, Homo sapiens
cagctgtcccacccagggcctaggggatgccaaattccagggtccagaaagagcttgggataaaatgaacatccaakgggagggctttgacctgggcttagtctgcctgtgccatccaaacggagtctcaagtcctgagacagggcgtccagatgccagtgcagggtccccctgatcaacacctgctcccctgtactcattagcaacctcacccaccctactctcaaagcacttggccctcgtatctgggagctctgcaactgtggattcagccaacagcagatggaaaatattcagaaaacaaatcggatggttgtctctactgaacatgtgcagacgttgttcttgtcatcattccctaaatacagtatcacaaccatttatatagcatctgcattgtattacacataat

SEQ ID NO: 596599 - DNA, 575 bp, Homo sapiens
taccaccaacaatcagatctcttaagggttggtgccttaggttttcgagccttgtgtatcttttggctttcttttttggttgtgtgstatttatctcatagaaagaaacctcttcttcatcctatgccagtgctgtattgtaggggcttgttgacatcttcctgatatgtagcaaatccaggtgactggcctctggcttcttaagagcaaggccatcacatgcttttttttttctttgtctgcttgtttccttgtaagggtcccacatacagtgggcgcttaacaaaaatttgatcaactgaactcattttctatctccgttctctccacttcaatctttcccttttacttcttccagattagttttcctacagcaaaatgggaattgtccaaaaactgcccttcatctttataacttgaaggattcatttaccctaagccgtccttttaaatttactatcacagactagatagaaatgtctgggttcacgaagaataggcatgtgtgccaccatattttctgttgaaaactttggaaagtgtcttttagcaaacaacatgaagcatagaatttg

SEQ ID NO: 596600 - DNA, 546 bp, Homo sapiens
ctcctatgtactttacatcatctctagattacctgtaaatcctaaatcgatgtaaatgctaagtaaatgggtgttaacttatatygtttagggaataatgaccaaaaaaagcctgtatatgttcagaccagacacattttttttttcctgagtattttcagatcaacacagagggtcgactatatcctagtttcaaatcatgaattgagcataaaattagtaacacaaaagacctaagcctacatttgtttaatggagaaaaaatgatgaaaaactcacaacaagttactgaactttctatgtttttttcctagaaatgagcaaggctcatatgataactcttcctccctcagaaggcactctgagctcagtattacatgaatagcccatttatttcagatctgtagcttggaatttattgtgaacagattcagtcttaggtgagggtggaagacatatgtctccattccgtgatttcatatctccaggatattcctacaccaaaagcacttcctccatagaatttgcaaagagtaaatatgtact

SEQ ID NO: 596601 - DNA, 443 bp, Homo sapiens
tgttaacttatattgtttagggaataatgaccaaaaaaagcctgtatatgttcagaccagacacattttttttttcctgagtattttcagatcaacacagagggtcgactatatcctagtttcaaatcatgaattgagcataaaattagtaacacaaaagacctaagcctacatttgtttaatggagaaaaaatgatgaaaaactcacaacaagttactgaactttctatgtttttttcctagaaatgagcaaggctcatatgataactcttcctccctcagaaggcactctgagctcagtattacatgaatagcccatttatttcagatctgtagcttggaatttattgtgaacagattcagtcttaggtgagggtggaagacatatgtmtccattccgtgatttcatatctccaggatattcctacaccaaaagcacttcc

SEQ ID NO: 596602 - DNA, 623 bp, Homo sapiens
accacagcttacatcagagcttggctgatttctctgatgtctacatctcatcaacaatctaccttttggcttctcaacacatactgattattaatgtagggtgaccactgttagagaggtcgaaaggtatgcatccctgagtttcctccctgctttccttccttcttttcttccttccttcctgccttagtccatttgggatgctattaaaaagtaatataaacagggtggcttataaagagcagaagtttacttctcacagttctcgaggttggaagtccaagatcaagacaccggcataggtgtctggagagagctcgttcccttctctgtgttgttatgtggtgaaaggtacaaacgagctccttcaggcctcttttataagggcagcaatcccatcacaagggcttcactccacgacttaatcacctcctcaaagcccgcaccttgtaatatcatcaccaccttgggggttggcatttcaacagatgaatggggagacagaaatattcaaacattcgggccacagcacttccttacctccttcctccctccgtcaatttattcattcatgtaytgattctttcattcaagtgtcatttgtttaaacaaatacgtgagta

SEQ ID NO: 596603 - DNA, 587 bp, Homo sapiens
aaatattggttaatttaatccatagatgtgtggaaagaggcagttgacagaaagtaatcttgcatgaattcaaaatgcaattttaatcaaaaygcaattttaaaatagctgcccttacatggtctggcattaaaaataaacttttttatagaatggaagaaataaaaaatgtttaaagggtggttttctttatatttccaaaaggaaagttgatagatgcagagacatgaaatgaataaggataaatgaataagtggatgaatcctcaatatcactattttataataatttattctggggaaaaaaaggcaccaaacctcagagccataagcagaaatgaaaatccaccagaaaatgcaaaattattgtgaagactttctatttgaataggaggagacttggatctgtaatcatgagtccatagatggaacattctcaggttacacccatgccataatttgaacatttgaatcaggaatgcaagctttttctctctagctgaattgttgtcgttgttgttgttcttcttctttttaaattttgcagtgatttactttgagtggagtcatttgctcttgagaagaagc

SEQ ID NO: 596604 - DNA, 623 bp, Homo sapiens
gcagagacatgaaatgaataaggataaatgaataagtggatgaatcctcaatatcactattttataataatttattctggggaaaaaaaggcaccaaacctcagagccataagcagaaatgaaaatccaccagaaaatgcaaaattattgtgaagactttctatttgaataggaggagacttggatctgtaatcatgagtccatagatggaacattctcaggttacasccatgccataatttgaacatttgaatcaggaatgcaagctttttctctctagctgaattgttgtcgttgttgttgttcttcttctttttaaattttgcagtgatttactttgagtggagtcatttgctcttgagaagaagcatcaccactaaaggatgctttattttatttctgaaaggcatttgcaggtagctcagcagatctgttttgccacttttgtatcacgcccttgtgtgcttagccacatacatgtagaaattggttaaaatgaaacaaaagtgcaataaactgctgcttctggatttaagtattagttaccgcaaaattatttcaaaaaatatccatttactctatgtatgttcatttttttaaaatttcaacttattttagataca

SEQ ID NO: 596605 - DNA, 500 bp, Homo sapiens
  misc_feature 492, 493, 494, 495, 496, 497, 498, 499, 500: n = A,T,C or G
tctcaggttacacccatgccataatttgaacatttgaatcaggaatgcaagctttttctctctagctgaattgttgtcgttgttgttgttcttcttctttttaaattttgcagtgatttactttgagtggagtcatttgctcttgagaagaagcatcaccactaaaggatgctttattttatttctgaaaggcatttgcaggtagctcagcagatctgttttgccacttttgtatcacgcccttgtgtgcttagccacatacatgtagaaattggttaaaatgaaacaaaagtgcaataaactgctgcttctggatttaagtattagttaccgcaaaattatttcaaaaaakatccatttactctatgtatgttcatttttttaaaatttcaacttattttagatacagtaggtacatgcgcagatttgttacatgggaatatggtattatgtggtggtttggctatgatctcattaccctgtactgaacannnnnnnnn

SEQ ID NO: 596606 - DNA, 405 bp, Homo sapiens
gaggtggcagtaactgcgcgctcattccctcacctcctgcaaggccgggccaggctgtggactcaccgctcagctcaggagatgggagagggtgacagtagccgcgtggactctggccttasgcagagcgttactgtagctttggggttgtaggaggatgaagaggggaggttatcaggacaccatggtgattgtgtggtgctggttaggaacatgggctttgaagagagagggattttatttcaaattccatctctgccacttagtagtcagatgaccttgaacatgtcctctaacctttctaggccccaggacctgcctctgtaaacttgggtaataaccccctggcatgtttgcttctgaggattaaatgagataacttgtataaaaagtggcgcagcaggg

SEQ ID NO: 596607 - DNA, 405 bp, Homo sapiens
gaggtggcagtaactgcgcgctcattccctcacctcctgcaaggccgggccaggctgtggactcaccgctcagctcaggagatgggagagggtgacagtagccgcgtggactctggccttaggcagagcgttactgtagctttggggttgtaggaggatgaagaggggaggttatcaggacaccatggtgattgtgtggtgctggttaggaacatgggctttgaagagagagggattttatttcaaattccatctctgccacttagtagtcagatgacmttgaacatgtcctctaacctttctaggccccaggacctgcctctgtaaacttgggtaataaccccctggcatgtttgcttctgaggattaaatgagataacttgtataaaaagtggcgcagcaggg

SEQ ID NO: 596608 - DNA, 560 bp, Homo sapiens
atcccaaaaaacactacaggtgaactggatgccacagaaagaggagtggtctttgtcacaacgaaatcaacaaaattatttcgaagtcaattaggaaactcagaaatcactcttgctaccattaagaggaagaacaggagcctgtgaatggcatccctggcctacctgagactccaaagatatttctctgtggcttctgacagcagaaatctctgtgattttcagaaaggyagggacagctcctgccagcccatccttctgcagaatgtgtcccagcagatcagtggcatggaaccatcatggacagcacaaaggctcaagggcagcatcccaggccggcctgtgactctagataagttctgagttcccatgggggctcaggaaaggttagtgatgacctggaaagaagggacaggctgaaaccgcccctaagcaatctgcaggattccaacttcagcaggaagccaaggaccagctattaccacacctgcgccccctgaaaacgctggatacaatcccactctgcagaaagttccacatagaagtggctgggaattttg

SEQ ID NO: 596609 - DNA, 495 bp, Homo sapiens
aaggtgaagagctgataaaagacatttttttaacttccttacttctccatgtactgccttttcaaaggggtctcagaattttgtgatattccactttcctttcctagtcaagggaatatctcttaagtatctggagatgggaactgactagaaaccgagctycaaactgattttcagagagacataaatgcaacgcaatctgctgctctgttttccatctgatgacttctttcttaccacactccagcactagccttctcctgcttattcacccagatggtaatgcaccttatcccttttccctttatgcctcctcaagcaataacaccaacaggtcacatttcagtaggatagtgttgttttcaagcatttactcttaggctatttcaatttattaatacaacaagctgatagtgtgtataatagggggtaagcaggtccattttaggaatgaaagaaaaatgaaaatcatcaggtgaagcacatttcccccag

SEQ ID NO: 596610 - DNA, 495 bp, Homo sapiens
aaggtgaagagctgataaaagacatttttttaacttccttacttctccatgtactgccttttcaaaggggtctcagaattttgtgatattccactttcctttcctagtcaagggaatatctcttaagtatctggagatgggaactgactagaaaccgagctccaaactgattttcagagagacataaatgcaacgcaatctgctgctctgttttccwtctgatgacttctttcttaccacactccagcactagccttctcctgcttattcacccagatggtaatgcaccttatcccttttccctttatgcctcctcaagcaataacaccaacaggtcacatttcagtaggatagtgttgttttcaagcatttactcttaggctatttcaatttattaatacaacaagctgatagtgtgtataatagggggtaagcaggtccattttaggaatgaaagaaaaatgaaaatcatcaggtgaagcacatttcccccag

SEQ ID NO: 596611 - DNA, 495 bp, Homo sapiens
aaggtgaagagctgataaaagacatttttttaacttccttacttctccatgtactgccttttcaaaggggtctcagaattttgtgatattccactttcctttcctagtcaagggaatatctcttaagtatctggagatgggaactgactagaaaccgagctccaaactgattttcagagagacataaatgcaacgcaatctgctgctctgttttccatctgatgacwtctttcttaccacactccagcactagccttctcctgcttattcacccagatggtaatgcaccttatcccttttccctttatgcctcctcaagcaataacaccaacaggtcacatttcagtaggatagtgttgttttcaagcatttactcttaggctatttcaatttattaatacaacaagctgatagtgtgtataatagggggtaagcaggtccattttaggaatgaaagaaaaatgaaaatcatcaggtgaagcacatttcccccag

SEQ ID NO: 596612 - DNA, 334 bp, Homo sapiens
aaaaggagagtggaagggaggaagggagagagaaagataatttgagactaagacctgagatatctaatctgatagaaattacatagaaaaagcctcattttatccatattgtttatggrttttgggttacagaggagcagcagggctcctggaggcacagacactgggcgatattccaccacttaggagagtatgaaggaagagacaaaagggaggaaaggaggaaaggaaggagggaggacaaatggaagagtgagattgagaacagaatttagagattagaaacaattcattacaaaggtttacttctactgttaattattgtttttaattg

SEQ ID NO: 596613 - DNA, 334 bp, Homo sapiens
aaaaggagagtggaagggaggaagggagagagaaagataatttgagactaagacctgagatatctaatctgatagaaattacatagaaaaagcctcattttatccatattgtttatgggttttgggttacagaggagcagcagggctcctggaggcacagacaytgggcgatattccaccacttaggagagtatgaaggaagagacaaaagggaggaaaggaggaaaggaaggagggaggacaaatggaagagtgagattgagaacagaatttagagattagaaacaattcattacaaaggtttacttctactgttaattattgtttttaattg

SEQ ID NO: 596614 - DNA, 565 bp, Homo sapiens
ttggcattgtgcacagctgcttgtgtctgggggcaggtgcagacgatccagtgccaactccttctctgggacaatgaccatcacatagactccaggcagctccctatagtagtctcagggcctgcaagcgtgagagactgtcccttggctaggattgcagtgtccacagtgggaatatggaccactggggctctcttttttaccttttcaccacactggggagcctgtcctggctttaagctgattctggctgggctgctgcttcattttcctttccttccatgcctcagagattcctcgtcamtttgctgctgaattctagtgccctctttcgtgccctcttcaaggtatgattatctacttgctgtcttggtctttctttgggaggacacagtgcctggtacctctagtcagccatcttgaaggccacctcctagcaatgagaggataatattctatgtgatggctttaatatatgtgtccaaactgcttcttttctagggaagcacttactctaagaagtaaatgttatatagtgcaaaaatatattaaagggtcagttggt

SEQ ID NO: 596615 - DNA, 334 bp, Homo sapiens
aaaaggagagtggaagggaggaagggagagagaaagataatttgagactaagacctgagatatctaatctgatagaaattacatagaaaaagcctcattttatccatattgtttatgggttttgggttacagaggagcagcagggctcctggaggcacagacactgggcgatattccaccacttaggagagtatgaaggaagagacaaaagggaggaaaggaggaaaggaaggagggaggacaaatggaagrgtgagattgagaacagaatttagagattagaaacaattcattacaaaggtttacttctactgttaattattgtttttaattg

SEQ ID NO: 596616 - DNA, 334 bp, Homo sapiens
aaaaggagagtggaagggaggaagggagagagaaagataatttgagactaagacctgagatatctaatctgatagaaattacatagaaaaagcctcattttatccatattgtttatgggttttgggttacagaggagcagcagggctcctggaggcacagacactgggcgatattccaccacttaggagagtatgaaggaagagacaaaagggaggaaaggaggaaaggaaggagggaggacaaatggaagagtgagattgagaasagaatttagagattagaaacaattcattacaaaggtttacttctactgttaattattgtttttaattg

SEQ ID NO: 596617 - DNA, 518 bp, Homo sapiens
aaaagtgtgcccatggacactgtgaaatagtatrccagggagttcttggaattcctcagagagtttagaattctttaaggcattatccaaggctcagaaatggaaattaaacatgtaatagtagtcacattcaacagagaaggatgctatatttgtataaaacttctgatgggccaggcatggtggttcacgcctgttatcccagcacgttgtgaggttcaggtcagaggattccttgaggccaggtgttggatactagcttgggcagtataactagacaccatctctacaaataatgataataaagataataaagattagctggccatagtgtcacatgatcgtagccttagcttcttgggaggctgaggtatgaggattacatgagtccaggagtttgaggctgtagtgagcaatgatcgtagcactgcactccagcctgaaaaatacagaccttgtcaaaaaacaaaaaacaaacaaacaaacaaacaaaaaccttctgattaatcaattatgaa

SEQ ID NO: 596618 - DNA, 518 bp, Homo sapiens
aaaagtgtgcccatggacactgtgaaatagtatgccaggragttcttggaattcctcagagagtttagaattctttaaggcattatccaaggctcagaaatggaaattaaacatgtaatagtagtcacattcaacagagaaggatgctatatttgtataaaacttctgatgggccaggcatggtggttcacgcctgttatcccagcacgttgtgaggttcaggtcagaggattccttgaggccaggtgttggatactagcttgggcagtataactagacaccatctctacaaataatgataataaagataataaagattagctggccatagtgtcacatgatcgtagccttagcttcttgggaggctgaggtatgaggattacatgagtccaggagtttgaggctgtagtgagcaatgatcgtagcactgcactccagcctgaaaaatacagaccttgtcaaaaaacaaaaaacaaacaaacaaacaaacaaaaaccttctgattaatcaattatgaa

SEQ ID NO: 596619 - DNA, 518 bp, Homo sapiens
aaaagtgtgcccatggacactgtgaaatagtatgccagggagttcttggaattcytcagagagtttagaattctttaaggcattatccaaggctcagaaatggaaattaaacatgtaatagtagtcacattcaacagagaaggatgctatatttgtataaaacttctgatgggccaggcatggtggttcacgcctgttatcccagcacgttgtgaggttcaggtcagaggattccttgaggccaggtgttggatactagcttgggcagtataactagacaccatctctacaaataatgataataaagataataaagattagctggccatagtgtcacatgatcgtagccttagcttcttgggaggctgaggtatgaggattacatgagtccaggagtttgaggctgtagtgagcaatgatcgtagcactgcactccagcctgaaaaatacagaccttgtcaaaaaacaaaaaacaaacaaacaaacaaacaaaaaccttctgattaatcaattatgaa

SEQ ID NO: 596620 - DNA, 594 bp, Homo sapiens
tgttctccaacagatcttcagtaaaaatagctgatgtctatattgttttgcctgtcctttcccttccttttaattcagaactgcagtctcgaaaagtgctattatttagtagattctctcaattctcaacaccagtgctatacaatgttgaatgacatctgaggtgctagggaaacagcagctcacattctagcaatgaaaaaatagaaaagcaaagatcaccacagagtaaaagagaatagatttttttaaagtatgaaaccagaacgaatatatatcagattacactataaatggaaaatcttattatcttgacgggattgcaagtcagattacactataaatggaaaatcctattatcttgacaggattgcaagcctctcatggcttccaacctccaatatattcaaagcagttcaggaatggtgaaagtggaatggaatttaaaattattctaaggttttatgtgtgaaagcatcatgccctgaaacaaaatatttatttttaaagtgcataatgaacactgcatacaaagtttatgtaacaggagagaggaaatatctcacatttwaaaaaaaggaatatgcaacatat

SEQ ID NO: 596621 - DNA, 564 bp, Homo sapiens
gtacctgtagagattgcagactgggaaaggtaaggctctggtcctgccagactctctagaggttaagaawgtgatctgcagaaagacatgaactagcacaggcaactgtagaacatctgcccccaagaatcataaatgccttttcactcatcctgcagaatgcactctctactttaatgatcgtgtgggatgtgactttaatttgtaggcatgaggattgatcttaagaaaaagcagggaaagtgccttacctgttctgggactctgctccacttgccaacatttgagtggattcatttgtgttgtagtcaagctacaggaaataaagggaccagtcagtcttccacacaatgacacagaggccaattatcacaagtccaaatctccatttgtcatccagctcacattcccgttgtggcacaaggacacatgcactcgtgtccaactccaaatagtagcttcacatagtatgtcagcactctcccaccatcatctcttctagaaggtcttccgctggattggaaatggcctgggataaaagataatgaccacaggaagcagttg

SEQ ID NO: 596622 - DNA, 575 bp, Homo sapiens
gcctggctaaatttttgtatttttaaaagagacagggtttcaccatgttggccagaatggtcttgatctcctgacctcatgatccacccaccttggcctcccaaagtgctaggattacaggcatgagtcaccgcacccagccagtaatataaacttttaaaagaggttttgtgctggttggttttggtttattcttttttgaggattcaataaaaatccctgtgagaaaaatggagagagggaamgggagacagggagacagggagagggagagagaaaaaagagaacctaaaacctacagaaaacaacaggcttcagtcctttttgggtgtagtgctctcaattcttggttgatgccccagaggcaggcagcagggtcggctatttaaacatctccctacatggatttctgtttcgaggcaaaagtcccgacaggagccatttggacgttcacagatctccttgaatttgcccttggctacatgcagaaggggttattgtaaccattcatcagtctttctttactttgttttgaattacatggacgtaggggcagtgcctgaaaataatcttgt

SEQ ID NO: 596623 - DNA, 575 bp, Homo sapiens
gcctggctaaatttttgtatttttaaaagagacagggtttcaccatgttggccagaatggtcttgatctcctgacctcatgatccacccaccttggcctcccaaagtgctaggattacaggcatgagtcaccgcacccagccagtaatataaacttttaaaagaggttttgtgctggttggttttggtttattcttttttgaggattcaataaaaatccctgtgagaaaaatggagagagggaaagggagacagggagacagggagagggagagagaaaaaagagaacctaaaacctmcagaaaacaacaggcttcagtcctttttgggtgtagtgctctcaattcttggttgatgccccagaggcaggcagcagggtcggctatttaaacatctccctacatggatttctgtttcgaggcaaaagtcccgacaggagccatttggacgttcacagatctccttgaatttgcccttggctacatgcagaaggggttattgtaaccattcatcagtctttctttactttgttttgaattacatggacgtaggggcagtgcctgaaaataatcttgt

SEQ ID NO: 596624 - DNA, 575 bp, Homo sapiens
gcctggctaaatttttgtatttttaaaagagacagggtttcaccatgttggccagaatggtcttgatctcctgacctcatgatccacccaccttggcctcccaaagtgctaggattacaggcatgagtcaccgcacccagccagtaatataaacttttaaaagaggttttgtgctggttggttttggtttattcttttttgaggattcaataaaaatccctgtgagaaaaatggagagagggaaagggagacagggagacagggagagggagagagaaaaaagagaacctaaaacctacagaaaacaacaggcttcagtcctttttgggtgtagtgctctcaattcttggttgatgccccagaggcaggcagcagggtcggctatttaaacatctccctacatggatttctgtttcgaggcaaaagtcccgacaggagccatttggacgttcacagatctccttgaatttgcccttggctacatgcagaaggggttattgtaaccattcatcagtctttctttactttgtwttgaattacatggacgtaggggcagtgcctgaaaataatcttgt

SEQ ID NO: 596625 - DNA, 486 bp, Homo sapiens
agagtttgagacaagactggccaacatggtgaaacccagtgtctattgaaaatacaaaaattagctagaagtggtggcgggcacctgtaatcgtagctacttgggaggctgaggcrgaaaagttgcttgaacctgggaggttgaggttgcagtgagcccagatcacgccattgctctccagcctgggtgacagcaaaactctgtttccaaaaaaaaaaaaaaaaaagattaaggaaactaaggctaagacaaacgaaattactttctaaaatttgaagcccaggaccatcaggctcacagattatgctaactacttgctttattattcaggttattgtagatatattttatatccatgtttctgtcaaaggtttttggtgtggggtttcccagtggaaagggaaatgattatatatggtggagaataaatgagagagggcttggggaatggaagccacacctcacccacttggctcagaccacagg

SEQ ID NO: 596626 - DNA, 505 bp, Homo sapiens
atgttaattcatttgattcaatcatttcaagatgtataaatatatcaaaacatcacattgtatgctgtaaattatatgacttacttgtcagctatatcttaataaagctgaaaaaataaaacaaactgaagcttaaataatgaatagaattacgccagagggaaagaagtgagaagatgaactgaacaaaagtgtgaagaaaggaaagatcaacwaaaaagataagtagataagaaggggcagaaaggagaaaaatcaatatttggaaatgagattgaaagagtataaggcacgctattgaagggctcttaatgctaaatttaggagttgaaatatgactcttctcaagaaaacaaagaaggggaacatcacactctggggactgttgtggggtgggggttggggggagggatagctttaggagatatacctaatgctaaatgacgagttaatgggtgcagcacaccagcgtggcacatgtatacatctgtaactaacctgcaca

SEQ ID NO: 596627 - DNA, 505 bp, Homo sapiens
atgttaattcatttgattcaatcatttcaagatgtataaatatatcaaaacatcacattgtatgctgtaaattatatgacttacttgtcagctatatcttaataaagctgaaaaaataaaacaaactgaagcttaaataatgaatagaattacgccagagggaaagaagtgagaagatgaactgaacaaaagtgtgaagaaaggaaagatcaactraaaagataagtagataagaaggggcagaaaggagaaaaatcaatatttggaaatgagattgaaagagtataaggcacgctattgaagggctcttaatgctaaatttaggagttgaaatatgactcttctcaagaaaacaaagaaggggaacatcacactctggggactgttgtggggtgggggttggggggagggatagctttaggagatatacctaatgctaaatgacgagttaatgggtgcagcacaccagcgtggcacatgtatacatctgtaactaacctgcaca

SEQ ID NO: 596628 - DNA, 525 bp, Homo sapiens
aatattcctttattaaatggaactaagaagggatagccacataaggatttcaggagcatggagtgggatgttatagaaagataatattgaggaaatctatccttacatttgagtgatccaagttatttttgaagaaagtttggcgactcatctgccttatgaaaataggagagcaagaaacattctctgcacagtgtgaagttcctctgtctttcatatttctaattccgggcagcatgctgtctgctccaaagaacaggaaaacaaatgccaagctttaatcagagtggtatgggctgtgtggggagtttcagatcatttgcccattgctaacaatgtcatrcagattcccttcagaatctcaatgcctagacctttgcccttgctgcaaacggaaggttgcaaaacactgaagagcagcaatcctggattagcttaacattctttctctatgttcaggaaaaaaaaaagagaaggtaacaatttcaatctaatttaattctatagtaaaacaaggaataagaa

SEQ ID NO: 596629 - DNA, 382 bp, Homo sapiens
agcctgggcaacatagtaagaccctgtccccacaaaaatttctaaaaagttagctaggtatagtggggcatgtctgtagtcccagctacttgggaggctgaggcaaggggayagcttgtgtccaggagttcaagggtgcaatgagctctgattgaaccaccacgttccagcctgggtaacagagtgagattctgtctctaaatacatacataaatatcaaattagtccaaatatttatgcttacttttaacaacttctttgctttagattctcaggtgatagtaattttgttcttttatattatgctgaaacttaaagcttcaaataagaaaataaaatattgagtttttttgtattccttttgagactcaaagattcatct

SEQ ID NO: 596630 - DNA, 547 bp, Homo sapiens
gaattctccctaactcattctataagggcagcattaccaaaaccagataaggacaaaaccaaaaacacacaaaacgccaatatctgtgaagaacatacatgtgaaaatcgtcaaaaaatattagcaaacaaaatccaacagcacaacaaaaagattatacaccatgatcaagggattcatccttagggatataagggtggtccagcacacgcaattcaayaaatgtgatccatcacgtcaacagagtgaagaacacaaactaaatgatcatctcaatagatgcagagaaagcatttagtacaactcaacatctctttgtgatgaaaaaaaaaaaacaacacctctcaacaaattagatatgaaaggaaactatatcaacaaaatacaggtcatccatgataaacccaaagctaacatcatgctaaacacaggaaagctataaggtttttctttaagaactggaaaaacacaaggatgaccactttcaccacccttattcaacatagtactggaagtcctagacagagctatcaggcaagagacaaaa

SEQ ID NO: 596631 - DNA, 569 bp, Homo sapiens
caccaccatgcctggctaattttgtatttttagtagagatggggtttctctgtgttggtcaggctggtctcaaactcccaacatcaggtgatccacctgcctcagcctcccaaagtgctgggattacaggcatgagccaccacacctggcatcttattctctaatttgaatatcttcagggtattttatgagtcttctcaaaaacttaatctgttttaaatgagatttcaaaactgtttttagatgtacttatcaatttcacactataaatgttttattatcaatatattacttttaattctttactaatttcttcatccttcagaggtcatttatgaggattatagaaataaatcctgcatattaaaattattgaaaataaaatattaaaaaatcataaatggttaagaattcttaaagtaaatgcagtgtaatgacaattcatttatttgtcycaattttatttatgtgttttttaatcttctgtttctgaaagtttgcctaatattagtaagtatttttgaggagaaggtgaagagaaatagaaaagataagtttttttttttttt

SEQ ID NO: 596632 - DNA, 606 bp, Homo sapiens
tctgagcaatcttcaggcacaggatcaacaaacaggagtaacagctgtggaccacgggaacaacaaagggtaattaccaaagacctttatcgagckcagctgccccggccacagtggcctctccccattcccatatcatggctttaacttcttgaataaaacctgatgacctctttccaaaactggtttgtacaggtagtaacttactgccagttgtttcttgagttcttgaagctcaagaacaaaaaacaaagtttgaggaaacactgtgctaaagtacagtatactaaatatattaagtacacagacaccaaagtatcagatagagtaaaatgtaaacaaatcttctccccaaaggttatgccgaggtgggaagatggcttgagcctggaaggaggaggttgcagtgagccctgatcccgccactgcactccaacctcagggacagagtgagatcctgtctcaaaaaaaaaaaaaaaaaactcccttatctggggatccacagcctgactgactctcactgtgctccaagcccagacgcatgaacgctttttaaaaacatccatttgatccttctattgaaagaaatagactgtcaggaaaaca

SEQ ID NO: 596633 - DNA, 553 bp, Homo sapiens
atttgttgttgaggcaaagagaaaacaaagcacactgaagctaaaagtaggggctgtgaggctaagtttcctatggatcaggtgttctccatgctagatgcacatttgaaaccaacatccattttccactttcagaatatctgctttaattgttctggggatgggatccagctatcgctgtatttggaactttccctgggttgattcttatttgctgttagggttgcaaagcattgtaataaatacagccttgaaaagcaaaattaattctggctaaatcattatgccaattgtgatggtgatgattatgatagtcataataacagcataattatagtagtactagagcagcagtagtagtagctgacactgaacttatactgatatcccagggactctaaacrttttaaaatccattttgatgtaatccctattttgcaggttagaaaattgagccacaaagacaatcattaactttcccaaggtcacagagctagttagtggagagcgtgaactcgggcattgtacttaagaactgtcattcttaaccatt

SEQ ID NO: 596634 - DNA, 497 bp, Homo sapiens
agacatgaacagacacttctcaaaagragtcatacaagcagccaacaaacatatgaaaaaatgctccacatcactaattatcagagaactgcaaatcaaaccacaatgagataccatctctcaccagtcagaatggctattattaaaaattcaggctgggcgtggtggctcacgcctgtaatcccagcactttgggaggccgaggcaggtggatcacaatgtcaggagttcgagaccagcctggccaatatggtgaaaccccatctctactaaaaacacaaaaattagctgggtgttgtcgcaggtgcctgtaatcccagctactcaggagtctgaggcagaagaatcacttgaacctgagaggcagaggttgcagtgagccgagatcatattactgcactccagcctaagtgacagagcaagactccgtctcaaaaaaaaaaaaaaaaaatcaaacaatagatgctgtccaggctgttgagaaaagggaatgctta

SEQ ID NO: 596635 - DNA, 542 bp, Homo sapiens
taagttttaggacttaatcctagtgataatatctgtttttttgtttgttggttggttttagaagaaatattgggttaagacttttcatcccagtccgtttttccccccatttggtgattgtgctagtcgcatgtgggtgttggttcagttggaattcattcatttattcctttttcagactcatattgaatgccactttccaaatacttggaaacagggatgaatttaacagagcaggtcttcagggagtttactttctagtagaagaaataatcagaaaacaaataaatacgtaatataaagttgggtaataatccatgctaggaagaaaaactggggcatagtgaatgacgtggccagggcagaggtgctaygtttgatactatattcttgtcaagcactctgacgatgtgacatttaaataggaactgggtgaagggaagaaataaggcttgcaaagatacagagaatggattttcttagaagattatcctttaatgtgcttactttaaaatatcatggctgtaccctattgctagtgt

SEQ ID NO: 596636 - DNA, 466 bp, Homo sapiens
agttctgaaaacaacaacaacaacaacaacaacaacaacaacaacaacaacaacaacgtatggtcaactgatgagactcagaatctctgtgggccaagaagtgagactgtgagtgtccttgaatacctaaatgttttctgctttgacactggtgtgactttagccccacgaccattccttctctcttttcttggcaatcctcccgtgaacttagtgctcacccatgttgataaatctaaattgctcaaccaaaggcttccaaatcacaagaataattcccccctattctgagacccatctttgatgaaccgttcctgaaactaatggaratttagtggttcactctttctcaagcattataatgtcattttatttcttcaccctctcacacacgtgtccttcctgcctcagtgtcaacctagagtgctctctcgcctgcctccactctccattgtctttaactcct

SEQ ID NO: 596637 - DNA, 390 bp, Homo sapiens
actattggggaaaatttcatttttctgaaagcataacacattagtgggaagaacatgaatctgcaccaagagaggcctactgcccgttagctacacagacaccaagggccaggtgtttaacttcaggtctcagcctcctagggagcaagggagatcaaatggtctattagttagctgtccactgattcagggtagtctccttgtgggtctggatcatgtcttgagccccctgacatgsatcttctagacatagacttgaaaacacggattggactaaactgagttattattatggagagagaaaacagtatctctataatttctttaggattaagctgagtgatctgtataatactgattgtttaaaaatcctaagggagactattgctg

SEQ ID NO: 596638 - DNA, 563 bp, Homo sapiens
ctgactccagaaaacagacaccaagatggtgttagatgggcaagaggttttttgacaaagggaggaagagaaggcaacaagagtcttcagacttcagttgaaatctgatacctatagaaggaaatagggaagaaagggacatcaagtagtagaagggttggactgcagagcaattcaggagttaatccaggtcaatagagagtccccataccatagtcactcttaggatgagtcctgtgtcttcccagaatgagcctgtcaccctaagttaattatgcccctgcagcagaagatcaaggtagygtgttttcatggccaccgcaagtgcctactctagataagagatctgttcttcagtgagtcatcaaatacactcttaacaaatacaaaatacacaaaatttaatttaattagcttatccaaattcaaattaacctgtacaaaacaggaacataaaatgatctttgaatatattatgtgatggtacatttatatttcattatatttattactcttcttttaaaaagcatcttccaggtttactatcacctttgcatgcatga

SEQ ID NO: 596639 - DNA, 587 bp, Homo sapiens
agatataatattgagggaaaacagtttttgtagttctgggaacaaaacaatgtattaaaaataaaatttattttaaaaattatatattaatataaagatggttggttgcaataagaataaagtgatacagaaacacaattctgaaaaaaaatcattaatgtctgttgctcaggttatgtgctgtgtgtagactgcaccctgcctggcctgaaagtagagagaaattaaaatataaaggcatgttaaggatactaatttcctcatctttcttggcagtcagtagttgctgttgtatttctaagatttaagtgtgttgttcaaagtactaaaagaagctattagaagaagagaaaataatctatacaccttacatattgccctgtccaagaggaaataaagaattgaggtcaactaacacaattctaacacaagataaaatacaaagaaacttacataaatgtatacacacacacacacacacatacacgcraatgaagagaggccattctatgtcatggaaaatatgtcataacattatgcaacattcgtcttccacttgcactcaaataaaacatcgtacagtgttg

SEQ ID NO: 596640 - DNA, 561 bp, Homo sapiens
ctaccagctgttcccgatctctctccttcttttagggcttccctatcccctgaggcaaaactgttaaaattagacgaattaataatactaattttaatagtctctaggtgttcaagtgaaaagaaaaagagtcacatgtatctcactgtaagtcaaaagttggaaataattaagcttagtgagaaagatatgttaaaagctgaaacaggccaaaagctagaccacttgcaccagttagccaaactgtaagtgcaaaggaaagttatccaaggaaattaaaagtgctactccagtgaacacacgaatgataagaaagtgaaaatacgaaaaagaaggtggctgatatggagaaactttgagtggtgtagatagaagatccaaccagcaacatttcattttgccaaagcctaatccagtgcaaggccctaactctcttcaattctataaaggctgagataagtgaagaagctgygtatacattccactgcatatatatttcaatgcatatacatgcattactattcacaatagccaggatatggaatccacctaaatgccgag

SEQ ID NO: 596641 - DNA, 529 bp, Homo sapiens
ccactcacccaaatcaatcatcattttcatcctcttcatcatcattttcaatacccttgatgctctgaatattcactaattagagccaattctcgggtcttctatatctttgcaaactttcccaatgtgacttcttcaaggtaccatctaccattaaggttttaataaggtggtgatagtgtttgtttctacaatttcatttccaaaccacttctcytttcttcttgttttggaaaccacccccaaccccaattcctcatccgtatcataatatctgctctactgactctaccgtaatttcattacccatagctctgcacatctattcttatgaagctacatttccacaacccatctcaataggcacgttcttgcatttatcctcaatccccttgccctgctctccctttcttatactccctgaattagtctatgtgttatctgcacctgtgcaggtgcagtaagctacacacgaacttaaaagtatgctgactggtctcatttaaaaacaattaccctacatctcaag

SEQ ID NO: 596642 - DNA, 567 bp, Homo sapiens
aaaaaaagagaaggaaacactggatagttgatcttcaacagaaataacttcaggaagtcacaaagcagtagatacatttatcccaataaaataaagctatataatctgtatacaaatagatagatacacatctgggaagtaaatgatgtagcagaaaagaaagaaagaaaaagagaaatgcaaaaatgataggtaatggcaaaagaggctatttggaaactgaatatattttttcaggcttttatgtggtgctttccattgtagtatctgaaagccacaccttcctatctatttscctgtctataaacctgtagtgaagtcttataattttattttgcctcagcattcattttgaatgtaagttgaactttcttatgcaggaaatagggcttagtcatccttgacacagtttttggctctccatctcctctcagttcctcaagatggtagatccagatgtctgccttatacaaccacctcctggtgaccatttccctacaggaagcttggtacaagctacttgagtcccccaccgagccccacatcctcacaaatatgctatagtga

SEQ ID NO: 596643 - DNA, 628 bp, Homo sapiens
catggaactcatgaagacaatgactaaagagaagaatctaatcatgtggttcaactggagaatagattaagaagaagaaagaatcaggaaatttaaaaaaaataataattaaagaatacccagaaagagaaatgaaaagcaaaaaagacagtgaaaaagagtaaagaaagcttaaagaacttatagaaaaccayggggaggaccgttatctacattgtgagagttcgcaaagggaaagaaagagagaaatgagaaaaaagcttatttgaagaagcaatgaccagaaattcctcaactctgaggaaagaaatagacattcagatccaggaaggccaatgaatctcagaaaagattaaccaaaagtaatataccaagatacattataatcaaaatgtcaaaagttaaaagacagagacctttgaaagcagaaagtgtaaagcaacttgtaatatataaaggtatttctgtgagcctataacttaccagcagaaaccttgcacactagaaaggagtgtgatgatatagtcaaagtgtcaaaggcacaaaaactctgttaataaagaatagtatacctggtaaggttgttcttcagtaataaaggggagacaaagactttcagagacaatac

SEQ ID NO: 596644 - DNA, 516 bp, Homo sapiens
caataattgtagcagactttaatattccactttcagtaatgaataagacatccagaagtaaaatcaataagcaacagatgtgaataacactatagaccaaaaagacctagcagacatatacagagcacttcactcagcagaagcaaaacacacattcttctcaagcacaactaggatagattgcatgttgggttacaaagcaagtataaaatttaagaagactgaagttacgccacctatcttttctgaccacaatggaaaaaamcaagaaataaacaacagaagcaaaatgggaaatttcacaaatatgtggaaattaaacaacagaatcttgaacagccagtaatcaaagaaaaaataaaaattgaaattgaaaaatgtactgagataaataaggcaaaaacatcatacaaaagctttttctttttcttatggtttttttgtaaaattaaaaccatggctgaattacaagtgagactgaaaagttgattattaaggataatatatgttttgttt

SEQ ID NO: 596645 - DNA, 516 bp, Homo sapiens
caataattgtagcagactttaatattccactttcagtaatgaataagacatccagaagtaaaatcaataagcaacagatgtgaataacactatagaccaaaaagacctagcagacatatacagagcacttcactcagcagaagcaaaacacacattcttctcaagcacaactaggatagattgcatgttgggttacaaagcaagtataaaatttaagaagactgaagttacgccacctatcttttctgaccacaatggaaaaaaccaagaaataaacaacagaagcaaaatgggaaatttcacaaatatgtggaaattaaacaacagaatcttgaacagccagtartcaaagaaaaaataaaaattgaaattgaaaaatgtactgagataaataaggcaaaaacatcatacaaaagctttttctttttcttatggtttttttgtaaaattaaaaccatggctgaattacaagtgagactgaaaagttgattattaaggataatatatgttttgttt

SEQ ID NO: 596646 - DNA, 605 bp, Homo sapiens
ttctcaacaaagcttatggaaacttgtgcaatattatagctgtgagagctatagcagttgttactagatttcagcaaaactaatgtttaacatttagaacatttcaatcaccattattcactgattcaatgaatgtgtttttaactctagctaaactagtagatattaataagtatatgtctattatgtgatataaacgcttggatgtccaaaaggccttaatttacatctcatcctaattgattgccagctctgttatcttaccacgtaattttgccgtgttttccctaagttctctgattgtcaaatgtgtttggtttatgtaatgmtactaacataaatcctagcacatagtaggctctctataaaagttaactggtatgtgtctctaccctttccttaagtgacagtaaagatgcgaattacccttctttaatcctaaaaattgcagtttcaaatagaaattgagcttagaatattattgatgatgataatggtatctatggttattagaaatgtggagcatataaaccttaaagaatgtataggcaattccaattttctatttttaactattatactaaaaattagtcccactagaaacc

SEQ ID NO: 596647 - DNA, 542 bp, Homo sapiens
gtgatgctatttgcatatttccacagagtaaacttcccttcttggctacctcttggtttccagctctgactaaaataatcttttagtggctgcggatggatctatccacaagcatgtgtcatcctgggttctaattattccatagtaggagaaatagtaaaatcttagtctacaatattgatagaagcagaagttgtaatttcctaacacttggtataaattagtttgaactatgatttagacttatgtctgaattgaagtctttctattagaatayaagaccttctcaatcaggacaacttatacacctatttacatacctattccttactggttccatatatagtggaattgcataacttgttgataattattctcaggtgttaattattcttattgtttctagctatgtcagaaatgatggactcagagatttcctctgccaggccttaaagattttctttgacattaaaggcactgtataattacctctcagatttcgcactctgtagttcttttagtgtctaggtattaacatgatg

SEQ ID NO: 596648 - DNA, 530 bp, Homo sapiens
ctagttgaaaaataaactcctttttaattagtaacactagtagaaggtttaaaattctattgaaggtgtgagtatgtgtgcgtgtgtgttgtgttggatgcagcagaatatgtatgcccttacattgccaaataatattcayaagtcttttatcacacacaaacccacagacccatacgcccttatagccttaagtgtgcagtttggttgaaagatctaaatcactctttattctaatataatgagactattaattcaaattttgaggaaatgtcacagggaaatacttaaataatagaggatcaagagaatatgatgtaggaaatggacagagaaggtttatgggaagttgaaaattatgcagatagttgaaaaacaaataatgttcatgggagggtgaaaaaaaggctttagaacaaaaaatgtctgatgtttattttcagaaattctataatacacaatctcactattcacccaaacttgcaaacacttgaatatcttaagtgaatggttttgagggaaaaaaaatg

SEQ ID NO: 596649 - DNA, 530 bp, Homo sapiens
attctgagtcccaaagaaaggtgagttaaaatgcaaacttaattaaatgcatacttacacattcttgacaatgtggaggattcaaaatagaagattcctgcttttcgggagcttcagatttatattagagggrcacgcaaaatccacagttgttctgaagatcaaataaacagaacctggatttagtccctaaaatgtgaaagcactataaggaaattttgctacatagatactctttgacttatgatgacgggatatctcaataaacccatcataagttgaaaatataataaatgaaaaatgcatttactaccaaataaactcattgcaaagttaaaaaaaaaaactgtaactcgagcaatagtaagtccagatgcccctcaacttagatgaagttggtttccaatgaactcatcgtgaagtcaaaaaattataaattgaacaatcataagttggggaccatctgtatgaataactgagtggcttaaaggaaagtacactgatggattagtcctacagtctagtgggga

SEQ ID NO: 596650 - DNA, 552 bp, Homo sapiens
cttgctttgttgcccaggctggtcttggagaatgcattttgctctttaaaagatccctaacatgaggtgtgtttaggttgaagtgggtatgtgcatgctatttaagattataatagtgaaaggatgttgggtgccaaattaggcataaagttaaaagagatctccaacacctacaacaatattgaaattcagaagtagaaaaatcaaagctctgctcatgcatgtcagggaatgtataacatattaatagaatccatgtcaatactaatatttaagtttacattaycattattgacttaacctaatgccaatgtcacagtgttgttattttatgtagtaaatgctttagaagtggttcatggctggcagtgattggaagaagataatattgcctaaaagtaaaaatctatattccattgtgaaatctcagctaatacaccactttgatccattatttaagatcattctataaagaaatatgaaaaatagcaataattttataattttgttatatgtagtaggatacatcaactagaaaatatttaatgaatt

SEQ ID NO: 596651 - DNA, 552 bp, Homo sapiens
cttgctttgttgcccaggctggtcttggagaatgcattttgctctttaaaagatccctaacatgaggtgtgtttaggttgaagtgggtatgtgcatgctatttaagattataatagtgaaaggatgttgggtgccaaattaggcataaagttaaaagagatctccaacacctacaacaatattgaaattcagaagtagaaaaatcaaagctctgctcatgcatgtcagggaatgtataacatattaatagaatccatgtcaatactaatatttaagtttacattaccattattgacttaacctaatgccaatgtcacagtgttgttattttatgtagtaaatgctttagaagtggttcatggctggcagtgattggaagaagataatattgcctaaaagtaaaaatctatattccattgtgaaatctcagctaatacaccactttgatccattatttaagatcattctataaagaaatatgaaaaatagcaayaattttataattttgttatatgtagtaggatacatcaactagaaaatatttaatgaatt

SEQ ID NO: 596652 - DNA, 578 bp, Homo sapiens
agaccaacatacttctaatattggtgatatttagaatcaccaatacttctagatgaagaccaaagtacttctaatattaaactttgaaataaatgtaagccatacatacaagtaagacaaattaataaaaacaagtaacataattatttacctgcttattccagttcaaggttgcagatggtggagggctatccccgcagctcagggtgctgggtgggaacccatccttgacaggatgccacactgcagggcacactcccacatcagccaaatgattttgcttgcagagcagaggatcaaatgtataagcagtggtaatgtgtccttccctattcctttgtgaagctacttattttcttaaccattcatccaataacaaactaacttattaattagagtatctactgtatgtcagacatggtgggatgtactgggaaaacaaagacaattagtgcacatttcttcctctagtcaagggttcacagtgtagttgtggcagaasgtggtagtttgcagagagactttaaaccacacgtatgaaagtacgtggtgagtaacatgatggagacagtcccatg

SEQ ID NO: 596653 - DNA, 575 bp, Homo sapiens
ggccaattttccaatgatagtctcaagaggaaacagaacatagttctagaacacagtgagctgttccaggttaccagtggcctgatctatttacagcagaaactcttagcttttctttcctcagaatgcattcaaaaccaaagcagcttgaaagaacaaattcatctccataaaccgtggtttataagtaggctaaaatcacccagtcggatgttgtattctttaagcagagaagccaagaatatgaccacgtaaatttgctactcttgaagattacaacaacacaccaaaaggaaaggacagagttggggtctgctcctttactcaccgttccgatgaatgtaccttgggatcctggctgagattcccaatatgaagcggggtagttgtctggggtaaataccccgggtttgtagtctctcgctaagaaaattaaggacatagacacccaagaggastgagtttaggcgtggaggtttaataggaagaagaaagagaaaggagaacagctctctccctgtgtgagagagaggggctcccaaaaggaaaaatccagcctgcagcagacagcacca

SEQ ID NO: 596654 - DNA, 617 bp, Homo sapiens
tacaaataacacttctgcatatctataagatggtagtagaagtatataaatatttatcacttatccctctcaacagaaagacttatttctctgtcatatgaaaataagtaaatcaatcctcaacttccttttcaggtcagagaagtcattgataattccggtatctaattcctttagtaacttggtagcaccaccttgagaaaatggcttcaattactggtcactctcattaaagtatgcacatctaatttttgataagaatttcagtgtgaccttaggagaacctaacaagttctatttgagcagagagacttgttctgtgtcagaggtggaaggtgggaagcttttggctggaactgccaggygattggcctaactgaatctgaaatttggggcagattgcactgagctgaatgataagagctgtactttcctacagttttgtaggccaggcctaattttaaactaacagcatgatgtgttttgaaaatatttgtctgacacggtatttagaaatgtgttcccacaatatggtgagattttcttttactctgaatagagtttcccactaaagaagtattttggatgaaaaatatatccaatctgttaagagatta

SEQ ID NO: 596655 - DNA, 568 bp, Homo sapiens
agaatggggtctatttgaaggaaagtctcactttccccatatgaaagaacattaagcctgaaaaccattttgtgatgggccggttacgtataccaggatagactactgagtgcatgtaaaaataaggtctctgtttttttaattaacaccctagtaaattttcacatragaaaaaatgtaatgaagaaactatgtatttcatattaacatttcatttttgaagatgacttaagtgaactgacaaagacattagttactatgcttgaaggaagcctcccagttctgattcagcagagcattacccgccaagatggtggtgaagccttttcttaccttctcagaccatgccaaactgttggataggactttaatctgtgtgctaattctgacagcaacgcctgtggcagcaaaggtgagtgttctcaattactctgaatgaaccttgattgaatgtgaaagatactgtattaaccagtcacctgtggggctatgttatatgctacttcctgcttagttcaataaggaaagtgacttgagttctaatgaatttcaaaccctgttgcaacaa

SEQ ID NO: 596656 - DNA, 611 bp, Homo sapiens
taatcaacatttttattgggattgtgttaaatctgcagatcacattgggaagaattggcattttaataatattgagtctactaatcaatgatttctcaattatttagctcttctttgacttcctttaacagatttttagagttttctacattcacagcctgtacatattttgttagatttatatctatatattccattatagaatttttcattattatacattgttttgctttattttacattgcttttatgtattgctgatacatagaattaacaagtrtctcttctatattaacctatatcttgcaacctagctatactcatctgtttcaggaggtttttgctatcgttatgggtgttattgtttctttcagatttcagtctttcacctatgatagctgtatttcacctttttatacctgtacgaattttattatatttttcttgtcatattcaccagctaagtcttctgggataatgttaaataaaagtggtaagggaggaccaggtctactgagaggctgacgagcctctcagtggcactcttcattcctgttacaatgctctttatgtctgtcattgccttttgattctcgcgtttctacctctac

SEQ ID NO: 596657 - DNA, 553 bp, Homo sapiens
gaggtgttttggcttcctgtgaagtgggktccccctctgtttggagaaacctacagagtttcagcacactaccactgacacagtggccgtgcatatgggagtctcccagttccagtgtgcaggatttcactaagcacttggtggtcatgcctgatggcctcagcaccaaggttggggttgcccctctcctgtcccggaacattgctacatgaattgggaccttcaaacagtttagccagtttgactctggtcagtagttctcatgcgaggagtgagagcaatcatggtcatccctttgcagtagtaggctggcaatttgtgcaccttggagaggacttggcttttcaagggtaggaatttagggtagaaagatgtggccacactgaacaaacacaataggcagtgatgcacagcagcacagatatttgccagcaagtggcagatccctcctagatggcgtgagccacaggggagagcccgttagtgagccatgagcagtctaaaggcatgcgtctccttcctcatggtcatggccatgcactctaacagctgc

SEQ ID NO: 596658 - DNA, 553 bp, Homo sapiens
gaggtgttttggcttcctgtgaagtgggttccccctctgtttggagaaacctacagagtttcagcacactaccactgacacagtggccgtgcatatgggagtctcccagttccagtgtgcaggatttcactaagcacttggtggtcatgcctgatggcctcagcaccaaggttggggttgcccctctcctgtcccrgaacattgctacatgaattgggaccttcaaacagtttagccagtttgactctggtcagtagttctcatgcgaggagtgagagcaatcatggtcatccctttgcagtagtaggctggcaatttgtgcaccttggagaggacttggcttttcaagggtaggaatttagggtagaaagatgtggccacactgaacaaacacaataggcagtgatgcacagcagcacagatatttgccagcaagtggcagatccctcctagatggcgtgagccacaggggagagcccgttagtgagccatgagcagtctaaaggcatgcgtctccttcctcatggtcatggccatgcactctaacagctgc

SEQ ID NO: 596659 - DNA, 539 bp, Homo sapiens
atcacatacacacaaatttcttttcaacaaatatattaaaatacttttttagggaatatgtgacaatttgaaaaaaaacttgcaaatagcatagcttagaaatataataaaaatttaagaaaaaattagatatgtcatgaagacagaaaatatttgtagctactagtctatttcactatcactaccataaaatgcacacaaatctgttataaaaattaaaatttatcaaaattacacacacaaacacaaaacatacatggtaccattcagtccagagaaatgtaaacaaacatgaagatggaatattaaataataactgcataaaattaactgtagtaatgctgtactactctaataatttcagagccatcccctgttgctattgcaggggaaccaagcrttgctaagatccacttaaaatgccctgtgaagataatcatctccatgtgagcctctcatctcttcagtaaattgcttatcccaataaaaagcaatctctcatggctcttgcatattttttcattgtgttcgatgcaaca

SEQ ID NO: 596660 - DNA, 539 bp, Homo sapiens
atcacatacacacaaatttcttttcaacaaatatattaaaatacttttttagggaatatgtgacaatttgaaaaaaaacttgcaaatagcatagcttagaaatataataaaaatttaagaaaaaattagatatgtcatgaagacagaaaatatttgtagctactagtctatttcactatcactaccataaaatgcacacaaatctgttataaaaattaaaatttatcaaaattacacacacaaacacaaaacatacatggtaccattcagtccagagaaatgtaaacaaacatgaagatggaatattaaataataactgcataaaattaactgtagtaatgctgtactactctaataatttcagagccatcccctgttgctattgcaggggaaccaagcgttgctaagatccacttaaaatgccctgtgaagataatcatctccatgtgagcctctcatctcttcagtaaattgctkatcccaataaaaagcaatctctcatggctcttgcatattttttcattgtgttcgatgcaaca

SEQ ID NO: 596661 - DNA, 491 bp, Homo sapiens
ttcataaaactagttatgaaaaagctaataaatatatcatagcctatcaaaagctgcaaaacttgaaaattatttttatgaaacaaacatgacattggtcataaactcaagatagatttaacatrgaaaacaatactacagatcaatctaagtaagtacatgattgtgtaagttctaataaaacagcaagatgaactaactgcattatagaaagatataccatgaccaaataaaattgttccaggaatacacagatgattcaatattacaaattatgtaaattatttcatgttattaataaaattttttctataaaagctaaaaagataggtgatgagtcatatctcagttttgtttaaaaaattatatatgggaatataatggaaataaaaaatatatattatgctgtttttaaaatgtatgaaacagcatgatatttaccgatattccaattaagtctgggaattaaaaaaaatcctttaatgatattg

SEQ ID NO: 596662 - DNA, 589 bp, Homo sapiens
atcagatgaccatactgtcagttaaaactaggtaccttcaaaaactttkccttgtggaaaattgaagtcaattagggcctcaaagatatcttgttcaaatttcggttaaaatatgtttatccaaacatgaaaatatcatgatggcttgcatatttatatgtatctatatctatttatctatatctatgtatgtatttatatctttctctctcatatggatatcataggtatcatatctatatcacatagatagcatatctatatatcatagatgtatcagagagagagggagagagagggagagatggagattttttctgtaagttgatttgagtcttttctgataaactggcatgacttcatttgaccattatgattttctcagggaatgtatttttaactaacaattctcaacagcaagagttcagatattttacaaccttatcaagttggaagtcaatctatataaacatggatgtcatcctagttttacagtctgctagagaaaatgaccttaatagccagagttttagttccctggagaacaagaaccagttttggaatttagatagtaatggcatttcggcat

SEQ ID NO: 596663 - DNA, 590 bp, Homo sapiens
  misc_feature 1, 2: n = A,T,C or G
nncataaaaatcccgggactcagccagactcagatgtcaggactaccaactgcagaaaggagctacccacttcaggtatccttgactctgtgagatgacctgcctgcagataggagctactcactccagttctcctctctgctgagagctaaaccgtcatcrggaccacctgcctgtggaaaggagctacccactttgggtctcctgagaactgttctgttgctgagtgaagctcctctccaccttgctaaccctccagttatccacatagctcattctttctggatgtgggaaagaactttggaacctccaaatggcaggactgtaaaagctgtaacacagacagggctgaaacatgcccctgccacttgccatattgcgggcgatgagaaggacagaagagctgcagtccttcagagatctcagacctaggggttccctgagctagggctatgtcaccctctttggggctctgtggctcctggcatctccaggcttccgggtaccattgcatcccctcgtccagaggtagatgcctgcagcggaagccatgtgcagtacatctggtcctgctgcagcctcacatagtg

SEQ ID NO: 596664 - DNA, 513 bp, Homo sapiens
ggaggagggatagcattaggagaaatacctgatgtaaatgatgaattgatgggtgcagcaaaccaacatggcacatgtatacctatgtaacaaacctgttgtgtgcatgtaccctagaacttaaagtttaataaaaaaaagaaaaaaaagataatatgtaaaagaagggaaaagatacatgtgtgacaggatgagacagtaaaacatattcctaatttgagaaagataaagtagagtgactagaagacaagcaatatttgaagagagtggctgagaattcttttaatagttgaaggatatgaatattgatattcaggaagcattaaattacccaaaccatatgtatgaagtaatcaaacaataggatgctgagttatacaatatgttgtcagcctaattgttatttttttccaggaaatctatattttttggtggtrctaagattgccttttttttgagatatggaggtgtcaagttgtggatttatttttttaaattttgcttggactcaat

SEQ ID NO: 596665 - DNA, 513 bp, Homo sapiens
ggaggagggatagcattaggagaaatacctgatgtaaatgatgaattgatgggtgcagcaaaccaacatggcacatgtatacctatgtaacaaacctgttgtgtgcatgtaccctagaacttaaagtttaataaaaaaaagaaaaaaaagataatatgtaaaagaagggaaaagatacatgtgtgacaggatgagacagtaaaacatattcctaatttgagaaagataaagtagagtgactagaagacaagcaatatttgaagagagtggctgagaattcttttaatagttgaaggatatgaatattgatattcaggaagcattaaattacccaaaccatatgtatgaagtaatcaaacaataggatgctgagttatacaatatgttgtcagcctaattgttatttttttccaggaaatctatattttttggtggtaytaagattgccttttttttgagatatggaggtgtcaagttgtggatttatttttttaaattttgcttggactcaat

SEQ ID NO: 596666 - DNA, 513 bp, Homo sapiens
ggaggagggatagcattaggagaaatacctgatgtaaatgatgaattgatgggtgcagcaaaccaacatggcacatgtatacctatgtaacaaacctgttgtgtgcatgtaccctagaacttaaagtttaataaaaaaaagaaaaaaaagataatatgtaaaagaagggaaaagatacatgtgtgacaggatgagacagtaaaacatattcctaatttgagaaagataaagtagagtgactagaagacaagcaatatttgaagagagtggctgagaattcttttaatagttgaaggatatgaatattgatattcaggaagcattaaattacccaaaccatatgtatgaagtaatcaaacaataggatgctgagttatacaatatgttgtcagcctaattgttatttttttccaggaaatctatattttttggtggtactaagattgccttttttttgagatatggaggtgtyaagttgtggatttatttttttaaattttgcttggactcaat

SEQ ID NO: 596667 - DNA, 513 bp, Homo sapiens
gaaaactatttctcgttgacatgaaagaagacatccgtctatttaacactattgtggaaggcatggagatttgctcattgaagtccaagacaatttcattttattttcattatttatgatacattttttgaatatttaagacaggctcttgatcttggagttttgctaaaatttaaaatgcagagggaaatgtgggttgctctctatggaacaaaaccataatgcatgttcttcattctcagataaaatctgaaggtgagaaaagagcaactagcactgcgatcccacctttccgtcaggtgcaccatcaactttattgtacttaatccttattatagccattttagagtggtaatattagtatcttcaagattagaaaaatattgagaaaagttaaccgtcctatccaattcacaagacttataagtggtggaactgttayttgaagcaatactttccatgtttcaagtctgtatccttctttaaagattctgcctttcagccaggtgcggt

SEQ ID NO: 596668 - DNA, 458 bp, Homo sapiens
tttatcatttgacagcttctgtacaattggagaaattgcctctcatgcacacttaagtgtgtcatccttgtatgcgtctctttttccaggtgttgctctagtgctcttggtgctgctgctagaaaccccctgctaggttgccatgcaattgtaactggaggaaccccatgaggaaaatgagaggtggggtggtgaataatttttttctccctttcttttcttcctcatacaagatctgaagatkactgtaatgagacttctctgcaaatgttctgtagaacaaaaatcggttgcacttagttttgacacgcttgatgatacattctaagacagctgtctctcctttcctgcttcactctgcctctctctgtgttccttgggtataatgctgtcaatattagcatcagcctatgctttccggggagcctaggctaagccaagtgaagccccaggtgatg

SEQ ID NO: 596669 - DNA, 592 bp, Homo sapiens
ggaggttgcagtgagccgaaatcgcaccactgcaccccagcctggacgacagagtgagactcaataacaaataaatattcacgcagacaaatactatctgtgatggctaatcctaggggtcagcgtggctggaggagggtgcctagatggctgggsaaagttctttctcaagagactgtgagggcgttgccagaggagattgacagctgagtgggtgactgggagaagaagacctgccctcagtgtgggggaccagccaatccggtgccagcgcggctggaacccggccgacagaagatggcggatgagcagcgtgcagggttttctccctgtggctcactctctcttactgtgctgggcggttgcttcctctcctgctgcccttgggagtcagactccaggttcttcagcctgtgcccctggggctctcgggccttggaggactgactaggagcacacggtgggcctctctggtttgggggcctgggacgtggcggagccctgcagcttctgtgcggcctgttctgggcgtcgcgttgaaacgccagccagttccccaagtaagctccctgcacacacgcctgatagcctg

SEQ ID NO: 596670 - DNA, 592 bp, Homo sapiens
ggaggttgcagtgagccgaaatcgcaccactgcaccccagcctggacgacagagtgagactcaataacaaataaatattcacgcagacaaatactatctgtgatggctaatcctaggggtcagcgtggctggaggagggtgcctagatggctgggcaaagttctttctcaagagactgtgagggcgttgccagaggagattgacagctgagtgggtgactgggagaagaagacctgccctcagtgtgggggaccagccaatccggtgccagcgcggctggaacccggccgacagaagatggcggatgagcagcgtgcagggttttctccctgtggctcactctctcttactgtgctgggcggttgcttcctctcctgctgcccttgggagtcagactccaggttcttcagcctgtgcccctggggctctcgggccttggaggactgactaggagcacackgtgggcctctctggtttgggggcctgggacgtggcggagccctgcagcttctgtgcggcctgttctgggcgtcgcgttgaaacgccagccagttccccaagtaagctccctgcacacacgcctgatagcctg

SEQ ID NO: 596671 - DNA, 518 bp, Homo sapiens
tgttagacagtcactcagtcaaccagtcaagaaatacttattgaaaaatctactatttgccaggtacatcattcaactggagactaacagggaccaagacatgagcattgtcctccaggaacttcyagcccactcagagatacaaatgagtgcataggaaagtaaaacactgtgtaatgtagagaaaatagaagattaacataaagaggcagcaaatatcttttgaaagtcaaataaggctttccattgtggaatgaaataacctaagatgagatggatgaacaggttttagcatattagtggtggtggtggagtgctgttcagtgttttatgcataaaagcatggcaggtgcagacttccagagtttggagagtatgaagtggattgattgagcttcgttttatatcagtattgcaatggtattactgatactgagtgcattgacttagaagtgttttccttactttcaattttggtttatttttatgctaagcaagtaaaggttcatgttcaaata

SEQ ID NO: 596672 - DNA, 642 bp, Homo sapiens
tttctttcttaaattttccctctcacatcccacatccagtatatgaataggtcctgacatctctacctatgatcactaaggagttaccattctatttaaagtcaacatcagtgtatcaccttaactgttgcaacaagtctgtaactagtctctctgttcccacttttgccccatgacacaatatttctattcaagacctagttattgtttgaaaatataaattggattataaaaatattctgttcaaaatatttcaatggttttacatcttactsagaaagaaaagtttatcattcaccatggtgtaccagctcagtgtgacctgctgatgctcagaggacagaataactcatatctagccatactgccatcttgctccgacttccggggctttgtactttctgctgctcttcctaaaatgcattctccccaggtccttgcagagttaactctttacgtcattgagacctccattcaaatgccacttcttcagcaaatatgttttcattagtccattttaatactgctataaaggaatacctgatactgggtaatttataaggaaagacatttaattgactcacagttctgcattgctgggatggcctcaggaaactttcacatggtggaaggtgaggcagc

SEQ ID NO: 596673 - DNA, 642 bp, Homo sapiens
tttctttcttaaattttccctctcacatcccacatccagtatatgaataggtcctgacatctctacctatgatcactaaggagttaccattctatttaaagtcaacatcagtgtatcaccttaactgttgcaacaagtctgtaactagtctctctgttcccacttttgccccatgacacaatatttctattcaagacctagttattgtttgaaaatataaattggattataaaaatattctgttcaaaatatttcaatggttttacatcttactcagaaagaaaagtttatcattcaccatggtgtaccagctcartgtgacctgctgatgctcagaggacagaataactcatatctagccatactgccatcttgctccgacttccggggctttgtactttctgctgctcttcctaaaatgcattctccccaggtccttgcagagttaactctttacgtcattgagacctccattcaaatgccacttcttcagcaaatatgttttcattagtccattttaatactgctataaaggaatacctgatactgggtaatttataaggaaagacatttaattgactcacagttctgcattgctgggatggcctcaggaaactttcacatggtggaaggtgaggcagc

SEQ ID NO: 596674 - DNA, 566 bp, Homo sapiens
tcttcaaatttccctctgttgcatcttcccaccaccttctccatgtgtgtctgtgtatgaaatctccctttacctccttcttagaaggaggtgtgattacatttagggctactcagttaagctaggagaatgtctccacctcaagatccttaactttatcacatctgcaaacaccttccttctttctctctttttgccatatgatataacattcacagattccagagattaggacatggatatctttgggggtgggggyatttttttaacctaccacatgagtattggaggacttcttatatcataaagaagttttaagatttacaacaactcaccatataatacacagttcaagatttatgctaaatgactagaatacaagtgaatgacaatggggccctgaaattaagtgatacacaatatagggacattacacaatatagagacattacacaatcttgtataggtttgaatgtttttttcttatagaagcaaaactacagtgacttgtagatcagcatataaatgtgcccagaaaagctttcattttgataggattgcgtatc

SEQ ID NO: 596675 - DNA, 586 bp, Homo sapiens
ataaagctaacaaataagcacataagattttcaacttcattagccatcattagcaaaatgctaattaaaattacaatgagatgtcacgacacacctataagagtgactaaaatagaaagtgtgatagcaccaaatgatggtgtggcagtagagacactagaccactcatactcatggtggaaacataaaatggtacgacatcagaacatcttagagttctggttttcataaacccctatctgtttctggtgaccaaggatttaattttctttcttatgggttcagatcaaaattkaattctgcattatcttagtcttccattttacaggaaccacaaaaacttgtttgaatttcctaatacatacatacatacatatatacatatcaagcaaaactgtgtatatttaaaaaataaagttttttttaaattaaatacatctatctgcttgtgtatactcaaatgtacacacaaacactttatttttttaaacgcatagtttttctgaaaataaagattttgcttattttcattttgttcttttcacctttctaaatttaaaatataaaaataaacttcatttttaaa

SEQ ID NO: 596676 - DNA, 505 bp, Homo sapiens
accattattatattagtggcccttatagagtgatcccagatcagcatcaccagggaacttgccaaaaatgtaaattctgagaccctgcctcagacattctcaattagcaatcgcagggcagaacccaccaatctgtagtttagcgaattccctaggtgtttctaatgaatrccaaatttgagcaccatcgtattatcacatgtacttcaaggcagtcaccagaccatgaataactaatgacgtgttctttattcctccttgggaactagttcacacacttccaggggtgattatcgagatttgaaaagtgaggcaggtgacatgggaaggaagttgtaggcaaaaatcaatgggataaataaaaacctgtaagaaattattttgcatataaggtttaaatgtctgttgtaacctgtttaaatgagatttttttaaataatgtccttgagtaagttgggcttgtaactgcaagccctaaaacaatttattctagttgtgtggcaat

SEQ ID NO: 596677 - DNA, 505 bp, Homo sapiens
accattattatattagtggcccttatagagtgatcccagatcagcatcaccagggaacttgccaaaaatgtaaattctgagaccctgcctcagacattctcaattagcaatcgcagggcagaacccaccaatctgtagtttagcgaattccctaggtgtttctaatgaataccaaatttgagcaccaycgtattatcacatgtacttcaaggcagtcaccagaccatgaataactaatgacgtgttctttattcctccttgggaactagttcacacacttccaggggtgattatcgagatttgaaaagtgaggcaggtgacatgggaaggaagttgtaggcaaaaatcaatgggataaataaaaacctgtaagaaattattttgcatataaggtttaaatgtctgttgtaacctgtttaaatgagatttttttaaataatgtccttgagtaagttgggcttgtaactgcaagccctaaaacaatttattctagttgtgtggcaat

SEQ ID NO: 596678 - DNA, 505 bp, Homo sapiens
accattattatattagtggcccttatagagtgatcccagatcagcatcaccagggaacttgccaaaaatgtaaattctgagaccctgcctcagacattctcaattagcaatcgcagggcagaacccaccaatctgtagtttagcgaattccctaggtgtttctaatgaataccaaatttgagcaccatcgtattatcacatgtacttcaaggcagtcaccagaccatgaataaytaatgacgtgttctttattcctccttgggaactagttcacacacttccaggggtgattatcgagatttgaaaagtgaggcaggtgacatgggaaggaagttgtaggcaaaaatcaatgggataaataaaaacctgtaagaaattattttgcatataaggtttaaatgtctgttgtaacctgtttaaatgagatttttttaaataatgtccttgagtaagttgggcttgtaactgcaagccctaaaacaatttattctagttgtgtggcaat

SEQ ID NO: 596679 - DNA, 555 bp, Homo sapiens
cacaatagcactcactggtatttaagaccaaagaaaaggaattgtatttggcttatcaacttaaagaaatagttatgaaacttgggcctagcctgcacattacaaagtaaaatggagaactgatccttaatcaggaaaattcaaagctgtacaaatctgaattataatgactttcaaggtagataattgctttggagaaagttgcccaaaattaagaaaaggttaataatggtgttttatgggtaagacagatagactgcttcctgtcaccttcagaatactctctggctgttgcattcctctccagcttcacttaaacacgcatcaaaagcattcaaaattctagccatggaaagccaccctcattatccccatcgagcttagcttttccacacctgtgcacatgtgatttcgcctaacatttcactaggayagcaactcatccctcaatgttgagttcaagtgacatttctcccaagctactcctgctgactgtggtctccttatcctccagaatgcccacagattgctgctctgtacttccatcccaccaca

SEQ ID NO: 596680 - DNA, 626 bp, Homo sapiens
ccagatagaagcctctgggcttcttgcaggagtgactttgagcagagccatgatgtatacatgaaccattaagaagcacattctcagagtaaacaggggtgcacaatatgaaatctcataytgatcacatatgccagtgtgattgcagggtttatttttaggagtttcatttggggatttttttccaaacttcgtgaggcagtttttcagttgtttctcattgaccactgatagctggatgtgccattttaagcttgatgctagatatatcaagtttacttttctgagtgtctttataaaatcaattatgacagtatcatttctctgatttaatatgcttctcaaaacattttttctttattttggcacattttttctactgtttattatcatggggaaatgaatctggagagcattttacacaaaattgtctggtttctggaactcaatacattttatagtgcttgaaacatttcattgtccgtgctggtcattttgctttcctcaaacataaacttatattgattcatgatatacgatgctcctttttcattattccagctaggtgcactttcagattcttttttccccaaagtttactcttcacaaaagcattaaatatagca

SEQ ID NO: 596681 - DNA, 626 bp, Homo sapiens
ccagatagaagcctctgggcttcttgcaggagtgactttgagcagagccatgatgtatacatgaaccattaagaagcacattctcagagtaaacaggggtgcacaatatgaaatctcatactgatcacatatgccagtgtgattgcagggtttatttttaggagtttcatttggggatttttttccaaacttcgtgaggcagtttttcagttgtttctcattgaccactgatagctggatgtgccattttaagcttgatgctagatatatcaagtttacttttctgagtgtctttataaaatcaattatgacagtatcatttctctgatttaatatgcttctcaaaacattttttctttattttggcacattttttctactgtttattatcatggggaaatgaatctggagagcattttacacaaaattgtctggtttctggaactcaatacattttatagtgcttgaaacatttcattgtccgtgctggtcattttgctttcctcaaacataaacttatattgattcatsatatacgatgctcctttttcattattccagctaggtgcactttcagattcttttttccccaaagtttactcttcacaaaagcattaaatatagca

SEQ ID NO: 596682 - DNA, 550 bp, Homo sapiens
aagtcaacttgtccttttctttcagtgaattatgcaagattttggcttatacacatggcaaactcttgtttaaagtcaatttattaattaaagcacctattctgctgaatgaattgctctgttgatattattgacagtttatattctgcctacttaattactgtgttccaaaataataaatttcttttggcataccaaggccaaggtaaaattatgaaacagatagattcttccatgctcctcttcttccttccttgttagaatttggctcaaggagaacagaaatacaaagggaacacagactgcaaggagagctgyctactcaacaatggatctgatccctaaatggtagtaaccagaacccaggtagaccaatatgcattccagtagccagtgctcatggctttgggccagtgttcttatccttacaatcaaagagatattaatcactcctatgtggaccatattgtgtgttttctacattattatttaatcttcacaacataaagatttattgttagctctaattacaaataagaggttgagaacc

SEQ ID NO: 596683 - DNA, 640 bp, Homo sapiens
agtctcttgggtatcccttccacttctttctgtacctcctggtttcaccattactctggcaattgctagaatttcaggtcaccctaaaggctctgtgacctctttcttatgacacacagacactacgtgctgggggccaagaatgagggtgatgtacctgtggcagctgactccatcgcttttcctcatgtgcatcgcaactgtggtttaccagcccctggcctcactgctgaaaccctaccaattctgatagaacccagtaattcacatctgcttcttggaggcagctggaatatgctckaaatagttccttggatcccattcatccaggacccagtaagaacacagcctcaataacagtgtaagaatgcatctctgatttaggagtgtactccggattaggtaaactcagccctgatggcggagagggtctcttggggcaagttcaactccagccatgaacctctaaataaatctggcccatccacactgtacaccactgaggatggatataatcctgttgatgcaattttcctgaactccctacttttctctctcttttttccaggtcctgtttcctaccccaggatctccttacctagatgatatgttcaaatgcatgtctccaattttaacctga

SEQ ID NO: 596684 - DNA, 551 bp, Homo sapiens
tgctgagtgtgagttctttgtatatgatggatacatgtcctttgtcagatatatgatttgacaagtatcttctccctttcattttcttgatgatgtcgtgttaagtgcagaaaggttttttgtttgtttgtttttagtgactgggtctcattttgttgcccatttgtggccttgaactcctggtctcaactgagcaatcctcccacctcaaaacttgctaattgtgatgaagtccaatgtatttatttattttcttttgttgtttgtgcttttggtgtcatagcaaaacatacattgtgggcacgaattgctctactgtctgattcaattaaatttggtcscctgtaacaggggcaatctttgaggccagttttgaggcttgttttgataccacaaaggctcttcttagacgtctctttccctggttctttttcttaaacttacagcggtataaggtttagcttgttgctaccatggagctaccaatccctcttaattgcttacaaccaaaatttccattgttttggacattttccttagacttgaacttt

SEQ ID NO: 596685 - DNA, 513 bp, Homo sapiens
tagtaaaataaacataaaatttgccatcttaaccgttttgaagtatgaggtttattgacattaagaacattcacattactgtgaaaccttcaccaccatccatctccagaactcttttcattttggaaaatgaaaaactctggcatcccataaacaacaacttcttattcccccttccccacagttcatgacaacccccattctacttgtgtctctatgaatttgtctactstaggtatctcataaaggtgaaatcatacaatagccgtctttttgtgactggcagttttactttgatgtaaaatacacgcgcgcgcgcacacgcgcgcacacacacacacaaattaggttagccttacacagtctccagccttggaaatgacatttgagggctgtatgtaaaggctttccctgttctgtagagaatatggggactgaagaacaaactttatcagtctatgccaatgttcttccctaatcttactctccagcattttacagcatgatgagcca

SEQ ID NO: 596686 - DNA, 506 bp, Homo sapiens
ctgaagaacaaactttatcagtctatgccaatgttcttccctaatcttactctccagcattttacagcatgatgagccaagtgctttacctttgggctgggtaccgtttgctcattctttccccttgcctgtcatacttctgtttacctgctaatatgctatacacattacaagaattctcccaaaattcatggcttccatgaaatcttattctacttaatggaagcactttacacttcttgtacagcatttgaagaatgagttatctgtgtaatatttatgggcttctgagtattcatttactcttcttcattccattataagcttttcaagtgatgtacttatgacatatttatatttagtcctgtacagcrgcttgcaaatattagaggcttagttaatgtttaattattacctgacagagtacatgtttgttatagaatagtttaccccagtcagctattaaccagcttgaactcaattgtcaacttttttttttttttttt

SEQ ID NO: 596687 - DNA, 538 bp, Homo sapiens
tcacatagtgtgctgcattattcttatctttagcatctccacaaacataacttctgtcctcagaaaatatctatttaatrcccacagtgataagcacatggtcaatgattgaacacgagttgaacgaacagttgaaaataaggcccaagtttatttttctgtggaagttgaccattaagtaagcaccaaaaatgtattcagagataagcagaatttttcataatcaagtgcacacacatgaaataccttgtttggcagctgaggggaaaatggttttaagaattgtgtccaggggccgggcacagtggctcacgcctgtaatcccagcactttgggaggccgaggcaggcagatcacgaggtcaggagtttgagaccagcctgaccaacatggtgaaaccccgtctctactaaaaatacaaaaattagctaggtgtgatggcacatgcttgtaatctcagctactcagggggctgaggcaggataatcgcttgaacccaggaggtggaggttgcattgagccaagattgcgccactgc

SEQ ID NO: 596688 - DNA, 331 bp, Homo sapiens
ttcataatcaagtgcacacacatgaaataccttgtttggcagctgaggggaaaatggttttaagaattgtgtccaggggccgggcacagtggctcacgcctgtaatcccagcactttgggaggccgaggcaggcagatcacgaggtcaggagtttgagaccagcctgaccaacatggtgaaaccccgtctctactaaaaatacaaaaattagctaggtgtgatggcacatgcttgtaatctcagctactcagggggctgaggcaggataatcgcttgaacccaggaggtggaggttgcattgagccaagattgcrccactgcactccagcc

SEQ ID NO: 596689 - DNA, 528 bp, Homo sapiens
aaaagactagagtttcctccacttcaagctttctcttctcagatctttccaactgcagcttttgtcctcatgttagcaatgactatagcaggcaaaggttagagtctgcataaatgaagctggtcccctttgtttgatggatccaacattacaccgaccaagtaaacatcctcctttcttagcaccatagacacactggctctccctcctcatttcgcctaatagaaaatgcaccaagctacaaatgtatgtgttatcaaagtgccaaggccaaatccaaaacaattagtgtaaaatcaatttaatcaatcaaaacaaattacaaatatggcactgtattattgtatgtacatgtattgaattatatgtcattgttatcattggattattgtatttcaataaattgcagtgcaaaaaacttacttttcaagcacatgctatatgaaaaacataacattttcrtcaagtagaaattgaaaataagtgttaaaatgttcaatgtaaagcatataattaatatatgatttc

SEQ ID NO: 596690 - DNA, 373 bp, Homo sapiens
aaattttatgaatgccctactatgttatgcaaaatgctttaagtgttgtgatgacaaaaacgttctgagttgcacataatgacaatagaatttaaactaacatatgcaaagtcaakggagtttattggaaagacctctgaagggttgcaccgaagccagaataaaggattcagactagctcaggaatacagctgggactggggtatcttccgacccagaagcaccaaatagtgcattaatcctttcccagggaaccagaaaaaaatttctcttctcacagtaatttatttctttttttttttctctatctgcttcattcttctttctaactgcagacattcttctgctcataagtttataggatagaccctga

SEQ ID NO: 596691 - DNA, 505 bp, Homo sapiens
tgttaaaacattttctattgattttttcattatgtttaattttctttaaatccttgggcttatttttacaaatgatttttaaagtcactcacttaartctttcctctctgctatctctgcatctgcctctgttgactgatttttctcctggttacaagtctacatttttctgctttcttgcatgttttgtaattttcagtggatgtcaaacataatttttaatttcaagtgtgtagctttaattttttccttcctttttttgtataaatctttacactatggcaaatttagccctgttactaagatgccaccctcctgaggtttccactaaatgtcccatacagtcaaggaggactctccacctggctggttagaactcatagtctcccagcccttgtgtcctctgcgaattgttcatcttacagctcctggtcattgttagcccagcctcatggtgttgcatcttacataggcactattggttttcctcaatagatgcaatggg

SEQ ID NO: 596692 - DNA, 506 bp, Homo sapiens
ttgttaaaacattttctattgattttttcattatgtttaattttctttaaatccttgggcttatttttacaaatgatttttaaagtcactcacttaagtctttcctctctgctatctctgcatctgcctctgttgactgatttttctcctggttacaagtctacatttttctgctttcttgcatgttttgtaattttcagtggatgtcaaacataatttttaatttcaagtgtgtagctttaattttttccttcctttttttgtataaatctttacactatggcaaatttagccctgttactaagatgccaccctcctgaggtttccactaaatgtcccatacagtcaaggasgactctccacctggctggttagaactcatagtctcccagcccttgtgtcctctgcgaattgttcatcttacagctcctggtcattgttagcccagcctcatggtgttgcatcttacataggcactattggttttcctcaatagatgcaatggg

SEQ ID NO: 596693 - DNA, 512 bp, Homo sapiens
cgtgggatcaaagccacttacaaaattgcagtacactctgaattttagaataaagacattcttagggacacataaataaaatcacactgttctctgaagttagactgtcatgtagatggttggtgccaattaacgttattactggtaaatgttctactgaggaggacagattaaaccatctgtttagactgtgagatattccttcagcagtgaggtaggaatccttcctgccaccttttaacraaggacaatatcattctgtgtcttactggtatacacgttatgaaagattatttcacttccttacacatgctcaatggggtttccaagtttccagaaatgttttcttcttcctaagaaaattagttcttatccatcttaaatattttcttaccaattcattgaggttctcaaaacaatgaaatgaatcattgaagaaatgctcctacacagacagaaaaacacctataattcttgctgatcagagttctttacagaggaaattccagaat

SEQ ID NO: 596694 - DNA, 490 bp, Homo sapiens
ataagtgttagttgaattaagtgaacaacttcaggttctttgccttttctgatggtgatggtggcaataataattaacattcattgagaacttccatatggtattgaaatcaatcagtaatatcaattgattttatggggtggtgaagtttgaagcaatgatttaaaaaatttctaaactataaatctcctaaatactaggtattttatcccaggtactggtacaggttgccttttaaatgacaagtaacaatgtatattgtcagagggatttytgaagtaggttaccatagttattaaggcagaagtgccacaaagtgatattcaggatcataaatagttagaactagatgggcccaagtcactgatatctcatttgtcagttcagaaatcccttgtattttaccagtgagaaatgccaactgtagaactgtggaatcacggggagaatactgaagtagaatgaggaaatcagtaaaaagaagtggcag

SEQ ID NO: 596695 - DNA, 262 bp, Homo sapiens
gttttcctactctaattggcttttacataaaaatacaggtaaaatttatttgtrcttttttgctatttctgttttgctattctctgtttgtctatgtcttctccacatagacacaattagggaattttgtacactcttgtgccaactgctttgatagtaacaaaatgtatttctcaaactcctagctataaaactcaagtatccacaatttaaattcttttcccctcacttctattatgtttccagtctcaatagaaatcga

SEQ ID NO: 596696 - DNA, 311 bp, Homo sapiens
atcacttgtttctgttgagttacagattcagctgkctatttctcccaatgttagctatttggagaaaaaaaaacatgatggtaattttggggtaacaaatacaatatttgatgaaagcaaatttattgagggttagacaaactacaagatactttaggctgcaaagtcaacacgagacttctggcccaaattgtgcagagtttgggtccagctgcaaagttcaaaggaagaggccatataagacgattctcacttctgacaccaactgccagtccaggggtttcccctgaacaccctcagtttcaagaatt

SEQ ID NO: 596697 - DNA, 311 bp, Homo sapiens
atcacttgtttctgttgagttacagattcagctgtctatttctcccaatgttagytatttggagaaaaaaaaacatgatggtaattttggggtaacaaatacaatatttgatgaaagcaaatttattgagggttagacaaactacaagatactttaggctgcaaagtcaacacgagacttctggcccaaattgtgcagagtttgggtccagctgcaaagttcaaaggaagaggccatataagacgattctcacttctgacaccaactgccagtccaggggtttcccctgaacaccctcagtttcaagaatt

SEQ ID NO: 596698 - DNA, 452 bp, Homo sapiens
ttgctgctttctgccacagtggtccttggtcagctggcacaaattgttttacaaatgcccctaggtctaaaaatagtttggatcacaatgaacacagaaacactttcatcccttcagaaatacctatcaattacttctaatacagaatgaaaaattgacaaaggaaatatgtkgattgtaaaaatgccagttagcttgcatctacatgaaagaaaaatgccatttttattacattagatcatcgttttacatgagttttggtatagcacaatgttgaaccaagggcaaagagagatgaaataatgaagtcttaagatatcaagaatttgaaagaaaaggcaggtcatctttgaaggttagtgacatagcattcatcttctgttgtcaccttttccgtcattccctgtatgcctgatggacagctttcactcaggttcagagaacagcatgca

SEQ ID NO: 596699 - DNA, 375 bp, Homo sapiens
gctaaataataaaggtacacaaagggcaaattatactagatttctttcccacttgttttctatgtctcatgcaattcaccttgattcccttcagtttctgtttaatgtagaaagtggyattttcattattttaagcttctagcacaatgaaagaatttctctttttcatgaactggatcataaatgaaagggaggaagagtgtcctatatcatatttattgttcaacaaaacactgctccacggcttaaattcagtttaaaaaagagaatttattgaacatctaacacatacataaaaggcagtaaagacaaatgagaagagggcaggatattgaagtatacagactttaatgctgagttttgtatcttagtaag

SEQ ID NO: 596700 - DNA, 332 bp, Homo sapiens
cggcttaaattcagtttaaaaaagagaatttattgaacatctaacacatacataaaaggcagtaaagacaaatgagaagagggcaggatattgaagtatacagactttaatgctgagttttgtatcttagtaagttactccaccttacagaggctcaatttcccctgatttaggaaggcgatgctaatgggtattgcmtaggtgtaagtataaaaatgttgtatttaagagaatcccacaagcttggtataaggcagaaaataaatagatgtgacatgaataagtagtttattacatttgtatgctacctgcagactagacgaagcaagaaa

SEQ ID NO: 596701 - DNA, 565 bp, Homo sapiens
tatctgttaactataaatgtaacattcttaaagaattcaaatacattgaattrcagcatgaataatatgttacaatccattcaagtttattttattccaggaacacaaaaatacaaatttcatttgcaattcaaaaaaaacagaaattgatacatatgattgatgtatatacatatttaatgtatttttaaatatacattttttaaaaatagaaatttttctaggacaaatacttaaaatatcactgaaaatagtgttattagctaataccttcctaatcactctggtattacataagaaaccaaaattaaaatttcaggtaaacttagaaactaaaaattttaaaaatattattctgttctccatatgttcatatttaatattacttcttgttttcattcttattcagtgttgctctacaaaaatataacatacaatactaacttttgatttctgttcttattactccgaattgtatacattttctcatgctcttaatttagttatgctacttttctgtactcttggaattttcacatttgtgttcactcttttgagttccaat

SEQ ID NO: 596702 - DNA, 578 bp, Homo sapiens
tgaatttaaattttaattcttcttagattgtctcacagcatcattatatgaaagaaaatttataggtcaatatctgttaactataaatgtaacattcttaaagaattcaaatacattgaattgcagcatgaataatatgttacaatccattcaagtttattttattccaggaacacaaaaatacaaatttcatttgcaattcaaaaaaaacagaaattgatacatatgattgaygtatatacatatttaatgtatttttaaatatacattttttaaaaatagaaatttttctaggacaaatacttaaaatatcactgaaaatagtgttattagctaataccttcctaatcactctggtattacataagaaaccaaaattaaaatttcaggtaaacttagaaactaaaaattttaaaaatattattctgttctccatatgttcatatttaatattacttcttgttttcattcttattcagtgttgctctacaaaaatataacatacaatactaacttttgatttctgttcttattactccgaattgtatacattttctcatgctcttaatttagttatg

SEQ ID NO: 596703 - DNA, 565 bp, Homo sapiens
tatctgttaactataaatgtaacattcttaaagaattcaaatacattgaattgcagcatgaataatatgttacaatccattcaagtttattttattccaggaacacaaaaatacaaatttcatttgcaattcaaaaaaaacagaaattgatacatatgattgatgtatatacayatttaatgtatttttaaatatacattttttaaaaatagaaatttttctaggacaaatacttaaaatatcactgaaaatagtgttattagctaataccttcctaatcactctggtattacataagaaaccaaaattaaaatttcaggtaaacttagaaactaaaaattttaaaaatattattctgttctccatatgttcatatttaatattacttcttgttttcattcttattcagtgttgctctacaaaaatataacatacaatactaacttttgatttctgttcttattactccgaattgtatacattttctcatgctcttaatttagttatgctacttttctgtactcttggaattttcacatttgtgttcactcttttgagttccaat

SEQ ID NO: 596704 - DNA, 578 bp, Homo sapiens
tgaatttaaattttaattcttcttagattgtctcacagcatcattatatgaaagaaaatttataggtcaatatctgttaactataaatgtaacattcttaaagaattcaaatacattgaattgcagcatgaataatatgttacaatccattcaagtttattttattccaggaacacaaaaatacaaatttcatttgcaattcaaaaaaaacagaaattgatacatatgattgatgtatatacatatttaatgtatttttaaatatacattttttaaaaatagaaatttttctaggacaaatacttaaaatatcactgaaaatagtgttattagctaataccttcctaatcactctggtattacataagaaaccaaaattaaaatttcaggtaaacttaraaactaaaaattttaaaaatattattctgttctccatatgttcatatttaatattacttcttgttttcattcttattcagtgttgctctacaaaaatataacatacaatactaacttttgatttctgttcttattactccgaattgtatacattttctcatgctcttaatttagttatg

SEQ ID NO: 596705 - DNA, 565 bp, Homo sapiens
tatctgttaactataaatgtaacattcttaaagaattcaaatacattgaattgcagcatgaataatatgttacaatccattcaagtttattttattccaggaacacaaaaatacaaatttcatttgcaattcaaaaaaaacagaaattgatacatatgattgatgtatatacatatttaatgtatttttaaatatacattttttaaaaatagaaatttttctaggacaaatacttaaaatatcactgaaaatagtgttattagctaataccttcctaatcactctggtattacataagaaaccaaaattaaaatttcaggtaaacttagaaactaaaaattttaaaaatattattctgttctccatatgttcatatttartattacttcttgttttcattcttattcagtgttgctctacaaaaatataacatacaatactaacttttgatttctgttcttattactccgaattgtatacattttctcatgctcttaatttagttatgctacttttctgtactcttggaattttcacatttgtgttcactcttttgagttccaat

SEQ ID NO: 596706 - DNA, 212 bp, Homo sapiens
tccctgtaaaccatactttgcccatatgaagaaaagcaataaggattatttagtaaatagacatggaaactcatccagggttggctgatgagaagctggttagcaagggggtctgccttcagttaggacaaggtctgtgcttcccaygggttctctccacagcaggagggatgcaaacttccctttcctcccctgcacctaccctcaaatgg

SEQ ID NO: 596707 - DNA, 484 bp, Homo sapiens
tgggtggggtaacagccaaaccttatcaatacccaaaggaatataaattactctattataaagacacatgcatgcatatcttcattgcagtactattcacaaagcaaagacatggaatcaatctaaatgcccatcagtgatagactggataaagaaaatatggtacatattcatcatggaatactatgcagccgtaaaaagaatgagatcatgtcctttttagggacattatggagctggaggccattatccttagccaactaatgtagagacagaaaaccaaataccacatgttctcacttataagtgggagctaaatgatgagcacayatggacacagagggtaacaacatccatggggcttttcacaggctagagggtagagggagaggatcaggaaaaataactaatgggtattaggcttaataccagggtgatgaaataatctgtacaataaacccccaagacacaaatttaccaatgt

SEQ ID NO: 596708 - DNA, 415 bp, Homo sapiens
gagacagaaaaccaaataccacatgttctcacttataagtgggagctaaatgatgagcacacatggacacagagggtaacaacatccatggggcttttcacaggctagagggtagagggagaggatcaggaaaaataactaatgggtattaggcttaataccagggtgatgaaataatctgtacaataaacccccaagacacaaatttaccaatgtatcaaacctgcacttgtactygtgaacttaaaataaaagttaaaagaaaagtctaagagttcattaaacatggtaaagagcaaagaagattataagtaggttaacagtggatagagagataatgatcaaaactaattttaataagtaattgaaccattggttgtttcttctcaacttcctttctggaatatagacttta

SEQ ID NO: 596709 - DNA, 599 bp, Homo sapiens
atccaccaatgagtgtccttataagagacagaaaaggagaatacaaagaaacatagggaataatgacatatgaagacaaaagtagagactggagttatgctgccatcagycaagcaatgcctggggccaccaaaagctggaagaggcaaggaagaattaaattttttccctagggcttttggaaggaacatggtcctctgacactttgattccaaacttctggtttctacaactgtgagagaataaatatctgttgttttaagtcaccagcttggatgtaaattattatggcagccttacaaaactagaagactagatacgtgctcttattgttaaacccaaccaaccaaccaaccaacagacaaacagcatccaacatgatctaatgttttcttcatatccctcatgatgaaaggaaggtacatggaaagaactggaattgtcctgagttaatccactcactgacactctagcccaaatttgaggggaaccatccaaatcatagtgagtaggtcacaggaggatgtcacatgtcacaggaggatactaatcccaccattcacaatgtctttgcccagggaatggggtgtgttatgagg

SEQ ID NO: 596710 - DNA, 599 bp, Homo sapiens
atccaccaatgagtgtccttataagagacagaaaaggagaatacaaagaaacatagggaataatgacatatgaagacaaaagtagagactggagttatgctgccatcagtcaagcaatgcctggggccaccaaaagctggaagaggcaaggaagaattaaattttttccctagggcttttggaaggaacatggtcctctgacactttgattccaaacttctggtttctacaactgtgagagaataaatatctgttgttttaagycaccagcttggatgtaaattattatggcagccttacaaaactagaagactagatacgtgctcttattgttaaacccaaccaaccaaccaaccaacagacaaacagcatccaacatgatctaatgttttcttcatatccctcatgatgaaaggaaggtacatggaaagaactggaattgtcctgagttaatccactcactgacactctagcccaaatttgaggggaaccatccaaatcatagtgagtaggtcacaggaggatgtcacatgtcacaggaggatactaatcccaccattcacaatgtctttgcccagggaatggggtgtgttatgagg

SEQ ID NO: 596711 - DNA, 483 bp, Homo sapiens
cctgtagtcccagctactcggggggctgaggcaggagaatggcgtgaacccgggaggcggagcttgcagtgagcggagatcgcgccactgcattccggcctgggtgaaagagcgagactcygtctcaaaaaaaaagaaatgagataattagatttactgtaaatgaaattttgatgaagtgctattgaagtataatattctatgaaatcccttcttaccctgaaaggagctaaatgacaactgcttgattatcatgggacaaaggataactttaggtttttttcttctaaattgtggatagtgactatttcggtattttctgtaatggtattttctgtaagtgatattacccagcttttaggtccacatcttagccaaatcacttcctgaaacctgactttacaacaaaaaccttcttgttcttccttagcctgtgaatagtggcagcatttaaaattaataccatgcaattaccttctgttc

SEQ ID NO: 596712 - DNA, 483 bp, Homo sapiens
cctgtagtcccagctactcggggggctgaggcaggagaatggcgtgaacccgggaggcggagcttgcagtgagcggagatcgcgccactgcattccggcctgggtgaaagagcgagactccgtctcaaaaaaaaagaaatgagataattagatttactgtaaatgaaattttgatgaagtgctattgaagtataatattctatgaaatcccttsttaccctgaaaggagctaaatgacaactgcttgattatcatgggacaaaggataactttaggtttttttcttctaaattgtggatagtgactatttcggtattttctgtaatggtattttctgtaagtgatattacccagcttttaggtccacatcttagccaaatcacttcctgaaacctgactttacaacaaaaaccttcttgttcttccttagcctgtgaatagtggcagcatttaaaattaataccatgcaattaccttctgttc

SEQ ID NO: 596713 - DNA, 483 bp, Homo sapiens
cctgtagtcccagctactcggggggctgaggcaggagaatggcgtgaacccgggaggcggagcttgcagtgagcggagatcgcgccactgcattccggcctgggtgaaagagcgagactccgtctcaaaaaaaaagaaatgagataattagatttactgtaaatgaaattttgatgaagtgctattgaagtataatattctatgaaatcccttcttaccytgaaaggagctaaatgacaactgcttgattatcatgggacaaaggataactttaggtttttttcttctaaattgtggatagtgactatttcggtattttctgtaatggtattttctgtaagtgatattacccagcttttaggtccacatcttagccaaatcacttcctgaaacctgactttacaacaaaaaccttcttgttcttccttagcctgtgaatagtggcagcatttaaaattaataccatgcaattaccttctgttc

SEQ ID NO: 596714 - DNA, 553 bp, Homo sapiens
tccacatcttagccaaatcacttcctgaaacctgactttacaacaaaaaccttcttgttcttccttagcctgtgmatagtggcagcatttaaaattaataccatgcaattaccttctgttctatgataatctttcatattttctcttgttttctcaaactcttcataactcttaggtcaaatttcatgcactatatagttcccttccttttgtatcacctttatgtagctaagattatagtaaattcttaacaagaatttatagatttatcggtcaaattattaaccgttcaacaagaagaccaaagccaatgtaatatttttaaaagtagggattaagaaaattacctttggtattatccttaaagagagttttagtccttattttccaatacatacactcaactatacctcccattttgtaagagaaccagctgcatttgggaacatttcttaaattgttgaagtcttaacattgatacatttaactatttacttacaatctttgtgaatattatagaggatattcactaaagataactaaagagattgta

SEQ ID NO: 596715 - DNA, 423 bp, Homo sapiens
agcctgtgaatagtggcagcatttaaaattaataccatgcaattaccttctgttctatgataatctttcatattttctcttgttttctcaaactcttcataactcttaggtcaaatttcatgcactatatagttcccttccttttgtatcacctttatgtagctaagattatagtaarttcttaacaagaatttatagatttatcggtcaaattattaaccgttcaacaagaagaccaaagccaatgtaatatttttaaaagtagggattaagaaaattacctttggtattatccttaaagagagttttagtccttattttccaatacatacactcaactatacctcccattttgtaagagaaccagctgcatttgggaacatttcttaaattgttgaagtcttaacattgatacatttaact

SEQ ID NO: 596716 - DNA, 543 bp, Homo sapiens
ttccttttgtatcacctttatgtagctaagattatagtaaattcttaacaagaatttatagatttatcggtcaaattattaacygttcaacaagaagaccaaagccaatgtaatatttttaaaagtagggattaagaaaattacctttggtattatccttaaagagagttttagtccttattttccaatacatacactcaactatacctcccattttgtaagagaaccagctgcatttgggaacatttcttaaattgttgaagtcttaacattgatacatttaactatttacttacaatctttgtgaatattatagaggatattcactaaagataactaaagagattgtactccacatgtcagatgaatggctttaaaaccttagtcagtagaattcgccaggatttttgcttaaagtgcaaacttctcagttagttccaagtccagagattctgaattaacaggcatagaacagacctgggaatctgcattttaaataaactcaaggtccatcttaaatgcactcagaaataagtgatttta

SEQ ID NO: 596717 - DNA, 543 bp, Homo sapiens
ttccttttgtatcacctttatgtagctaagattatagtaaattcttaacaagaatttatagatttatcggtcaaattattaaccgttcaacaagaagaccaaagccaatgtaatatttttaaaagtagggattaagaaaattacctttggtattatccttaaagagagttttagtccttattttccaatacatacactcaactatacctcccattttgtaagagaaccagctgcatttgggaacatttcttaaattgttgaagtcttaacattgatacatttaactatttacttacaatctttgtgaatattatagaggatattcactaaagataactaaagagattgtactccacatgtcagatgaatggctttaaarccttagtcagtagaattcgccaggatttttgcttaaagtgcaaacttctcagttagttccaagtccagagattctgaattaacaggcatagaacagacctgggaatctgcattttaaataaactcaaggtccatcttaaatgcactcagaaataagtgatttta

SEQ ID NO: 596718 - DNA, 543 bp, Homo sapiens
ttccttttgtatcacctttatgtagctaagattatagtaaattcttaacaagaatttatagatttatcggtcaaattattaaccgttcaacaagaagaccaaagccaatgtaatatttttaaaagtagggattaagaaaattacctttggtattatccttaaagagagttttagtccttattttccaatacatacactcaactatacctcccattttgtaagagaaccagctgcatttgggaacatttcttaaattgttgaagtcttaacattgatacatttaactatttacttacaatctttgtgaatattatagaggatattcactaaagataactaaagagattgtactccacatgtcagatgaatggctttaaaaccttagtcwgtagaattcgccaggatttttgcttaaagtgcaaacttctcagttagttccaagtccagagattctgaattaacaggcatagaacagacctgggaatctgcattttaaataaactcaaggtccatcttaaatgcactcagaaataagtgatttta

SEQ ID NO: 596719 - DNA, 543 bp, Homo sapiens
ttccttttgtatcacctttatgtagctaagattatagtaaattcttaacaagaatttatagatttatcggtcaaattattaaccgttcaacaagaagaccaaagccaatgtaatatttttaaaagtagggattaagaaaattacctttggtattatccttaaagagagttttagtccttattttccaatacatacactcaactatacctcccattttgtaagagaaccagctgcatttgggaacatttcttaaattgttgaagtcttaacattgatacatttaactatttacttacaatctttgtgaatattatagaggatattcactaaagataactaaagagattgtactccacatgtcagatgaatggctttaaaaccttagtcagtagaattcgccaggatttttgcttaaagtgcaaacttctcagttagttccaagtccagagattctgawttaacaggcatagaacagacctgggaatctgcattttaaataaactcaaggtccatcttaaatgcactcagaaataagtgatttta

SEQ ID NO: 596720 - DNA, 596 bp, Homo sapiens
taaaaatacttattaaaataattttgaagaataaaaatatattttatataataaatattctataatagaaagatacatcctgcagttgtgttgtggaagaaaaatacaatagggaaagaaacctgaaatggtggcaattttgtttttaagagtgaatgagtatatatgtgaaggaaaaaagaagtgagagagacagagagagagagggagcgtgtgcaggtaggaagaggaagagaaggaacacagaagaaagaattagatctcccttttgtcggttgataatttaattaactacctttcttaggaatatattatacattcagttgaataaatagaatgacagacactraaaaatattcagtgtaacataatgtccaatatagtctaattccagttttctagctgatagtcctgggagtcctagagagagaagactgagggaaagagaaacccctccttatgactggtttccagtgacttatgagtgaaggtattaaagccaaatagggtctttctgtgttttccatgttccacctcttttcaagcatttgtgtgagaaccagggacaccttaagggagaagggaatagtgacttt

SEQ ID NO: 596721 - DNA, 596 bp, Homo sapiens
taaaaatacttattaaaataattttgaagaataaaaatatattttatataataaatattctataatagaaagatacatcctgcagttgtgttgtggaagaaaaatacaatagggaaagaaacctgaaatggtggcaattttgtttttaagagtgaatgagtatatatgtgaaggaaaaaagaagtgagagagacagagagagagagggagcgtgtgcaggtaggaagaggaagagaaggaacacagaagaaagaattagatctcccttttgtcggttgataatttaattaactacctttcttaggaatatattatacattcagttgaataaatagaatgacagacactaaaaaatattcagtgtaacataatgtccaatatagtctaattccagttttctagctgatagtcctgggagtcctagagagagaagactgagggaaagagaaacccctccttrtgactggtttccagtgacttatgagtgaaggtattaaagccaaatagggtctttctgtgttttccatgttccacctcttttcaagcatttgtgtgagaaccagggacaccttaagggagaagggaatagtgacttt

SEQ ID NO: 596722 - DNA, 596 bp, Homo sapiens
taaaaatacttattaaaataattttgaagaataaaaatatattttatataataaatattctataatagaaagatacatcctgcagttgtgttgtggaagaaaaatacaatagggaaagaaacctgaaatggtggcaattttgtttttaagagtgaatgagtatatatgtgaaggaaaaaagaagtgagagagacagagagagagagggagcgtgtgcaggtaggaagaggaagagaaggaacacagaagaaagaattagatctcccttttgtcggttgataatttaattaactacctttcttaggaatatattatacattcagttgaataaatagaatgacagacactaaaaaatattcagtgtaacataatgtccaatatagtctaattccagttttctagctgatagtcctgggagtcctagagagagaagactgagggaaagagaaacccctccttatgactggtttccagtgrcttatgagtgaaggtattaaagccaaatagggtctttctgtgttttccatgttccacctcttttcaagcatttgtgtgagaaccagggacaccttaagggagaagggaatagtgacttt

SEQ ID NO: 596723 - DNA, 596 bp, Homo sapiens
taaaaatacttattaaaataattttgaagaataaaaatatattttatataataaatattctataatagaaagatacatcctgcagttgtgttgtggaagaaaaatacaatagggaaagaaacctgaaatggtggcaattttgtttttaagagtgaatgagtatatatgtgaaggaaaaaagaagtgagagagacagagagagagagggagcgtgtgcaggtaggaagaggaagagaaggaacacagaagaaagaattagatctcccttttgtcggttgataatttaattaactacctttcttaggaatatattatacattcagttgaataaatagaatgacagacactaaaaaatattcagtgtaacataatgtccaatatagtctaattccagttttctagctgatagtcctgggagtcctagagagagaagactgagggaaagagaaacccctccttatgactggtttccagtgacttatgagtgaaggtattaaagccaaatagggtctttctgtgttttccrtgttccacctcttttcaagcatttgtgtgagaaccagggacaccttaagggagaagggaatagtgacttt

SEQ ID NO: 596724 - DNA, 463 bp, Homo sapiens
gataatgctgacatcattgcttaaagttctgaatgtgactgagaataatcatttcacacaaaatatccccaacgggtctgtcatctggcaaacagctaggaatatcttttgacatcttgctttgcagaacaacaataatctctcaccatctgtcaattccacatgtctcatcccctgcccctggtgattcttggcaatcagcagccagtgcctgtctaatagcacttccgcctgcttctagtgtagtgcttcaagctgtcctrtttctcagagagcagacacattgcctaaaatgaaatcttagaggtactgtccacactctgtcagtagacaaaggaatcagaactactcagactgaaaataaggtgcaagggggtgtaatatggatgtaatatggacttgcatacatgctcctttggcatatgtttccctctataaaaaaattaagttgtaaaatatgtta

SEQ ID NO: 596725 - DNA, 608 bp, Homo sapiens
agttctgaatgtgactgagaataatcatttcacacaaaatatccccaacgggtctgtcatctggcaaacagctaggaatatcttttgacatcttgctttgcagaacaacaataatctctcaccatctgtcaattccacatgtctcatcccctgcccctggtgattcttggcaatcagcagccagtgcctgtctaatagcacttccgcctgcttctagtgtagtgcttcaagctgtcctatttctcagagagcagacacattgcctaaaatgaaatcttagaggtactgtccacactctgtcagtagacaaaggaatcagaactactcagactgaaaataaggtgcaagggggtgtaatatggatgtaatatggacttgcatacatgctcctttggcatatgtttccctctataaaaaaattaagttgtaaaatatgttaatgacatcattgaggtagataaaaaggatcaaagaaarccaagaagtttcacatgatacattttgaatttagcaaaatgtggttttactaggaaacattaatcaaatgtagatgaaaatcaaattcattccatatttctccccaggaaataatgattaataagtgaatg

SEQ ID NO: 596726 - DNA, 517 bp, Homo sapiens
tatctgttgttttttagtcacccggtttatgttattttgttataagagtccaaatagaccaagatattccacttaatatgtaggggaagrcaacaaaaactgccacacttagaatactcctgatgctggaagtatgaaaacaggaaaaacaaaacaaaactgctcttgaaggtgaaggaggaatatcactgagctcaccaacacagccaggaaaagaacagaagtgtgagaaggctacattcctgagaccctgagaaaaagtacctgcataagactgagatgaaattacctaccctagttataattgaaatcccaaaaagaaaagaggaaaaaataatggagcaaaagaaatatttttcaaaataactgccaaaaatattctaaaagaagtgacagaaaatcaaacttcagatataggaaactcagagaatgtcaaatagaacaaaaataaataagaattaaatcttgaaaaatctttaaaaaatcaactctaaattttatatcttgctccaaatat

SEQ ID NO: 596727 - DNA, 517 bp, Homo sapiens
tatctgttgttttttagtcacccggtttatgttattttgttataagagtccaaatagaccaagatattccacttaatatgtaggggaaggcaacaaaaactgccacacttagaatactcctgatrctggaagtatgaaaacaggaaaaacaaaacaaaactgctcttgaaggtgaaggaggaatatcactgagctcaccaacacagccaggaaaagaacagaagtgtgagaaggctacattcctgagaccctgagaaaaagtacctgcataagactgagatgaaattacctaccctagttataattgaaatcccaaaaagaaaagaggaaaaaataatggagcaaaagaaatatttttcaaaataactgccaaaaatattctaaaagaagtgacagaaaatcaaacttcagatataggaaactcagagaatgtcaaatagaacaaaaataaataagaattaaatcttgaaaaatctttaaaaaatcaactctaaattttatatcttgctccaaatat

SEQ ID NO: 596728 - DNA, 517 bp, Homo sapiens
tatctgttgttttttagtcacccggtttatgttattttgttataagagtccaaatagaccaagatattccacttaatatgtaggggaaggcaacaaaaactgccacacttagaatactcctgatgctggaagtatgaaaacaggaaaaacaaaacaaaactgctcttgaaggtgaaggaggaatatcactgagctcaccaacacagccaggaaaagaacagaagtgtgagaaggctacattcctgagaccctgagaaaaagtacctgcataagactgagatgaaattacctaccctagttataattgaaatcccaaaaagaaaagaggaaaaaataatggagcaaaagaaatatttttcaaaataactgccaaaaatattctaaaagaagtgacagaaaatcaaacttcagatataggaaactcagagaatgtcaaatagaacaaaaataaataagaawtaaatcttgaaaaatctttaaaaaatcaactctaaattttatatcttgctccaaatat

SEQ ID NO: 596729 - DNA, 517 bp, Homo sapiens
tatctgttgttttttagtcacccggtttatgttattttgttataagagtccaaatagaccaagatattccacttaatatgtaggggaaggcaacaaaaactgccacacttagaatactcctgatgctggaagtatgaaaacaggaaaaacaaaacaaaactgctcttgaaggtgaaggaggaatatcactgagctcaccaacacagccaggaaaagaacagaagtgtgagaaggctacattcctgagaccctgagaaaaagtacctgcataagactgagatgaaattacctaccctagttataattgaaatcccaaaaagaaaagaggaaaaaataatggagcaaaagaaatatttttcaaaataactgccaaaaatattctaaaagaagtgacagaaaatcaaacttcagatataggaaactcagagaatgtcaaatagaacaaaaataaataagaattamatcttgaaaaatctttaaaaaatcaactctaaattttatatcttgctccaaatat

SEQ ID NO: 596730 - DNA, 537 bp, Homo sapiens
ttaataatatgtagtttgctataattataaaatataagctaagtttttgaaaatttattcacaattttgacagtgaaataaacacaagtatgttggtagcaacattattaaaatttaatttattttttaaaaatggtaatatgtgcattgagwagaaaagtaaaagaccataagagaatacaaagtaaaaatcaaaattcttttacctttctcctccagccaaccaaggaatcaaccgatagaaacaactctgtgtttgtaggtttgaatatgtgttatatgcacttataaattcttccagagaaactctatacatgtaacagaagctttttacacaaatgtttgcacttagcacacattgttctgaaatttgcttcccctcacctccccacaccccaatgagttgaatgctatatattagaaaaccttatgtttttatataacactatagtataacgttatttcattattatttgaaactatacataaattataattttctttgaatggatattatagagctaattaacacaaatt

SEQ ID NO: 596731 - DNA, 577 bp, Homo sapiens
ttaataatatgtagtttgctataattataaaatataagctaagtttttgaaaatttattcacaattttgacagtgaaataaacacaagtatgttggtagcaacattattaaaatttaatttattttttaaaaatggtaatatgtgcattgagtagaaaagtaaaagaccataagagaatacaaagtaaaaatcaaaattcttttacctttctcctccagccaaccaaggaatcaaccgatagaaacaactctgtgtttgtaggtttgaatatgtgttatatgcacttataaattcttccagagaaactctatacatgtaacagaagctttttacacaaatgtttgcacttagcacacattgttctgaaatttrcttcccctcacctccccacaccccaatgagttgaatgctatatattagaaaaccttatgtttttatataacactatagtataacgttatttcattattatttgaaactatacataaattataattttctttgaatggatattatagagctaattaacacaaattacttttaattttcttatttagtgttgtcatttatagcaaa

SEQ ID NO: 596732 - DNA, 537 bp, Homo sapiens
ttaataatatgtagtttgctataattataaaatataagctaagtttttgaaaatttattcacaattttgacagtgaaataaacacaagtatgttggtagcaacattattaaaatttaatttattttttaaaaatggtaatatgtgcattgagtagaaaagtaaaagaccataagagaatacaaagtaaaaatcaaaattcttttacctttctcctccagccaaccaaggaatcaaccgatagaaacaactctgtgtttgtaggtttgaatatgtgttatatgcacttataaattcttccagagaaactctatacatgtaacagaagctttttacacaaatgtttgcacttagcacacattgttctgaaatttgcttcccctcacctccccacaccccaatgagttgaatgctatatattagaaaaccttatgtttttatataacactatagtataacgttatttcattattatttgaaactatacataaattataattttcwttgaatggatattatagagctaattaacacaaatt

SEQ ID NO: 596733 - DNA, 496 bp, Homo sapiens
cactattctgctctgtttctgagtttgacgattttagatatttcgtataaatggagtcaagcagcatttgtccttctgcgactggcttgtttcacttagcatartgtccttcgggttaatccattttgtcacctataacaggatttatttcttttgtaagtctgtataatattccattgcacatgcagacacattttctttatccatttatctattgatggagattcaggttgtttttatatcttggctcatgtgaataatgctacagtgaacaggggagtgcagatacttattcaagatcttggtttttcaatttcatacttgaaaatcagagggcacaggtatgaggatacatacagatgctagtccaactatgctgaatacccatatcaaacttgtataccttatataattttaccctattaaaacatgatcattgaccttggacaagctacttaacagctccaagttgaaattttctcatccgtgacatggg

SEQ ID NO: 596734 - DNA, 496 bp, Homo sapiens
cactattctgctctgtttctgagtttgacgattttagatatttcgtataaatggagtcaagcagcatttgtccttctgcgactggcttgtttcacttagcataatgtccttcrggttaatccattttgtcacctataacaggatttatttcttttgtaagtctgtataatattccattgcacatgcagacacattttctttatccatttatctattgatggagattcaggttgtttttatatcttggctcatgtgaataatgctacagtgaacaggggagtgcagatacttattcaagatcttggtttttcaatttcatacttgaaaatcagagggcacaggtatgaggatacatacagatgctagtccaactatgctgaatacccatatcaaacttgtataccttatataattttaccctattaaaacatgatcattgaccttggacaagctacttaacagctccaagttgaaattttctcatccgtgacatggg

SEQ ID NO: 596735 - DNA, 496 bp, Homo sapiens
cactattctgctctgtttctgagtttgacgattttagatatttcgtataaatggagtcaagcagcatttgtccttctgcgactggcttgtttcacttagcataatgtccttcgggttaatccattttgtcacctataacaggatttatttcttttgtaagtctgtataatattccattgcacatgcagacacattttctttatccatttatctattgatggagattcaggttgtttttatatcttggctcatgtgaataatgctacagtgaacaggggagtgcagatacttattcaagatcttggtttttcaatttcatacttgaaaatcagagggcacagrtatgaggatacatacagatgctagtccaactatgctgaatacccatatcaaacttgtataccttatataattttaccctattaaaacatgatcattgaccttggacaagctacttaacagctccaagttgaaattttctcatccgtgacatggg

SEQ ID NO: 596736 - DNA, 496 bp, Homo sapiens
cactattctgctctgtttctgagtttgacgattttagatatttcgtataaatggagtcaagcagcatttgtccttctgcgactggcttgtttcacttagcataatgtccttcgggttaatccattttgtcacctataacaggatttatttcttttgtaagtctgtataatattccattgcacatgcagacacattttctttatccatttatctattgatggagattcaggttgtttttatatcttggctcatgtgaataatgctacagtgaacaggggagtgcagatacttattcaagatcttggtttttcaatttcatacttgaaaatcagagggcacaggtatgaggatacatacrgatgctagtccaactatgctgaatacccatatcaaacttgtataccttatataattttaccctattaaaacatgatcattgaccttggacaagctacttaacagctccaagttgaaattttctcatccgtgacatggg

SEQ ID NO: 596737 - DNA, 440 bp, Homo sapiens
ctgatctttaacaaagttaagaaaaataaccaacagggaaaagactactccgtattcaataaatggtgtgggctagttgggtagccatatgtagaagaataaaactcaaccccaccattcaccatataaaaaaattaactgaggttggattaaagatttaaacacaagacctcaaactacaagaatcctaggaaacgccattctggacaytggccttgggaaataatttatgactaagtcctcaaaagcaattgcaaccaaaacaaaaattgacaagtgggatctaattaaattaaagagctctacacagcaaaagaaattatcaacagagaaaacaggcaacctacagaatgagataaaatactcacaaactacacttccaataaacgtcccaataccccaaatctataagaaaattaaacaaattaataagcataaaa

SEQ ID NO: 596738 - DNA, 304 bp, Homo sapiens
tatggagaaaagggaatgcttgmacactttcagtggaaatctaaattagttcagccactgtggaaagtagtttggagcttttttaaagactttaaaagggaactacaatttgacccagcaatcccattactggttatgtatctaaaagaaaacaaattgttttagcaagaatacataggctctcatatgcttcgcagtcctattcacaatagcagccatgaaatcaacctaggtgcccattaatggtggaatggataaagaaaacatggcaaatatacatgatggaacactacacagccataaa

SEQ ID NO: 596739 - DNA, 383 bp, Homo sapiens
aagaacttacaaaggggataaatctggctgggcwcaaatgcctccatggaaaaataaagtgccagaagataatagaacaatatttacaaaattctaagggaacaagtgtgtctcaagaatattataaccaggcaagttgttatccaagtacaaaatggcagtactggcatacctaatcatgcaaaaactcacagaatatgtcattccttattctgtcttagaatgaaactatgtaagagataaaagaagaaaccattgtaaaagaactgaatggagccttgttgctgcttcctcagaagggaggggacaccatgtcctcacatgtagcaggtacagaagggaacaaacccacaccctcaaacccatttataagggcccgaatc

SEQ ID NO: 596740 - DNA, 383 bp, Homo sapiens
aagaacttacaaaggggataaatctggctgggctcaaatgcctccatggaaaaataaagtgccagaagataatagaacaatatttacaaaattctaagggaacaagtgtgtctcaagaatattataaccaggcaagttgttatccaagtacaaaatggcagtactggcatacctaatcatgcaaaaactcacagaatatgtcattccttattctgtcttagaatgaaactatgtaagagataaaagaagaaaccattgtaaaagaactgaatggagccttgttgctgcttcctcagaagggaggggacaccatgtcctcacatgtagmaggtacagaagggaacaaacccacaccctcaaacccatttataagggcccgaatc

SEQ ID NO: 596741 - DNA, 599 bp, Homo sapiens
tatttgatgatttttatgattcattgaggtaactatttgataatattgttcaaaatgaccacattaattatgtttttagtaatgatttactccccaaaaggtatatgtttccaccttaaattcctgtaaataaaattcttgtgatagcttcttaaaaagtaagagaaaagaaagacagagaaaactgattcctttctacttggagcttgatttcaaatatgtaaaccccaactacgtaattctgtacacagggatctcattatttattttcatagttgctgctttgtttaaaattttgtctctaaagtttgtatttggcaagacaaatagaaataagctggtttataatttttcttattctaagatgtrcatgtgtatatgtgtaagtatgttttaatttctaatggcctgtccagatgatggtatcactcctggagacatggcaacccatatgagaatgtttatatacactggggtggagaagaacaaccatgcccacatcctaatttaaatcaccttcacctttgaaatgttaaaactgtatgtgtccttttcaatttctctctgctcctccttttctcctatgctcttgctcagaa

SEQ ID NO: 596742 - DNA, 649 bp, Homo sapiens
gagatctcattgtgagctcaaggaagaagtaaacacactgaaatttctatattggtgcaggatgatggtaattgcaagaaagggcttaaataaaacagtagaataaaattcaatctgatacaaaaaagtcagaggcaagacaaaaatagtttataaatataaaataaggaatcaaatctaagcttgtgcatgaataagataaaaaaattatcaaattcatgttcagtctggtaggagtgacctagacaaaacatgaggaagaaagagggactatctcagtaattttatgggattattatgacttttaaaaatatttgatcttttgaacatctcacaggataaaatattgaattaattagaatatttagttgactgaaacacccattttcctactcattttaaaaaactgaattttaatgtrtataagtatagattaatgaacgtatacataaacagagaaagagagagagggaaaaaaacattctctgcatattgtttcttcttgcaagaatgttaagaacaaaggtttttctttatgtctctctccaattaagttaaagatggtggagctgcatactagttgctattataatagcttttgcataacattttattcacagttgggaaaaacaaatgagcaaataaacat

SEQ ID NO: 596743 - DNA, 649 bp, Homo sapiens
gagatctcattgtgagctcaaggaagaagtaaacacactgaaatttctatattggtgcaggatgatggtaattgcaagaaagggcttaaataaaacagtagaataaaattcaatctgatacaaaaaagtcagaggcaagacaaaaatagtttataaatataaaataaggaatcaaatctaagcttgtgcatgaataagataaaaaaattatcaaattcatgttcagtctggtaggagtgacctagacaaaacatgaggaagaaagagggactatctcagtaattttatgggattattatgacttttaaaaatatttgatcttttgaacatctcacaggataaaatattgaattaattagaatatttagttgactgaaacacccattttcctactcattttaaaaaactgaattttaatgtgtataagtatagattaatgaacgtatacataaacagagaaagagagagagrgaaaaaaacattctctgcatattgtttcttcttgcaagaatgttaagaacaaaggtttttctttatgtctctctccaattaagttaaagatggtggagctgcatactagttgctattataatagcttttgcataacattttattcacagttgggaaaaacaaatgagcaaataaacat

SEQ ID NO: 596744 - DNA, 526 bp, Homo sapiens
ctggatcacgggatccagacatctgtttagacaacatttctcagtgtctctgtcatggtatttatgggagaaattarcatttttatcaatagacatagtaaacttgattgcccttctctatgtgtgatatcaactaattcagtgagcatctgaatagaagaaaatggtgaaggacaggagaattcactctttctctgcctgattgattgagctggaatatctattcctctcctttctttgaaatgccaggcctacaaactgggactaaaattacaccattgaatctttgactttcaggccttcagactacaccagctgggtctccaggtttcagaggacagattttattgattttatttctctggataaccctgactaagacatatattggtactgggagtggttttacagaaacagaattttataaataactttcccaaattgatgctgtagattttggaataaattgtctaatctgattagatgtaaaggtttggatgactctatttccggtagtaaagagagc

SEQ ID NO: 596745 - DNA, 570 bp, Homo sapiens
agacctagtaaggttaaataacttaacatggtcacacagttggttagtgacaactgggacaaagtgttcaaattgatcttttcactgattaaaaacaagaactggcaagctatgacccacaggccaaatctggcctgccacctatttttgtaaataaaattttattggaacacagccacactctcattcatttacatattgtctatggctttcctgatattacaacagagttgagcagttgtgacagacaccatatggcttgcaaagccagaaatatttactatctagccctttacagaaaaagtttgcagattccggtttaagaacaagaatacttccaaagcttcaactcacaaactgagatatcacctaaaccttttaaaaaaatctgaatraaaagaaacaaccaaaacaactatgttagatgtttttacattaagtgagttttatatcccaagagacacacaatgtcatatatgcaatgtcaacaataaaggcaattgttctgttaagggactatgcatgttgaaacccctgaagtataaatgtctctcaaagccacctcacata

SEQ ID NO: 596746 - DNA, 467 bp, Homo sapiens
aggcactggaaaataaaaactcatggtctctctacccaggggaagagggtggctgtgagggagacagacatgtgaccagactcacggtgcaacctgcaaatcctgcgataccaagaataaggttaagaatcctcaaagactttaaccacgttcttcattttacacttgaataaacagagccccaaaggttttagaactagtggaacacagttacggggagaatcctttattactagctagcactttttgcaacaaactatgtatcaggctctgctccatctgctttccataactatcaggtgatttggtcttaataataactctacaagataggtaatgttatggtccttattttacagaggaaactgaggcacagaggtaatcagtgacttcactagatcatgctacttggtgmttggtggagctgaagtttgatcccgaactaccagctctgtgaactctcaaaa

SEQ ID NO: 596747 - DNA, 591 bp, Homo sapiens
attcatcttcatttcacaaatccataagccaaggctttgaaagggaattttactccccacagatcagcgtgataatcagcagtggagctggaggaacattgactgccctgygattcaagtctttcctcttgtccctaggtcatctctactctccctcctgctgctccacactggtcttgctggaattccaaactgtctctttaagattctttcagagtcgaccatgagcttctcaaagccttaacccttttacgaaatcaagattacctgtcaactctatttgtctgtgttttctgcaacatgatacattaattggcacaaatctaccctcaccctgaacccttttttagatgcactttgcaaggccaactgggcttctgttttatacgaggtgagggtggctggccacgcacattatctccagtggagcaaaggcttgctctatcccacttgtccagaagaggctcaactgcttgcccccagaatttgcaatagacttggtcattaaggtaagaattgctttccctgaagtatcacagatgcagtactccctttctttcaaatttattgatttttattttgttttgtttt

SEQ ID NO: 596748 - DNA, 439 bp, Homo sapiens
cttttaaaaattctgatgcttggaccccacagcagataatctgacttaactggtctgcactggagcctagatatcaggcaatttaaaattcctcatctgattatagtgaaaaacccaggagaagaacccctgggcttgaggctgcattcatcccttgaggctgcattcatcccattggtcattatttgatgggtatttatggagmaaacactggaggcctgatctgctctgagctgggtagaaaatggtgtccattctggcacttcagcacactggacttctcaaggcagcactgacctttcttcattggaaaagtttctctttccagtggaggtctctttgtccatcatgtggcaggacagagtgcaggataatttttgctccttggctgcatccctctacccaagaacaatgtgaacttctgcacctcgggggaggg

SEQ ID NO: 596749 - DNA, 484 bp, Homo sapiens
gaaactccgtctctactaaaaaatacaaaaattagcggggtgtggtggcatacgcctgtaatytcagctacttgggaagctgaggcaggagaatagcgtgaacctgggaggaggaggttgcagtgagctgagatcacaccactgtactccagcctgggtgacagatcaagactctgtctcaaaaaaaaaaaagaaaaaagaaaagtcccggggggctttcttgcctcatcttcatgtaaaggtatagagaggtgatgactgtctatgaaccgagaagcaggccctcctcaccagacacagaatctgccagtatcttgatattggacatccatcctccagaactatgagacataaatatctgctgtgaagccacccagcctctagtatttttcatagcagcctgagctgactaagacattgacctactgtattcacttctccggcagcctagtcagcatctgaacccagcaaggttggatccagg

SEQ ID NO: 596750 - DNA, 619 bp, Homo sapiens
tataatgcacttagaatggtgcctagcatatagtatgcatttagtcaataatagttaaatcatatcagtttttgtgttgcttcacttcttgggggaatcctcaggtaaggtacttagacaggaaagtcagacaagccctgttttacccttctcctgtatgtgcgctggcttacctgaggtagagcgcagtcagcaagttgctttacctctctcagactgcactttcttttctaaaaaaatgcatttgccaccatccacttcccatagtttcagtcaagtttaatttaatgagtcaccatatggcaagtgcgtgttaatgtatttcagtgggtgtcctataaacttattttcctattctcacttatcctctcagccaccccttaagaagttgtaatttccttaagtaacagtgcctggcagtcacgagataattagttcttggttatatgmctgaggacacatgtacatttggtataatcacatgcagtgtatgtccgggctaaactaatagtagttgttattgattcctgggtctgagatccttgttcacctgggaagaaggataaacagggattatctaggctagggagacaggggtgaattatctttacacgagaca

SEQ ID NO: 596751 - DNA, 504 bp, Homo sapiens
caaatgacagtgacccaaagccatgttcctctgagaagtagacactttcatgcctgggcatcctccaggccttccctatctagtgcatatttttgcaaaggcttatgttgtgtttcagacactgtgtttatatgtgagggctataaatatgtgagaatttaagaatgtatgtgtgtgtatagaagaagaaccaagccacagcttgggcggggcatcctaaaccccttaataggcacgtaatttaaggraagatcctgtgcttaccagagaagctttgtttagaggcccgttcctaagtccccttgcatcaagcttgctgctcctgcatccctcaaacccagaaatgccaaagctgcaatgctggcataggtgtatataggttagttcatgtccttgattcatgggtgatgacccaccaccctgcccagcagagtccaggccatcttttttctgagccctctctggggagaggtggcagctcaaaaagcccttgagtcttgtttc

SEQ ID NO: 596752 - DNA, 486 bp, Homo sapiens
tgccaagacttggtgactgcaccctctgaagcaacgatatgagctttacgttggccctttttagccatggttgggatgcggagcaccaagtcctgagactgcacaaagcagcaaggccctgggcccagaccacaaaactattttttccttccaggcctccaggcctgtgatggaatgggctaccatgaagacctctgacatgccctgaagacattttccccattgtcttggccagtaacatttggcgccttgttacttatgcaaatttctgcagctggcttgaatttctcatcaaaaaatgtttttttgttttctatcgcattgtcaggcaggaaattttctgagcttttatgctctgcttccctyttaaacatgggttccaattccaaatcatatctttggaaatgaataaaatggaatgtttttaagagcaccctagtcatgtcttgaaggctttgctgcttagaaatttatcccaccagatgc

SEQ ID NO: 596753 - DNA, 500 bp, Homo sapiens
aaactgctactgaggccaggaagttcactaaaatgtaagggcctagtgatatgtccagactaggaaagaaaattttaattttcaagaaagtcaaagccattagttgtagccctagaactagtgacagtagagtacacccaatcctaagttggaaactggtacggtgtgaccgtgtccccacccaaatatcwttttgaattgtagtttccataatacccatgtgtcatggaagacacccagcaggaagtgattgggtcatgggggcggtttcccccatgctgttctcatgacaatgagtgagttctcatgagatctgatggttttataaacatctggcatttcccctgcttgcacttttctctcctgccaccaagtgaagaaggacatgtttgcttcctcttctatcataattgtcagtttcctgaggcctccccagcaatgtggaactgtgtcaattaaagttgttttcttttcttttcttttttttttttttggaaatg

SEQ ID NO: 596754 - DNA, 473 bp, Homo sapiens
cccttcagaagcttatagtttagcagaggaaccagataaatcaaaacaatktataagttttgttaatagttccaaaaggaggaatggtggtttttcaaatataaaacaagtctttttccacaaggctactgcctggggaaccatttctagatgggtcagggaggcccccagatgtactttttagatgctcaatcatgagaagagttggggtttcctagggaggggctaggttggccagaagctatttggaagctatttgttcccaggaagggaacaacacacactgacacctctcaggaggatgggggaagggagagcatcaggataaatagctaatgcgtgtggggcttaattcctaggcgatgggttgataggtacagcaaaccaccatggctcacatttacctatgtaacaaacctgcacatcctgcacatgtatcctggaacttaagattaaattaaaattttaaaaaa

SEQ ID NO: 596755 - DNA, 550 bp, Homo sapiens
catcagaggaccaggaagggaagttgaacttgaagcagaatcagctctaaaaaggcaactaatttaatgagagtttgctgtgaacttaccacaggtcaaacatcctgctaaaagctgtggatgtaaaagtatatgaacctcagactttataccagtgaagttcctatttgggcaactcaccaccttgtttttgagaaatgctgatgttgacagctcaccatgtaagtctcccctctttcatatcccaaaattattttactcgttcaaaattcaagcccacaaggtcctctcctgcttctcttgtccccattgcaacatgtatatttaaatgaattcccagggatttttatttattatttaactcttccttgcagaccattttaggaaagcactgatttatgcttctggatctaaccactgaaatcaggcagatcttagctcaaattctagctcttccacttttagttgagagttcttaaatagtttacccaaagattytggacctcagccaccagttatgcatgatgggtaatatttattgcaatgtgat

SEQ ID NO: 596756 - DNA, 474 bp, Homo sapiens
catattttcatttttgaagcattataaatccaacaggatagggttcttcaatcttagaaatggagttttccagtgggttttgctggaagtgcaccattgcattacgakttattacttttctaaaaatgaatcacattttgtccagcattccttgaaagttcacaataaatgtcaagtctttgcggtttctattcataactcaagagcctttacaggaactttgcccatactaaagttttctttcagaaggaaccgtttttccttttttctttattgtgtttcttcatcatcctcaaaatcaatttttttaatggatgaatcagattctgcttttgtccatttgtcctttgagtgagtggatagctgcgcagagcatcatcaaagccttcatgtccaacatccccgagccagtccctaacccaggccaataagaaccccaatgccaccacaagagatatgaaaagaaaaagcagc

SEQ ID NO: 596757 - DNA, 474 bp, Homo sapiens
catattttcatttttgaagcattataaatccaacaggatagggttcttcaatcttagaaatggagttttccagtgggttttgctggaagtgcaccattgcattacgatttattayttttctaaaaatgaatcacattttgtccagcattccttgaaagttcacaataaatgtcaagtctttgcggtttctattcataactcaagagcctttacaggaactttgcccatactaaagttttctttcagaaggaaccgtttttccttttttctttattgtgtttcttcatcatcctcaaaatcaatttttttaatggatgaatcagattctgcttttgtccatttgtcctttgagtgagtggatagctgcgcagagcatcatcaaagccttcatgtccaacatccccgagccagtccctaacccaggccaataagaaccccaatgccaccacaagagatatgaaaagaaaaagcagc

SEQ ID NO: 596758 - DNA, 474 bp, Homo sapiens
catattttcatttttgaagcattataaatccaacaggatagggttcttcaatcttagaaatggagttttccagtgggttttgctggaagtgcaccattgcattacgatttattacttttctaaawatgaatcacattttgtccagcattccttgaaagttcacaataaatgtcaagtctttgcggtttctattcataactcaagagcctttacaggaactttgcccatactaaagttttctttcagaaggaaccgtttttccttttttctttattgtgtttcttcatcatcctcaaaatcaatttttttaatggatgaatcagattctgcttttgtccatttgtcctttgagtgagtggatagctgcgcagagcatcatcaaagccttcatgtccaacatccccgagccagtccctaacccaggccaataagaaccccaatgccaccacaagagatatgaaaagaaaaagcagc

SEQ ID NO: 596759 - DNA, 639 bp, Homo sapiens
ccaccaccattaagaataagtaaaagtggaagtcaataagagaacaaggtataacagaaaattgacaataagtagctgaatgatctaccagagaaggttttagtatcaactagtctaagctgatctgacagttagagacytaatcaaggctagagagcagcaatacccacttcctcattcttggaatccctatacttaaatctcaatgtacttaagtgtcactacttccaagctttagattattaaatgtgattcagattcctgctggctctaatgggaactacagataattattattataaaatctcccacatgatgctttaatcaggattacagccattcgttttaaacaaaacaacagtccgtgtcattcagcccatggcctgtttacagactcccagatgtgaagccataggaacgatggctaatgaaccagagcaggcaaatcacagacccaacatttggctgtttcaagaattttgtctgcattattagtattcatgtttctaccagaaaacatgaattctgggatctggaagtctggagagtctccaggtctagatgatattctgtcttagagtcagccacgatttcacactcacaatcctctgcatactcattaagcaacaaggatgaatg

SEQ ID NO: 596760 - DNA, 639 bp, Homo sapiens
ccaccaccattaagaataagtaaaagtggaagtcaataagagaacaaggtataacagaaaattgacaataagtagctgaatgatctaccagagaaggttttagtatcaactagtctaagctgatctgacagttagagacttaatcaaggctagagagcagcaatacccacttcctcattcttggaatccctatacttaaatctcaatgtacttaagtgtcactacttccaagctttagattattaaatgtgattcagattcctgctggctctaatgggaactacagataattattattataaaatctcccacatgatgctttaatcaggattacagccattcgttttaaacaaaacaacagtccgtgtcattcagcccatggcctgtttacagactcccagatgtgaagccataggaacgatggctaatgaascagagcaggcaaatcacagacccaacatttggctgtttcaagaattttgtctgcattattagtattcatgtttctaccagaaaacatgaattctgggatctggaagtctggagagtctccaggtctagatgatattctgtcttagagtcagccacgatttcacactcacaatcctctgcatactcattaagcaacaaggatgaatg

SEQ ID NO: 596761 - DNA, 639 bp, Homo sapiens
ccaccaccattaagaataagtaaaagtggaagtcaataagagaacaaggtataacagaaaattgacaataagtagctgaatgatctaccagagaaggttttagtatcaactagtctaagctgatctgacagttagagacttaatcaaggctagagagcagcaatacccacttcctcattcttggaatccctatacttaaatctcaatgtacttaagtgtcactacttccaagctttagattattaaatgtgattcagattcctgctggctctaatgggaactacagataattattattataaaatctcccacatgatgctttaatcaggattacagccattcgttttaaacaaaacaacagtccgtgtcattcagcccatggcctgtttacagactcccagatgtgaagccataggaacgatggctaatgaaccagagcaggcaaatcacagacccaacayttggctgtttcaagaattttgtctgcattattagtattcatgtttctaccagaaaacatgaattctgggatctggaagtctggagagtctccaggtctagatgatattctgtcttagagtcagccacgatttcacactcacaatcctctgcatactcattaagcaacaaggatgaatg

SEQ ID NO: 596762 - DNA, 411 bp, Homo sapiens
gagttgtgaagagctcatggcaaagctggcttcacttcttaggtaaagaaaacaaatacaatttyttttttttgtaaatttagagtatgtagcttgtctactggacagtagcatcatcattttatatgatgttacatatagttatgtaagtggacacttaaatggaatatggactcagcgcatttctcctttagctccatgccattggaaatcacttggaattggcgggcatactgaacatagatcagaactgcagaatgcaaagaataattgagaaatggcccgctgctagaacaattattaagactcattatttaattgctataaatattctatcaaactgagcaataccaaacttaaaaacacattcatttagatacatttactaagataaacaattaaatttaattt

SEQ ID NO: 596763 - DNA, 411 bp, Homo sapiens
gagttgtgaagagctcatggcaaagctggcttcacttcttaggtaaagaaaacaaatacaatttcttttttttgtaaatttagagtatgtagcttgtctactggacagtagcatcatcattttatatgatgttacatatagttatgtaagtggacacttaaatggaatatggactcagcgcatttctcctttagctccatgccattggaaatcacttggaattggcgrgcatactgaacatagatcagaactgcagaatgcaaagaataattgagaaatggcccgctgctagaacaattattaagactcattatttaattgctataaatattctatcaaactgagcaataccaaacttaaaaacacattcatttagatacatttactaagataaacaattaaatttaattt

SEQ ID NO: 596764 - DNA, 647 bp, Homo sapiens
aagtcctttttgcattaaacgcaaaaaccagctatcacctggcaagatggctgatttctatagaaatataagtataaagattatttatggtgtaaatagacattgccagcgagttgtagttaagaaatgatgtccttgcattgcccagtaaaaggggtatatctgtgagtatttctgtgtaccaagcaatttctaaggaagagcagcgccttggggtcacatagttacatctcagccaatatccacccttagttctctcctattccgttgatacgatggtaaaatacgatgcacctggaccacattactttyggccttaaggatgactttgccttatgaaaaaaaaaattccttgtcaagtttaagcagaaatatttcagacatccagactcaaaaatcatttacaatgtgagaaataaaatccatcatatttattctcctatggaaaataatatctaacagattgtttaatttgaaaaagagaacaagtggcctgttgatgaattgctttagttcctaacgttactggcagatagctgatgaaaatgtcttcatatataatcattaacagtaggactttttcagagggttggtgatagcctgtggataaacaaaagaattaatgtacttcaatctaaagcagcatg

SEQ ID NO: 596765 - DNA, 578 bp, Homo sapiens
gctaactgtaagggaacctgaagaatatagtctacctgtgtgcccaggaggaaaggggaaaagttttggtgaacagctagccagcctcttccaccaaattactgttacctggaaggtagttgtgttttcagtgtaaataaaaaggtgaagataaataagcaaaaatatgttgtttgattgagytggtggaagatgagctaggaggcattggtggagatgttgcctttggataagggggtagaaaaatttgttctttgagactagagagaaggcaatgtaagtgttgataggtacccagtagaggactctgcaaccatgaaatcacattttagtcttcatggaactaatgagacagacaacagattcaaaatcaagatcattgtgtagacttgtgcagtttgtgtttcacagaaatgtcgtgccaggaaagcaggaaatgatagaaatcagccaacagcctgctctctaagcagtgccctcgggggttgtctgtatcctcctggatgaggggtgcagtcatctccagtctgaggaaatgcaaattgcccagatgaggtgcctttttctaatttaaccac

SEQ ID NO: 596766 - DNA, 624 bp, Homo sapiens
actttttgaccctgtacactatttaaatacaaaatgcagtttgattcataatggctcttattattgtattctatgtaacaggagtttttcaatagaaatgataaaaaccacatttttttttaatacagaagaaaacttttccaatcttattactctgaaaaygtaattaatgccagccatttattcttgggaattaacagagcatctgttaaattggagggataacatggtatgcctctcctttttatacctatgtgttctgtttttttttttctttttgtcttcttctcagacaacaaatttaaaagactgagctgcctctttctgcaaggcatgccagtataatactgaagcagttagattaactctgttagctgaccaagcttgaattttccctaagattcagtatccccacatgtgaggtattcctgaagttacattgcaggtggcatctcagaactaggaagaccagatggccatgtctttcccatgatgggctggtacacagtatagattgtacactgaacaactccagggtcaccactttcataagctccctaaagttgtacacagttccatctcttcagccatgctcagccttattgcacactcatccctaccata

SEQ ID NO: 596767 - DNA, 419 bp, Homo sapiens
aggtaaaaaaaagggagagagggagaaaaaatgaatttcttaaatttctttaacgtatgaacaagaacctctaatcacgaaaatgacagatcacagcattttttttcccaaaatgtagagaagatgcttttttgcagctacatcatgaagaggaaatgacatagggcaataaaagaaatgtctgcccctgscatccaagggacaaggggggacaaaaggaaaagaaaggaaaaatacagcaatacagcaatagggtggtagaatgtctgactcatgaggcttaatcttgcttctctgggctgcagctggagatgtgttacaaaagtttaaagtaacactgagagcagaggagttcttgtccctctccctcatgggccttgagaaaagactgtggtgtggggtagatgcttactaacagg

SEQ ID NO: 596768 - DNA, 555 bp, Homo sapiens
taacaagaggggtggattatggtgaagataaagaaagctcttgacctagtactctctatggtgctgtactcagaataaatgggaaatatattgaaaaatattctgaaagtgaagtttcagactttttccagtaaatattcagttgcaattaagcactttagatcaacatggctctgagtctgaatggtgctaagcttagataacaatatggcaaattctggaaagagggctcctgtttggaagtgcaaaagaaaatctattaggaatgtattagccagaataaaagccagtaaattctttttttttttttaagacagagtctcactctgtcacccaggctggagtgcagtggtgcgatcttggctcactgcaagctccgcctcccrggttcaagccattctcctgcctcagcctcccgagtagctgggactacaggcgcccaccaccatgcctggctaattttttgtatttttagtagagatggggtttcaccgtgttggccaggatggtctcgatctcctgacctcgtgatccacccaccttagcctaccaaag

SEQ ID NO: 596769 - DNA, 538 bp, Homo sapiens
tcttcagataataacttaactctttcaacaaattgccaatcagaaaatcttcaaatccacctacgacctagaagaccctgcttctagttgtcccacttttatggattsaaacaatgtataactcatagtattgattgacgcctgcctgtaagttctgtcccactagaatgtgtaaaatcaagttgtaatccaaccaccttgggcacacgttctcagtacttcttgagactgtcttgggccttagccactcgtatttggctcaaaataaacctttttaaatactttatagagtttgactttttttttgttgacataaagtacttagtacagtacctggtatagtaattgctctccactccactccctcccaaaaaaagaaagaacaaaactcaatacatttttactgaaggcttggcttatcattgtaattatctatccttaggcgaaaattttcacatataaagatgtgagattagttgtcatagttattccctcagaagaggtcatccaacttattaaaagaggttgcttatgttta

SEQ ID NO: 596770 - DNA, 553 bp, Homo sapiens
tatttggctcaaaataaacctttttaaatactttatagagtttgactttttttttgttgacataaagtacttagtacagtacctggtatagtaattgctctccactccactccctcccaaaaaaagaaagaacaaaactcaatacatttttactgaaggcttggcttatcattgtaattatctatccttaggcgaaaattttcacatataaagatgtgagattagttgtcatagttattccctcagaagaggtcatccaacttattaaaagaggttgcttatgtttatatctgaagtaagagccatatattccttaaagacaatagggctcatatggagcttctatatgtggctagaggtcagttcttaacggagatagctccattgaagatgcttgttgtgtgcaatagagacagagggttttggaatttccatrcgatccatggataggttctatagggtctgtacattcctcttaaatatactgaatgaacaaattatgagccaaataatgaaccaaaagaacaccaggtatcttcattggaaaagcagg

SEQ ID NO: 596771 - DNA, 610 bp, Homo sapiens
ctcttggtttcctatatttagcccagatctccctattactctgtctcaggagtacttctaacataaaccacactgaagggatagaaattgtaactggtacatatcagtttcttaaagtgtagcctatagatcaccagtaatacaacaacatgaggagcttgataaaagtggagaatcatggactacaaaattaatcagatatttagttctgaagtctaggaaaatgaaatttaaacaaggatccaaagaaactcttctgtatactaatgtttgaaaatccagcattccatataccatgtcatcagcaaatctgcagcatagatttaaggtacttccaatgccaacacacttcttatcatcctacttcttcccccacccaaccctcctgcactggagtccgtcttttatagaaaatagagaacatgtctattttatctttgcatttctgtcactgttgagactctcytttgcacataaaaactgcataagaatgttagttgtttaatttttaaccagatccataccctgtgaagttagttttgatcatcacacaaaattacttgcatggcttgaaatggtttacctatttttttcttaaattataaagctt

SEQ ID NO: 596772 - DNA, 596 bp, Homo sapiens
caagcacattaaaaaatgcacaacattattagctgctgggaaacacaaatcaaaaccacaatgagatgccactttgtatccactacgatggccataaaggaaaaaaaaaagattgtaaaaagtggaaaataacaagtgctggtgattatgtggagaaactggaacacaaattgcytgtagaaatgtaaagactgtttagctgcagcagaaaagtttgctggttcaatagtaagttgttcatagaatttccataagacctagcaattccactcccaggtatacccagtagaatcagaaacggagttcaaacaaaaacttgtatgtgaatgttcatagcagctctattcacaatagccaaaaggtagaaacaactcaaatgttcatcaacaaactaacccaaatgtctgtcaacagatgaataaacaaaaggtggtagagtcatagaatggaatattattcctctttaaaagagaatgaagtactgatacacgctacaacatagatgaaccttgaaaatatcatgttaaatgaaagaaaccagacacaataacatgtatgatataagtccatttatatgtaatatccaaaataggcaa

SEQ ID NO: 596773 - DNA, 596 bp, Homo sapiens
caagcacattaaaaaatgcacaacattattagctgctgggaaacacaaatcaaaaccacaatgagatgccactttgtatccactacgatggccataaaggaaaaaaaaaagattgtaaaaagtggaaaataacaagtgctggtgattatgtggagaaactggaacacaaattgcttgtagaaatgtaaagactgtttagctgcagcagaaaagtttgctggttcaatagtaagttgttcatagaatttccataagacctagcaattccactcccaggtatacccartagaatcagaaacggagttcaaacaaaaacttgtatgtgaatgttcatagcagctctattcacaatagccaaaaggtagaaacaactcaaatgttcatcaacaaactaacccaaatgtctgtcaacagatgaataaacaaaaggtggtagagtcatagaatggaatattattcctctttaaaagagaatgaagtactgatacacgctacaacatagatgaaccttgaaaatatcatgttaaatgaaagaaaccagacacaataacatgtatgatataagtccatttatatgtaatatccaaaataggcaa

SEQ ID NO: 596774 - DNA, 496 bp, Homo sapiens
ttcccagaactagagaaaacaatcctaaaatttacatggaagcaaaaaagagcccacatagccaaagcaagactaagcaaaaagaacaaatctggaggcattgttacccaacttcaaactatactataaggcagtagtcaccaaaacagcatgatactggtataaaaaatcgggacattgaccaatggaacagaataaagaaaccgtaattaaagctaaatacagtcaattgatcttcgacaaagcaaacaaaacataaagtgggaaaggacaccctgttcaacaaatagtgctggaataattggcaagccacatgtagaatgaaactggatcctcctctctcgctttatacaaaaakaaactcaagatggatcaaagacttaaatctaagacctgaagccataaagattctacaagataacattggaaaaacccttctagatactggcttaggcaaagacttcatgaccaagaacctaaaagcaaatggaacaaa

SEQ ID NO: 596775 - DNA, 469 bp, Homo sapiens
aaattatggtttaggagtcatgcagctggaggctacaggattctgaccctctctaaactgctcctaagctgcttgaggtacgatgcagactctgcacttgatggatcagctgacaccacccaaatcaatacattggctcatctgatcttgtggctcccacccagaaactcactcagcacaagaaaacagctttgactccctatgrtttcatctctgacctgaccaatcagcactcccagacacactcccatccaccaaattttcccatcccagactcactcccatccaccaaattatcccagactcactcccatccaccaaattatctttacaaactcatggaatgctcggggagactgatttgagtaataataaaactccagtctcctgcacagccggctctgcatgaattactctttctctatcgcaattcccctgtcttgataaatttggctctgtctgggcagcg

SEQ ID NO: 596776 - DNA, 577 bp, Homo sapiens
gatgggaaaaatcattaccgaataggtaactaaaggtgtcttaggtcagagcaggtgaccagggatgattcaggtcaaagcaggtgaccaggataagtcagaatggagcaggagaccaggagaatgatgtgaactactgattaaaactggtggaaaaggttgtttactgaaactataaggaagttaaactttaaaatggaggacaaagaactgaacatactgacatactgattatttgaagagaaatctagaactcactgtatccaacataactttaaaactatacattattatcttayagtttttcaggaaaatgagagcagctgaattaggtatttctagctcaagaccttccttgcatgagttgcagtcaaggtgtcagcctgggctacagttatctgaaagcttgactggggctgcaagatcctcttccaagatggctttctcacgtaaatgttgacaagaagccttagttcctcattacatgaacctctccctatggcttctccaatgtcctcctaacatgggaagtggtctcctcctgaacatgggattcaagaggcaaggaagaagttcc

SEQ ID NO: 596777 - DNA, 289 bp, Homo sapiens
gatctcttgacctcgtgatccatctgcctcagcttcccaaagtgctgggattagcacagtcaggttcttggtgagggctccctcttcccagttatgccctcacatgaccatccttggtgtttgcacagcgggagacatcacgtgtctcctcctcaccttataaatgcactaatcccatcatgagggccctactctactgacctaagataaccctaaacacctctcaaaggggcacckccaaatacattaggggttacatttcaacatatgaattttggggaaacacatt

SEQ ID NO: 596778 - DNA, 531 bp, Homo sapiens
acaaaagagaagggtaactttcaagtttagatatacaacccaaattagaaaaaatgttcatgtatgagctaaaatttatacttacaaaacaaaaatattatacctcactattcacatcctgttctgctgttttaacctttaaacaaatatgaaaactccaggttgtcacatacaactagggttggtaaatgtttttcataaaggaccagacaagggtatccgttatcttaaatgttttgaaccagaagtgttttggattttgattttttttggatttttggaatatttgcaatctatactggttcagcattcctaatctaaaaatctgaaattcaaaatggtccaatgagcatttcctttgagcatcatgtcagcatttaaaaagttttgaattttggagtacttcagattttggattttcaaattagggatactcaacctgtaataaatattttggctttataggccatatgatctcttgtaaatactcrattttgctgttgcagcaatgcatgaacaaatgagtatgac

SEQ ID NO: 596779 - DNA, 596 bp, Homo sapiens
tgatcactgaacactgccaggtgatagagaatgattggttaaaataaactaagttgtggggcttctgccttttcaaaaatacaggggtgctttccaataaaagcagagttcaagtagagaaatctcaatttttaaaaaactgagaattttttaatctactactagtaataattagggttgctaacatccatgcaacgcgttaatagggtttgtttttaaatctcacaacaacccatgtgagtattattatccccattttacaactgaggcattaatgtttagaaaggttaagtgacttgcctaaagtgacaataatgtgtggccacacatcattaacasaggattcctttaaatgtcagtttcctctaggataagtaaactacttttctagcaccatgagtcaggagagcaccttggaaaagctatgcttcaaaaatgtacacaaagatagcaaagagataactgcagaacggaaaaaaagggtattggagagacttcaggaatcttttggactgaaaggaagtagaggccacttcgagagggactggaatagaagaaataggggagctggctagaaccagggtgacatgtcactc

SEQ ID NO: 596780 - DNA, 574 bp, Homo sapiens
gtattggagagacttcaggaatcttttggactgaaaggaagtagaggccacttcgagagggactggaatagaagaaataggggagctggctagaaccagggtgacatgtcactctgccactctctctggggattttcatttgtgtttgactatatgagtatagctcatcttctccttggtctgcagcctggctgctttttcagcttctccttgttcactgcccacccatacytgcccctgcagggacttgtatttaaagtgcctatggggactttggagactggccctgactttaaatggccacagaaaaaaaatgaggtagaagagggaggaaagccaggaaaagaaattgtggaaggaaagtttaggcaattggaaaaaaaaaataagaccaggtaacaaaatggaaagcaaggaaaaggtcttcaacagtgacaaatactttcagagagagcatttctcactcaaaatcaagagaaaacaaatgaatttttttgataaagcataattgaacctagaactatatgttgtttttttttgcttttcatctctgtaacaaaactttaaattctgc

SEQ ID NO: 596781 - DNA, 306 bp, Homo sapiens
acaaggtctcactttatctcccaggctggaatgcattggcatgatcatatttcactgctgccttgagttcctgggctcaagagatcctcccacctcagcctcccaagtagctgggactgtaggcaagtgccaccatgcctggctaatttttttwaaaaattttgtaaaaacagcaactcactgtcttgcccaggctgtcaatttcctctgatttaattcaatttactgataaggatatcagtaatattgaattatggcccatcctaagtgcctcatttgaatataattgcctcttgaaaggtccta

SEQ ID NO: 596782 - DNA, 612 bp, Homo sapiens
ggctttctggtgtgcaggttacatatatttttttttaacttgatctttaccaaaaaatttaagaatatgatatactgattaaacccttttttttttagacaggatctcactgtcacccaggctggaatgcatggcatgaacacagctcactgtagcctcaacctcctrggctcaagggatcttcctactttgggtgctcagtagcttggagtagcttggaccacaggcacaaaccaccaagcccaggttaatgtttattttttagtttttttgtagagataggattttgccatgttgcccaggctcatctcaaatttctggactcaagcaatcctcctgccttaacctctaaaagtgttgggattacaggtgtgggccaccacacccattttataaagaaactgagatttaggggcaggcctatattcattgtatagataaagaaactgaggtttagaggcaggccactattgagaccctgttctctgacttccatcaaagctcctgttcttagtgtaattgcctgatgggttcattctgcctgctgcacagacaaaaccaatttactgagaccttagtattacagtaaagaaagagtttaattaatgctag

SEQ ID NO: 596783 - DNA, 496 bp, Homo sapiens
tggtttcatccttggcatggctatttactagctatgtgagctacttacttggccactttgaccctcacttttcttatttataaaatgcagggaaatggtgacagcatttgtacaacgataaaatgagatgacatgtgagatagttaccttttttgatagttctttattggcagctcccaccatcaccactcttctccacagatctatgtattctcttcctctgccttacttgaggccwggaggctgaacttcaaggaatgcatctcttggtttcccttgttgatttgttcccagttcagttcagcgattggaagcactggcaggagactggagaatacaaaaaagagaggtaagagtatttcttccctgatgtttccatgtgttggcaggtatatttagcactagctgcatccctccaagaccaatgcttcaaccaagtgacccatatttttaataatcctagctccctctgtgcttgagtaacttcatttcctcc

SEQ ID NO: 596784 - DNA, 617 bp, Homo sapiens
gttggtcaatgggtacaaggttacaattaggaagaataggttctggtgttctattgcacagtagggtaactatggtcaacaataaggtattgtatattacaaaatagctagaatagaggcttttgaatgttctcaccacaaataaataaaaagtgtgtaaggtaatagataaatgtgctaactaccctgatttgattattagataacatatacagatatcaaagtttcagattgtaccccataaatatgtacaattacaatgtgtcaatttagaaattaaaaaaattaaagaaagcaaatgaggaaatagaaatatatgttcaattccttttgtgcccagaggctttgttaaaggttcttcaaaaaatgttcacttcttctagcttcaattgctccagaggatttctctaacatccrtcccatttggcagaaccaaaattagactttttgttttggacacaatgcctgctctcctttatattcatagacttaaaagtttcagagtttatccttcctaaaactactgagtctaggacatgaattttgattcatttgtcccatgcctgcagttaagggccaaccttatagtctttggtatgtggcttcaatgatactga

SEQ ID NO: 596785 - DNA, 617 bp, Homo sapiens
gttggtcaatgggtacaaggttacaattaggaagaataggttctggtgttctattgcacagtagggtaactatggtcaacaataaggtattgtatattacaaaatagctagaatagaggcttttgaatgttctcaccacaaataaataaaaagtgtgtaaggtaatagataaatgtgctaactaccctgatttgattattagataacatatacagatatcaaagtttcagattgtaccccataaatatgtacaattacaatgtgtcaatttagaaattaaaaaaattaaagaaagcaaatgaggaaatagaaatatatgttcaattccttttgtgcccagaggctttgttaaaggttcttcaaaaaatgttcacttcttctagcttcaattgctccagaggatttctctaacatccatcccatttggcagaaccaaaattagactttttgttttggacacaatgcctgctctcctttatattcatagacttaaaagtttcagagtttatccytcctaaaactactgagtctaggacatgaattttgattcatttgtcccatgcctgcagttaagggccaaccttatagtctttggtatgtggcttcaatgatactga

SEQ ID NO: 596786 - DNA, 625 bp, Homo sapiens
tattcaggcttcacttctaattctacttctcttgctatttctactacatttgcagttacttcctccactgaagtctggagctcttcaaagccatccatgaaggttggaatcaaattcttccaaacttgttaatgttgacattataacctcctccaatgaatcatgaattttcttaatggcacctagaatggtaaatcctttccagaggttttaaatttactttgcccagatccatcagatgaattactatctatggcagctatggtctttaaaaatgcatttcttaaataataagacttgaaagtcaaaattactccttgttccatgggttgcagaattaatgtgtgttagcaggcttgaaagcaacattaatcatgtacatctgcatcagagctattgggwgaccaggtacactgtcaatgagcagtagtatttttaaagaaatctttctttctgagagttctttccttaaagctcatgaatcaacctctcctagcttcagagattttcctttctcacctacatcagactttatagaattgaaaagagttaggaccttggtctagatcaggctttggcttaggagaatgttgtggctgctttggtcttctatccagaccactca

SEQ ID NO: 596787 - DNA, 466 bp, Homo sapiens
gtattgatcattttgctaggagactagattcagtcctgtttattggcttggcagttatagcagacttgccctttgtgtacaaattagattatgtggagaatgattttaaaaatgttggttccaaatctacaygtgtatatggagtgacaagtttctgccactctctagaggccaaggtaaaaatcaaggaatatgtaaaaacaagtttattcctctttccagttttgagaaacagagagcagataggcagaatgagtttattttccctagttaaaagtgaagaaaaatcttatcgctagcatgtcataacctaaataatctatggggaatccactaataccttaagaaccaaatatttctggcccagaaagggccaaagacatcattaacataagcttccacacataaaaaaaagatttgcaaactctccatgtaaaagcgtggcttaagataattctaaatagta

SEQ ID NO: 596788 - DNA, 356 bp, Homo sapiens
caggaaaattagaacagaagggaatgttaaaaatcccacactagttaatagggcttaatccaggcatacaaaacatcatgtcttcttggtaacatgacttcattttaagtgccactccgtggtgagctgagcttcctggtctacttcctaacctaccatgatcttctgggtcagcctgtatgtggctactaggggatagagtggcaggcaggaagacggagaagaaaaaaggcagggaacacaaggcagaaaccaaccaaagtaatctaacttcagcaactcttgaaacttttacagtattttggtttatgttcaccactaygccttttgtaattcttgtattttataatttgtta

SEQ ID NO: 596789 - DNA, 599 bp, Homo sapiens
ggatcctttccttacatcttatacaaaaaattaactcaagatggattaaagatggattaaagacttaaatgtagaccaaaacccataaaaaccctacaagaaaaattaggcaataccattcaggacataggcatgggcaaagacttcattactaaaacaccaaaagcaatggcaacagaagccaaaattgacaaaagtataaytttaaaaattaaaaaaaagaattttaaagttaataatgattatgctttaatgaaatagacacaagatcacaataatgaaaaacacataaaagatgattcaaatttagtttaaaatacacatgaactaaaattcaggaggaaattttcaaaatgttaacatttttatctctgtgtgatgtgattatggatgacttttatgtccttttttctatttagtttcttcccccacagtaagaatattacttaaattaacagaaagccaaaaaaaaaaaaaaaaaccacaataaaaatgagcttaaaagatgtggtactgaaagatttttctttgaacagttgcacaagcaaagacagtacttagtagtaaagcctctaaggaaaaagtggacatctcagcac

SEQ ID NO: 596790 - DNA, 599 bp, Homo sapiens
ggatcctttccttacatcttatacaaaaaattaactcaagatggattaaagatggattaaagacttaaatgtagaccaaaacccataaaaaccctacaagaaaaattaggcaataccattcaggacataggcatgggcaaagacttcattactaaaacaccaaaagcaatggcaacagaagccaaaattgacaaaagtataattttaaaaattaaaaaaaagaattttaaagttaataatgattatgctttaatgaaatagacacaagatcacaataatgaaaaacacataaaagatgattcaaatttagtttaaaatacacatgaactaaaattcaggaggaaattttcaaaatgttaacatttttatctctgtgtgatgtgattatggatgacttttatgtccttttttctatttagtttcttcccccacagtaagaatattacttaaatwaacagaaagccaaaaaaaaaaaaaaaaaccacaataaaaatgagcttaaaagatgtggtactgaaagatttttctttgaacagttgcacaagcaaagacagtacttagtagtaaagcctctaaggaaaaagtggacatctcagcac

SEQ ID NO: 596791 - DNA, 462 bp, Homo sapiens
catacctcttctgtctcgaagtgtaacacatgctattttacacctctgaaatactctttcctcccattttatgtgctttcagcaacagtagcggagcatggtggtatgaactaaaaagagctatcaccttggcacataatacaggacacccctatggcctggcatgtatatataacagcgagaatacctcagcgatggcacacacccactgtccatcaatctgcaggctcaggtcttaacatcaacattgtgtgccagggaacagcaatggcagaagsagtctaattgggcagatagtttcctttctgtttagtgttggaatcaggacaagtgtcacccttcctagggttcttggatttttcttcttcttctttttttttgttttttttgtttttgttttttttcttcttcttcttttttttgcctagcagggaaagcgaagttgggtcttaaagaaagata

SEQ ID NO: 596792 - DNA, 608 bp, Homo sapiens
acttatggccttgaattttcattgggatatgttggattcgaattgactttgaaatattctaaaggagaattccagcagaaaattgtgagcttaagtctgtcactcaggaagggtgcagtctagagatatagagctataaaggtgaaaatcttcagaaaataggtggtaactgaaaccagaagaaagaacaggtgtacctaaataaaggtctgtaaaatgaggaaagaaagttcgaaaagaattcttaagaacgtcattacttaagaagtacatagtagaaaaattagtgaaagataattgtaagacgtcagaacgaatggttaagatggaagaaagaatggttgctttatgcgggcttttagtttccccaaagagcgaggtattgtattggtgatttttgcattttccagaacacctatcataatttcaygcatgtagtatgccctcaatatttattgaacaagacgtgaggaataaatatatataaatattgttcttagttctcctttgattgttcttttcttagcatcagcaacaccagtaccactcctattccagcgtatttatctcacctttcagaagatactgagtaacagcagggggcctgt

SEQ ID NO: 596793 - DNA, 570 bp, Homo sapiens
acttcagatcaatatagagaaatctagtttcattgttctctcattttgtctctgttctctttgccaagagataacttctgttctatgtaaaggcaggaaaagcacgtagccacattgatattgtttggctgtgtccccacccaaatctcatcttgaattgtagtttccataatccccacgtgtcttgggagggacgtgatgggaggtaattgaatcatgggggcagttaccctcatgctgttctcatgatagtgagtgagttctcatgagatctgatggttttataaggggattttccccttttgctcggcacttcttcttgctgcggccatgtgaagaaggatatgtttgcttccccttccaccgtgattgcaagtttcccgagatctccccagccatgaagaagtgtgartcaattaaacctctttcttttataaattacccaatgtcaggtatgttgttattagcagcatgaaaatggacctaatacgcacatatataagtagccttacgcacacacatgcagatgcacacacaaaatcctcctccccattcctctttccacataca

SEQ ID NO: 596794 - DNA, 597 bp, Homo sapiens
gaggcaacagcaggctgcccaggaggacccttgggcagggctggcccaccacctctggtctggtggctgcctcagcacactggactgcagggatcggtgtccagcccagggccaaggcagactggtgggggctttcccaagctgcccctgcctgcctgtggtccgccccatccctgactgtcccctccaggcctgcctgagcgcctcccccaccctgggtgtcctctccaggcctgcctggaccccgcccccctgtaggtgccacctgcctgggaagaagggattgaggaatccaaggttyagcccgcagtggctcctactccacaaggaaacaggcacagaactggccctgatgccacccatctaccccaggccagccgtcctcatctccagcctctcagccctgcccaaccttcagcagggctctgtccccagtgactgccaggcttctctagggagaccctggggatccgtaccttcccactgcctccctgcctggccctccctcccaacctggccccaaaactgcacctgccagggcaccaatgccctgcccttcgccgagtcgctcaccaccagcccagcctccacaggccc

SEQ ID NO: 596795 - DNA, 435 bp, Homo sapiens
ccagggagagcacgctcaggaggaagatgagagtccgggtcctgtgggatggacgtggagcctccaggggcactgaactctatagatctgccagtcaggggcagaggggtccagggcagaggagacagagatctgggcaccacccacgaaggcacagtgggcaggggatggagccctctggagggagccagcgcaagggtgcgagaaggagcttgcaaaggaagcagagcggcagccaggacaagggaaggygcccgcgaggaatttgcctgtagaccccagggttgagtaggctttaaggaggagcacatgggcagcgttgggccgctcacagactgaacgcacagaggctggtgtagatgcctgtgcgctctgccttggcaacaacctctgtcttgggtcaggtttcctggaagcagagctgagatggaattc

SEQ ID NO: 596796 - DNA, 435 bp, Homo sapiens
ccagggagagcacgctcaggaggaagatgagagtccgggtcctgtgggatggacgtggagcctccaggggcactgaactctatagatctgccagtcaggggcagaggggtccagggcagaggagacagagatctgggcaccacccacgaaggcacagtgggcaggggatggagccctctggagggagccagcgcaagggtgcgagaaggagcttgcaaaggaagcagagcggcagccaggacaagggaaggtgcccgcgaggaatttgcctgtagaccccagggttgagtaggctttaaggaggagcacatgggcagcgttgggccgctcacagactgaacgcacagaggctggtgtagatgcctgtgcgctctgccytggcaacaacctctgtcttgggtcaggtttcctggaagcagagctgagatggaattc

SEQ ID NO: 596797 - DNA, 489 bp, Homo sapiens
atcttcccaaattaactagttcttttaamtttaaaaacataacttcctaatatgatgaaacttagattctcttaaatgttccaacattttatataaactttatgatttcaactgatagtcataagtctaaatcaagtaattcagtgtatatttcaaatgttaattaaaaggccaaactgtcccttctaataaccccaaatctcttaaacatcacaaatgcttataataccaaacacgcccagattccttcactcaaaactatgaatactggaagttgataccataaaacatttctgtacctaattctaaatattcccttgggtttaaacatttttttttttcactgaggaaacaactaagagatttgagcagcattatctaggtaattggaggttagaaaatactagcattatcagtcagtgtactgatggtattttcatctaccacacagacgggagttgcagaaacctatttatgtattgttacagg

SEQ ID NO: 596798 - DNA, 599 bp, Homo sapiens
ttagaaagaacaccagaacttaaaataacctgctcacttgggcttgctctacagcatgtctgtatggtctgcactctctccccrgattaattgctttcatatcatgtacatttgcaggaacagtgtgacaaatgataaaacaaaataaggtcacttaatgtgattaaggacaagagtgatttgtgcaaaatattattgaaaattactatttaagttgcattttgcgtgtacttttcagaattttaaaaagagtgatatgatgtgtggagatgatggatgagggtgagatggaaagcatattaatgtatgaagccactgaaacttctgaaaagatactcaagagttttacattaagcatctcaatacctaaaataaagctgtgagataagcattattaatttattttcagatcagaaatctaaggcacagagggtttgctcaaaaccaaacagctagtaagtgtcagagttggagtcttattaaggctatttgactccaaagactaagctcctatcgaccatgaagaacttgtaaaagacaaaaaaaaataaaataaaacaaaaacacatctttattatttattcacatccctaacacat

SEQ ID NO: 596799 - DNA, 575 bp, Homo sapiens
tttttcctatacatacataacaataataatcttcaatttataaattaggcacagtaagagattaacaacaattataataaaatagaacaattataacaatatgccagcatcactactcttgcactttgrggccattattcagcaaaataagggttacttgaatacagccactgcaatagtgagacagtcaatcttatcagatctgagatggccactaagagactaacgggcatgtagtgaagacagcatggatacactagacatagggacgatttgggttctggaatggagtgggaccctgtgagatctcatcaggctactaagaatgacacacaattaaaaacttacgaattatttatttctggaattttccaattaaaatttttgaacaacagttgacctccaggtactttgaagtattactaaagccgatatatctaagaactcttttcaacctggccttttagatttccaccaaacagttgttctttgatttcagtatataagacttttttcctactgtcatttcacagctgagcaagccatgtgaacctttgaaagctatagtacaattt

SEQ ID NO: 596800 - DNA, 575 bp, Homo sapiens
tttttcctatacatacataacaataataatcttcaatttataaattaggcacagtaagagattaacaacaattataataaaatagaacaattataacaatatgccagcatcactactcttgcactttggggccattattcagcaaaataagggttacttgaatacagccactgcaatagtgagacagtcaatcttatcagatctgagatggccactaagagactaacggscatgtagtgaagacagcatggatacactagacatagggacgatttgggttctggaatggagtgggaccctgtgagatctcatcaggctactaagaatgacacacaattaaaaacttacgaattatttatttctggaattttccaattaaaatttttgaacaacagttgacctccaggtactttgaagtattactaaagccgatatatctaagaactcttttcaacctggccttttagatttccaccaaacagttgttctttgatttcagtatataagacttttttcctactgtcatttcacagctgagcaagccatgtgaacctttgaaagctatagtacaattt

SEQ ID NO: 596801 - DNA, 575 bp, Homo sapiens
tttttcctatacatacataacaataataatcttcaatttataaattaggcacagtaagagattaacaacaattataataaaatagaacaattataacaatatgccagcatcactactcttgcactttggggccattattcagcaaaataagggttacttgaatacagccactgcaatagtgagacagtcaatcttatcagatctgagatggccactaagagactaacgggcatgtagtgaagacagcatggatacactagacatagggacgatttgggttctggaatggagtgggaccctgtgagatctcatcaggctactaagaatgacacacaattaaaaacttaygaattatttatttctggaattttccaattaaaatttttgaacaacagttgacctccaggtactttgaagtattactaaagccgatatatctaagaactcttttcaacctggccttttagatttccaccaaacagttgttctttgatttcagtatataagacttttttcctactgtcatttcacagctgagcaagccatgtgaacctttgaaagctatagtacaattt

SEQ ID NO: 596802 - DNA, 646 bp, Homo sapiens
aaaattgtttatttccttctttcaccccatctcttcctccaactaaagatgaaatgaattaattgctttgtgccttagtacattggacacaaaaccaattcatttgaattaggtcaggcaaaagttcagtcatttggctactagtatcctttgataatggaagtattatggtgtgtattttttcacaggggccattagactgtaggtcatttggatgtcattaggagaaagaatgatgatcttgaattgcatagaacatttcgtgctttctcatgctgtgctctttactctttccctttttaagagaaaatctacaaaaaaattttaaactacattataataatattattctatactggaacaaaaaaatgacaaatatacaaacaaattcaaactatggaaaaagttggtggggcaggggtggagactatgaaaaataaacaatcaaaacagcagatatgttcctaaattaaaagaaaattaaatattagaatgactaaagacttcagcaagctacaacaaagccaaggawtttttcttctctgtgcatactagagccacttattttctctttaattcacattatactttattatatagtagtagacacttttgctttctttgaacattttattcatttactaca

SEQ ID NO: 596803 - DNA, 508 bp, Homo sapiens
actctctttaatatttaaaatttctcagtttttaaaatattgcttttttagtttctatttctggaattgttagaatattttgatatatactccatgactcatatttattcatttattttttgcatttttttctatcagtgatgtgttatagatgaaatcattagtaatacatttctgcttacttttccyagtttatgtccagtctagagtttttcctgcctctcaaattttttattttaataagtatattgttttatttccaagatccattttgttctctctcatacccacctttatttccaagattcattttgttctctctcatacccaccttttcttaacacatttttgccaatttccagatatatctatatatagatatagatatagatatatagatatatatatgtgttgttgttattgttattgctgctgctgctgctactgagatggagtctcactctgtcacccagactctagagtacagtggtgctatctcagctcactg

SEQ ID NO: 596804 - DNA, 542 bp, Homo sapiens
gatatatcaaattgcaatctaactctctttaatatttaaaatttctcagtttttaaaatattgcttttttagtttctatttctggaattgttagaatattttgatatatactccatgactcatatttattcatttattttttgcatttttttctatcagtgatgtgttatagatgaaatcattagtaatacatttctgcttacttttcctagtttatgtccagtctagagtttttcctgcctctcaaattttttattttaataagtatattgttttatttccaagatccattttgttctctctcatacccacctttatttccaagattcattttgttctctctcatacccaccttttcttaacacatttttgccaatttccagatatatctatatatagatatagatatagatatatagatatrtatatgtgttgttgttattgttattgctgctgctgctgctactgagatggagtctcactctgtcacccagactctagagtacagtggtgctatctcagctcactgcaacatacacctc

SEQ ID NO: 596805 - DNA, 508 bp, Homo sapiens
actctctttaatatttaaaatttctcagtttttaaaatattgcttttttagtttctatttctggaattgttagaatattttgatatatactccatgactcatatttattcatttattttttgcatttttttctatcagtgatgtgttatagatgaaatcattagtaatacatttctgcttacttttcctagtttatgtccagtctagagtttttcctgcctctcaaattttttattttaataagtatattgttttatttccaagatccattttgttctctctcatacccacctttatttccaagattcattttgttctctctcatacccaccttttcttaacacatttttgccaatttccagatatatctatatatagatatagatatagatatatagatatatatatktgttgttgttattgttattgctgctgctgctgctactgagatggagtctcactctgtcacccagactctagagtacagtggtgctatctcagctcactg

SEQ ID NO: 596806 - DNA, 572 bp, Homo sapiens
ggttattaaacataatcatatgaaaataattacttggccacactgggcatattttaaagagctcttcctccatttacctcaaaacttgtttctttaagtttttgttttcctaatattaattgagatatatttaacatataatcagctgaacaaattacatagcatcatttgataagttttgatatatatgtactcccatgaaactatgactacaatcaagaagtgaacagctccatcaccaggaaagtttactaggaccattttctaatccctccttcctactcccttcctattcccagacagccactaatctgctgtcacttttgattagtttttatatctagaacttttataaattgtgtaatrtaacatgtatcttttttctggatgctgttacttggcataataatttggagctagatccatgttgctgcatatataaatagtttatttatttgtattgctgatagtgaattgtattattcactattaacgaatatgaatatgccacaattgctttatcagatttatctgttaatgaacagatgattgtttctagtgttggctattac

SEQ ID NO: 596807 - DNA, 527 bp, Homo sapiens
aaatgtgagaacaaagattggttctcaaagtgtggtcctcagaacagcagtgtcagcatcacctgagagcttgttataaatgcaaatttttagaacactccagatctgctgaatsagaaattctggaagtggggcccagcaacatgtactttaacaaaccctacaggtgatgctgaatcacactaaaggttatgtttgagaaccactggtttaaaaaaagaagttgaaaattgaggattcttttaattcaatatgatttatcaaatgcttactgttttgagaaaatataaataagattcctaatttatggaggatacaatataaccaattctattgtgtctttacttgtgatttgttttatgattttaaacgaattatttacttgttaatatctcctttacaataattgtttattttctttaaattatcagtataaaccccatatgcaataggtttaacttaattatatttttactgaaagtactatattgcctcaataaactgttctccaaaatacctattttgtg

SEQ ID NO: 596808 - DNA, 527 bp, Homo sapiens
aaatgtgagaacaaagattggttctcaaagtgtggtcctcagaacagcagtgtcagcatcacctgagagcttgttataaatgcaaatttttagaacactccagatctgctgaatcagaaattctggaagtggggcccagcaacatgtactttaacaaaccctacaggtgatgctgaatcacactaaaggttatgtttgagaaccactggtttaaaaaaagaagttgaaaattgaggattcttttaattcaatatgatttatcaaatgcttactgttttgagaaaatataaataagattcctaatttatggaggatacaatataaccaattctattgtgtctttacttgtgatttgttttatgattttaaacgaattatttacttgttaatatctcctttacaataattgtttattttctttaaattatcagtataaaccccatatgcaataggtttaacttaattatatttttactgaaagtactatattgcctyaataaactgttctccaaaatacctattttgtg

SEQ ID NO: 596809 - DNA, 534 bp, Homo sapiens
cattgtcctactccctagctcaaaatatatggttcagggctttttctctatcttggaagtgatgcagagtgacacactgcataaagtgttggttaaacacacagccctggaacccagctacccatgttcaaatcctgactgcctcttttattggatatatcaccttgggtaggttatttaacctttatggtctttgatttctattctgtaaaattggcataataatgatatctcaatgcttgtaacttattaggctcactaaatgttagctcttatttttggttcattaygtttacatttagtagaattaatttgattaaatgcttacaaatttagtttaaatatattattttaaaaattttataaaaaacaaatttgcagcttatataattaagaagctatgaggaattcgatctgaaatactgctaaatgagatgtgcataatttttctaccaattaatgtttttcattttttaaaaaacagaagcaattttagaagcacagttcccatatttgcagataaagcactgagtc

SEQ ID NO: 596810 - DNA, 544 bp, Homo sapiens
tttatcagttctgaagctcctagttaatgtggaaatggtcacgtgctccttgttagacctttattgcaaagtgggccacttaatctgaagcaatgtcatgtggggactcaaaatgttaaagcattctgcatatctgaggcctcagacagtggtgctgattgaggcactgaaggcaagmaaactaaacttataccagaaaacatgtcaatcacacaaacgacaaatatctgctccctctaacgtaggcgaagtctcaataccacagaaggctgactggtgtcctcaactcactactggtctctgctgctgacagatcaagcattcagctacagaaataggctaagcgaaccttgtgacaggagactgatgctttagggcctaggaaaaatgtccaccctgcaatcataatcattcaattcacggtcttgtaacacagtcactggtatatgcaaggacaaagactagacagatcatcatgtatagctgattgttcagtaccacctctattttgaatgtctgtcatgggcattgttgtggatgcaaa

SEQ ID NO: 596811 - DNA, 544 bp, Homo sapiens
tttatcagttctgaagctcctagttaatgtggaaatggtcacgtgctccttgttagacctttattgcaaagtgggccacttaatctgaagcaatgtcatgtggggactcaaaatgttaaagcattctgcatatctgaggcctcagacagtggtgctgattgaggcactgaaggcaagcaaactaaacttataccagaaaacatgtcaatcacacaaacgacaaatatctgctccctctaacgtaggcgaagtctcaataccacagaaggctgactggtgtcctcaactcactactggtctctgctgctgacagatcaagcattcagctacagaaatagrctaagcgaaccttgtgacaggagactgatgctttagggcctaggaaaaatgtccaccctgcaatcataatcattcaattcacggtcttgtaacacagtcactggtatatgcaaggacaaagactagacagatcatcatgtatagctgattgttcagtaccacctctattttgaatgtctgtcatgggcattgttgtggatgcaaa

SEQ ID NO: 596812 - DNA, 482 bp, Homo sapiens
aataaccaatatgaacaagacaggtgattatttaaaaataccaagtgagtaccatttatatatatgatttatttaatgctttacagttttaatatctaattgcctttttcctttatctttaaaatgtgagttccctgcatatggataacctagttatagagaagaaaagaatgataaattccatgatagccaaatatttcaatgaatatcttaaatgttaaatatcatatattaatattatagatataacatctgtctaaaaagctcacacttaaataaagttartttaaataaactcagatggatctctttttatctatgccacattttcaatgtgtcaaaataacattctctctgatatattccaatgtgcctttttgatgttgatttaaagtcactactttatcctgccaagtaacatttgttatcaaacataacacatgccactaagaattgtcaatttctaagggtaaatagagacc

SEQ ID NO: 596813 - DNA, 639 bp, Homo sapiens
caataacagtctcacacccttctatagtcctcacagaatagttaagatgtgtttttaaaataagcttaatatttttttcttctgcgctccaaatcttgtaattwaaaaaaaaatctccatctcactgaaaattacacaaaatttcttacctttgcttacaacggataattcatattatccctctgacttcattttcatcagtctctccttcctcactccatccattactctggatgtcttgctgctcctcaaacattctaaatatgctcctaccttaagacatttgcacttactcttccctgtgctgacaacactctttttccaggtattcaccggactcagtcccttacttcctgctgaactcaacttgaaagtgttatctaagaagccttccttggtcactttatataaaataactctgatctcaatttcttaccatctcgcttaaaatattaaattttattttatgcttaacacaagctaacatgaaaaatgctgtgttcttcaatttagggttttataaagaagacaataaattaagtattaatatatgcaacaaattatgaatgcactctgatgtcaatatttactttctctctagggatctggtgagacttctttaaacttagaattaataat

SEQ ID NO: 596814 - DNA, 480 bp, Homo sapiens
cctgtaattcccatgtgttgtgagaggaaaccagtgggagataattaaatcaagaaggggttttcaaccatactgttctcttggtagtgaataagtctcatgagatctgatggcttgacaagggggtttctcctttcacttggctctcctctcttgcctgccaccatgtaagatgtgccttttgcctaccatgatgattgygaaggcttcccagccacatggaactgtgagtccattaaacctttctctttataaatttcccagtcttgggtatgtctttattagcagcatataaacagactaatatagtatgtaagaaccagtagagtggggtgctgctgtaaagatacctgaaaatgtggaagcgactttggaactgggtaacaggcagagattggaagagtttggagggctcagaagaagataggaaaattggaaaagtttggaacttactagagacttgcatggctttgaccaaaa

SEQ ID NO: 596815 - DNA, 581 bp, Homo sapiens
atgtgctaaaaaccaccattttatcaggagcaaatatccagctctgaattaaattacctcattcccctgccacctcaccatagatagaacacagcctgacttctctgtagatatgagtattacaaaacacaaggctttaggagcgaaacaaccataaaactcctgttcaatttaaaacaaaaccatgcaccttttagccaagtcccactgtcatctcttatctctaatggcatcactataaatagcagttttctttttcttttaaaattgcttcaaagactaatgtacaggaattcttataattttaacaaatgaataggtggtgaaggcatctttcctcaccaattgtgaaaggggcttttgtagattataaagactatttggctttttattactgagacatctaggtgtccaacayatcattaaatctttatgtacttttagaacgttctgaaaaatctactcacttttcaaatgcattcagtatataagcactgctaaaataaatagggtgttaaaataaaacttttaagtaggcctttataaggtgagataaacagtactgccagataaaatttttc

SEQ ID NO: 596816 - DNA, 660 bp, Homo sapiens
gttgctaaatagctttctaaacaagttactcgaattcatattttcactaataatgcctcaatagcctgtcaatccatgttcttgtacactctgtacattatcaaaatatgtgactgttttcaaaataataggttaaaagaatggactgttaactttgatttagcctgcattactttacctatgagtgtgcctgatcttcaatatagctattgtaattgttttagagctccactactgagcccatataaaacagcaaatgtaattgatacatgtgtatgttctgacagttccaccagctggctctatcycccatctctctcactctcctcggttctccctattccctgagatgtgataatattaaaattaggccaattaataaccttacaatggcctctaactgtccaggtgaaaagaagagtcacatgtctctcactttaaatcaaaaggtggaaattactaagcttagtgaggaaggcatgtcaaaagccatgataggcttaaagctagacattttgcatgaaacagttagccaagttgtgaatgcaaaggaaaagttcttgaagaaaattaaaagttcgacttcagtgaaccaacaaacaataagaaaatgaaacagcctcattgctattttagtggtctggatagaagacaaagcca

SEQ ID NO: 596817 - DNA, 547 bp, Homo sapiens
tgaaaccaggaatctgagaccagccctgtagtctcagctactcaggtggctgaggcaggaggctgaggtgggaggatcacttgatcctagtaggtcaaggctacagtgagctgtggtcatgccactgcactccagcttgggtgacagagtgagaccctgtcttgagttaatgtatatatgaatatatattatataaataatgaacacattattaatatatatgttcatttatgaatacatatacattcaaatatatattacacacatatacatattacacatacatatatacacacgtatacatatacacacacgtgtatacatatacacacacgtgtatacatatacacacacatgtgtatacatatayacacacgtgtatacatatatacacacgtgtgtatacatatatatacacatgtgtatacacatgtatgtgtgtatatgtgtgtgtgtgtgtttatataaagagagagagagagagagaaaggataaaagggtggagatgaggaacttttcattcccaggtggccatgtggtcaccatc

SEQ ID NO: 596818 - DNA, 560 bp, Homo sapiens
ggttgctggaattcatggggcctgaaaaacaatttttttttttgagstgtagtcttgctctgtctcccaggctggagttcagtggcatgatctcggctctctgcaacctctgcctcccaggttcaagcaattcttgtgcctcagcctcctgagtagctgggattacagcggcctgtcaccacacccggctaactttttttgtatttttagtagacatggggtttcaccatgttggccagggtggtctcctgacctcaagtgatctgcttgccttggcctccccaagtgctaggattacaggcatgagctaacacacccggcaaaaaacaatttaagcgatccttaaataaaagccttatgattctaatgtcagagatcctgtctatgggaacagtgggctccccatacacttgatctctgatactagaatcaaggctttcgtcagtatcttgtgctacattactttcaatagcagagaagtgagccaaagtgcagcctgattaatacttaattgtaactacatttctggccataacctgcatgcaattcttgtcaacctt

SEQ ID NO: 596819 - DNA, 466 bp, Homo sapiens
actcttcatgatatgaatggtcttttgtcactcatgtattctttactgctttggtaaatggaatatctcagaacattggcattaggtgagttkttaggctttacaaaatatacccactcctgcatgctgcttctccgagcccttgtttccttctgctaccatagcaattttgacgtttctacttcatttatggtaggctgttgcttcctccaagcacactaacacttttcccaagggtccttgacaggatattacattctgtattccaggacaatgatcccacatcaacatatttttcctcattcaactttatgttctgtcccttttgatccagcacccctagaatctactacgactcctagttttttctggtccatgttgactagatcctacacctcctttggtgtcctttatcccccttgtcaggtctaacacttctccagccaggttatgttgtgattttaac

SEQ ID NO: 596820 - DNA, 596 bp, Homo sapiens
agcctggcaccgggtgaatggggaaaagcccagtcagagaataatgattctctgaggtgaaagtayagatttgggagtccagggatatcaaaaaagctaaagttcacaggaaaagtcactgaaaaagaaatctgcagagagggaactcgagatcaacaatgtgtgaggaagctacctgagacctaagacagaaccaccctgcagtattgcgcagactctaggatgaaaaccatgatcctcacctctagatattcacaactttgtttaatcctctctctctgagtgtgagaaggacctgtgactcacttctgatcaatagaacacagcaaaggtaaaaggatgtatgtgattacatatattacataagattgtagcatcattgttactaaaagacattcttccttgctggcttggaataatcaaactgccaaatttgtgagctaccatatggagtaggccacacagaaaagggcttccagccaacagccgacaagaaattgagccacttgccctgcaaccgtgaaaaaaactaaatacttttacaaaccatgtgagtttggatctgaatttgaaagcagatacttcctgatttgagc

SEQ ID NO: 596821 - DNA, 603 bp, Homo sapiens
agtaggccacacagaaaagggcttccagccaacagccgacaagaaattgagccacttgccctgcaaccgtgaaaaaaactaaatacttttacaaaccatgtgagtttggatctgaatttgaaagcagatacttcctgatttgagcctcatgtcataccacagcccaagccaaaaccttgattccagtcttgtgatattctgaaagaaaaagtgaagctttaaaaaaaacaagtgctatctagtctcctgatattgcactatcttcaagttaaatctttggcccttacaatcagcttgatgagcaagggctccatgtacctccacttccccagttaaaagttaatatggtccaatataaataaaacagagtttttaagggttaaaaatccattaaactagacctatttagagaacagaatgaaagacactgatttcaccattcagagtatacaatattgggctcttgaataaagcatttaatataactttcaccacccttagcagatacaggttgcaggtctcataagtgccgtaatgrcttacttaagtgaacatgatacatttcaatcatcagagaaacatcaagagtgaattacggtaaat

SEQ ID NO: 596822 - DNA, 604 bp, Homo sapiens
ctccttttttgtatccactacatagcatccatgcatcttaaacttgaccacacattgtgaaatagatctgctatctggtttcaccagtatactctcaccaccatgtaagagaattcccattrctcaacattcttgccaatgcttggtattctttctctctctctctctctctcttttttttttttttttttttttgcactcttcccaatctgataggtgcaaaattatcttattctggtttcaacatatatttttgattaccatttagtatgaacatatttttaattgtttcttggcaatgtaaactttctcttacgtttaaatgtattgtccattgtttcctattgggcttttaatttgttctatattagttataggaactgtttataaattccacattctaatcatctcctgcttttatgcattgaaattatcttctagtctatgacttatatttcatttaacttttctgttgttgtttatagcatctctttttcctacacttttttacattttaattttttgtataatcaaaattaaatttttctttatatgctctctggatcctattagtcatattccccctctagatgtattaaaagat

SEQ ID NO: 596823 - DNA, 548 bp, Homo sapiens
tactctcaccaccatgtaagagaattcccattactcaacattyttgccaatgcttggtattctttctctctctctctctctctcttttttttttttttttttttttgcactcttcccaatctgataggtgcaaaattatcttattctggtttcaacatatatttttgattaccatttagtatgaacatatttttaattgtttcttggcaatgtaaactttctcttacgtttaaatgtattgtccattgtttcctattgggcttttaatttgttctatattagttataggaactgtttataaattccacattctaatcatctcctgcttttatgcattgaaattatcttctagtctatgacttatatttcatttaacttttctgttgttgtttatagcatctctttttcctacacttttttacattttaattttttgtataatcaaaattaaatttttctttatatgctctctggatcctattagtcatattccccctctagatgtattaaaagatattttctaacagaaattctttacaacttctaaa

SEQ ID NO: 596824 - DNA, 604 bp, Homo sapiens
ctccttttttgtatccactacatagcatccatgcatcttaaacttgaccacacattgtgaaatagatctgctatctggtttcaccagtatactctcaccaccatgtaagagaattcccattactcaacattcttgccaatgcttggtattctttctctctctctctctctctcttttttttttttttttttttttgcactcttcccaatctgataggtgcaaaattatcttattctggtttcaacatatatttttgattaccatttagtatgaacatatttttaattgtttcttggcaatgtaaactttctcttamgtttaaatgtattgtccattgtttcctattgggcttttaatttgttctatattagttataggaactgtttataaattccacattctaatcatctcctgcttttatgcattgaaattatcttctagtctatgacttatatttcatttaacttttctgttgttgtttatagcatctctttttcctacacttttttacattttaattttttgtataatcaaaattaaatttttctttatatgctctctggatcctattagtcatattccccctctagatgtattaaaagat

SEQ ID NO: 596825 - DNA, 597 bp, Homo sapiens
gactctctcctggagcagtctagaaagatgggtgctacgtgggtccaccctgacaacagggcaagtagagagggctgcagtgcagcaagttgacactgggtctcagaatacatgtaaagacagacatattgtttctaaacaaacccgtctcacctaagaaacccagaaggagcaaagtaacctaatagagaaaattctgtgtaggatgaactgtcagaaatcagggcttgagacagagacatgatgcctcaagagagcatttcccatgttaaagcctgaagagaaggaggtggccatgaagaaaagtccctgagaaactaacaaaattgccactttagagaaagtgccaacatttatgtgtctgcwacacggaaggcccaacatttaattaaagagtggaacctaaaaaacgctggaactaaaacctaaaatgtgatgacaaatgttttaatacactgaagaacagcaacttactctagccaacatgaaaaatgtggcatagttcatcagaatctaatattcttactatttcttctttctgtttgtcctagttagctgctgaagggtgtacctcataagctctaaatatcaaatact

SEQ ID NO: 596826 - DNA, 536 bp, Homo sapiens
aaatctgtgcttttctttccttgctttatttgtgcattttgtcccattctttgttcaagatgctgagaactttgacaccctctactggtaacagaaatgactgggtcaaatagacaaaaaacaaagttttgaacaagctgtatgtactctacatctgagcagaaaattttaatacagctgcatagtttgcctctgtcacccttgagtttctaaactctgccatatgaaaagcatgccacaaatagtagctacttttctagcctgggtcacagaaaggagattcctggaatgaagtgaaactgagctgagcctaagtgaacccaggagaacatagcaggccacggttctcrtgtaatggaagcaaggaacaaaatacattttgttgtgaacaccgagatattggggttgttacgatagcaaaaacaaatctgagaaataataaacatacagaatgaattattgaaactgacccaatagtctcatcaatagataggttttgtttgcttttttgtttttgataaacatagaaattgacc

SEQ ID NO: 596827 - DNA, 560 bp, Homo sapiens
cactagtcagcagatttagtatgaaaaaaaatgaatgtaaaatagctaactaatagtttttattggattacttgttgaagtgataatattttggatatatttgttaaagaaaatatattagtaatactaactcacctgtttatttttactttattaatatgtagtttaagtgatctgaactgcaaaggtgacagcacaatcctccagattaagtgcacccaagactctgacaccaactgcctggagttagtgtccaactacaaggttagaaggaaaagcactctctcttcgggtaacaactgcaagtttgtggggtttccaaaaccacccttagttttgataatttgctaggactccaggacttattgaaagctattctactcttggttatgctttatcatagacraaggttacaaactgtaatcagccaagggaacagactcatagggcagagtctaggagagttccaaacatgaagcatccattgttctcaggacatatcaccatcctggcatcaatgtgtgtcacaacaaacacagggtattgccaatcgaggcagc

SEQ ID NO: 596828 - DNA, 537 bp, Homo sapiens
atccattgttctcaggacatatcaccatcctggcatcaatgtgtgtcacaacaaacacagsgtattgccaatcgaggcagctcacctgagtttcaatgtccagagtttttattgaggctttattacataggtgtgattgattgatttcccacaagattgtactcaacctctaggatgaccgatagataccatacaacccaaaccccctactctaaatcacatggttgctatttatgctatttatggcatgaacagcgccattctaaggctattgggtatggatggcatcgctaataagatctagtttaactggcaccagtcaatgtatgtcatacctgagaggagtgtctttgtttacagggtctaagctaaacctcttttcagacaaggtcaaattctttactacacaaagtggcttctagaaaatgttaaatgttaaattacataagtggctcacattatggttctattagacagcacttatggatacctttccgtagacaaatttcttacagtgaatcccatcatactgaatct

SEQ ID NO: 596829 - DNA, 477 bp, Homo sapiens
tttgataatttgctaggactccaggacttattgaaagctattctactcttggttatgctttatcatagacaaaggttacaaactgtaatcagccaagggaacagactcatagggcagagtctaggagagttccaaacatgaagcatccattgttctcaggacatatcaccatcctggcatcaatgtgtgtcacaacaaacacagggtattgccaatcgaggcagctcacctgagtttcaatgtccagagtttttattgaggctttattacataggtgtgattgattgatttcccacaagattgtactcaacctctaggatgaccgatagataccatacaacccaaaccccctactctaaatcacatggttgctatttatgctatttatggcatgaacagygccattctaaggctattgggtatggatggcatcgctaataagatctagtttaactggcaccagtcaatgtatgtcat

SEQ ID NO: 596830 - DNA, 477 bp, Homo sapiens
tttgataatttgctaggactccaggacttattgaaagctattctactcttggttatgctttatcatagacaaaggttacaaactgtaatcagccaagggaacagactcatagggcagagtctaggagagttccaaacatgaagcatccattgttctcaggacatatcaccatcctggcatcaatgtgtgtcacaacaaacacagggtattgccaatcgaggcagctcacctgagtttcaatgtccagagtttttattgaggctttattacataggtgtgattgattgatttcccacaagattgtactcaacctctaggatgaccgatagataccatacaacccaaaccccctactctaaatcacatggttgctatttatgctatttatggcatgaacagcgccattctaaggctattgggtatggatggcatcrctaataagatctagtttaactggcaccagtcaatgtatgtcat

SEQ ID NO: 596831 - DNA, 589 bp, Homo sapiens
ttagtgaacaaaaaataatctttgatggaatgtaatttatattctcttggaagagacagcaaaaaatgaataaataaatgtaaattaaaatgtgcagcagaaaagcaggatccagggctgcagagtgaaagaggcactctttcagagaggaccgttaggaaggacccaagaaactaagttgaaagaagaccggattgaagtaaagcagagagacttgtgaatatctggtgtaaatgcattctgacaagaaaactcatgcaaaggccctgaggcatcatggtgctcagcacatttaaaaaacagaattgaggtgtgtgtagctggaacacaataggaaatccatcttttattagacttcttgtgacagtgactgttagatttccacataatggtttaaaatgtctattacccaacacartgcaaaacaataacaacctttgaataaaatccacagacatactagtaaaaagaaatgatgtgatcagtatgtggaccacacttgtgttaaaggaaaaaaaactactactgagattataaatctatctcactactgatagattataaatctatactacaaattataaatcta

SEQ ID NO: 596832 - DNA, 569 bp, Homo sapiens
gaaatggctcatgagattattgaagctgagaagtctcatgataggtcatctgcctggtggacacccagggatgctggtatgcggtgatggctcagtccaagtctgaaagtctcagaaccagggaagcccctggtgaggttctcagtctgagggagaaagcctgagaacctgaagagctgctggtgcaattctgggagtccaatgactggaggacctagagatctgatatctgaggtcaagagaaggagtgtcccagctctgagacacacacacacacacacacacacacacacacacacacasagagagagagagagagagagccagagctaattttttttctctgctcttttgttctatctatccgagtccccagcccgctggatggtgcatgcccacaatgagcaaagatcttcctcactcagtccaccaattcatttgccagtcacctctggaaacacccttatagacacacctagaaatagtgctttaccagctatctagtatcccttaatacaatcaagttgacacctaaaattaaccaccacacagatttttgcagacaatga

SEQ ID NO: 596833 - DNA, 622 bp, Homo sapiens
tgctgctcagttttttattgcatttctccctggaggtagctgtatactggcaatggttaaaataattctatatgtaaagtttgcatggaatatgtaaatatttgtactttaactctggaacaaatctaaattgaaatgtataaatatattgttttcagaactcctttcagatgtctcacctattcaaaactccttttgaatatgaactgaagattggacacacagttgtaattatttattaatcttacatttaatattccccatgctgccataaaatgtctgaggagacatgctgctgagaataaacttgctcagcattgcagtacaatgcagacaattttccacagggaaagaaaaaaaaaaagaaacgtatcttttcacctattgcagagcaaaacactaacgattttgcccatttgagctgagaagtaattagtggtatgggatagaagccaagcatatcaagaaaatgtgttttacttatgtactgatatgcccattttggatttagctgtaatttctgtrcattttgtaaatttcctttacttctgtcacaaccttaatattaataacttgcttccctgaatacagtgatttaaaaataatgaccatattttattta

SEQ ID NO: 596834 - DNA, 503 bp, Homo sapiens
tttatgatttggtctctcttgcttggtcagggcctggtagttctccttgactatctccatctcagtgtggctaccgctgactggagatactttggtgaacaccagccttttcayccagcctagactggttcttctgcagcctctgcctctgctggaggtgtatctgcccctgacatggtgagtctcatgacaagcctgctggcactcaaggcagcattagcatcacccgggaatgccactctttcagatatccacttggtgtactgcctcatctccttcaggattttactcaaggatcacttttcagtgaggcctaaataaaagtgtatctcccacagcacttcctattccccttcttgcttagctggtaatgccatctaacttttaacatattttatttatttattttttaatgtgtgtctttctttcactagaatgtaagctccatgagggtagagactttcatctctgtttaatacagcatatcccatgtttagaacata

SEQ ID NO: 596835 - DNA, 558 bp, Homo sapiens
atattagttcacttgggctgccataacaaaaccaaaaacggagtggtttaaataacagaaatttcttttctcacagtgctgaaggctcaaagtccaagattaagatgccttcagggttggtttcctctgaggcttctctcattgacttgcagatggccaccctcttgctgccgctttcacacggtcttttctctgcatgcatgcatctctggtgtttctctttctatgtcctaatatcctctttttacaaggaaaccagtccatgttgttttagggctcactataatgtcctcattttagcttaattatcgctttaaattccctgcatcyaaatacagtcacatgctaaggtattggaaattagggcttcaacatatgaatttgggggagacacaattcagtccataatatatgcagatgatccatcttataatctgtcttctcttttttttaacttcatcccttttaatgatccatcattaaagctatgccctttaaaatatatgtcatatgatgttttttaccctatctcagctactcattctcaatatcacatca

SEQ ID NO: 596836 - DNA, 616 bp, Homo sapiens
cattcatgatacaaatctctgttttgtcctgctaccctctgtgcacaccattacacacatacacaatgccacagaacacctgcagcccagagaaagaggtcctcagttggaaccattttacacagaatcatttcaggatttttttttggaaagaggaatattttaaagtaaagcttgaaagaggaatgaacacttttccagaataaagagtggcataagcacaaacaggaatttcttttaaatggtggttattttggaaaaaaatggcgagtaaacctgaaccagtagtgattttattggtagcaactagaagattattttagtcaactaggggatagttatattatgtaaaggacaagttaacaattaaaatcctgcagtgccaagttttggcatggggtaaccctgastgcagaacgatgaaataaattcaggacatttcacggcatttctgttaagtgcaaagtgttatgtggttagcaaacattctatatctgtaaaattattcactccccagactgaaaaaaaataaagacctaaaaaaagggaatatgtactaaatatttccaagagaaaagaattgttaatttctcaattaaaaaactgttatgtaaaa

SEQ ID NO: 596837 - DNA, 538 bp, Homo sapiens
cttgactcctcttagcctatgtctgtaaatgaaggtaataacatctattcataattcacagcgtagttgaaaagagtgcttcattccttgtagttgctcaataaatgttaacctcttggcccctacaagagtgtttctgacataatgtccacaggtgagcatgaaaaatttgacccctgtttctggggacttagtcagtgtatttacttatggtctatattgaaggatattactrgccttgctcacagaagttggagcacccaccacctttttaattgtaatgaaatccatgaggaatcgaaaaggagcaactggacactctcagatgtgctatatcttaagcagttaacgtcttagctcctccccatcttctccacctcaccttgttatcttttgaagagtttggaacaaatttccctggctgcttgggcttctgtgacaaggctgtctttgagaagatcaaccacaactcagcccactttgatgttatataagtgggcttcaggagacctatagtacccatttccatcctgccact

SEQ ID NO: 596838 - DNA, 538 bp, Homo sapiens
cttgactcctcttagcctatgtctgtaaatgaaggtaataacatctattcataattcacagcgtagttgaaaagagtgcttcattccttgtagttgctcaataaatgttaacctcttggcccctacaagagtgtttctgacataatgtccacaggtgagcatgaaaaatttgacccctgtttctggggacttagtcagtgtatttacttatggtctatattgaaggatattactggccttgctcacagaagttggagcacccaccacctttttaattrtaatgaaatccatgaggaatcgaaaaggagcaactggacactctcagatgtgctatatcttaagcagttaacgtcttagctcctccccatcttctccacctcaccttgttatcttttgaagagtttggaacaaatttccctggctgcttgggcttctgtgacaaggctgtctttgagaagatcaaccacaactcagcccactttgatgttatataagtgggcttcaggagacctatagtacccatttccatcctgccact

SEQ ID NO: 596839 - DNA, 586 bp, Homo sapiens
ttaaatcaagccacagtttacttctgtgaatctaatcgaaataatcaaaatgttttctgaaaaactgcaacctaattgattgtatgttaacaatcatattatgctttcccagtaaaattatttttttcctaagttaactatttcatgcttctcactccatccaaaaggaatagattgagacatatgtccttttcatgataatactatggttctcttctttgggcaccagaattgaaagatacycctacaggtttacaatgcgcaaaacagaattaaagcacatgaactcttcattactggcacacaaccccaagtcctaaaccctcaagatggtggtggagaatctcagcccaggaccagatattgtttgtcttgtttgttctggcagagatgaatttgaggctaggcagttctgagctttcagatattgggatatcatctgcttatggtttgggataggatgggaaaaatgaaaataaaaattgttctggctggagcaaagcagctacttttggggaccctagggtgttaagtgatgtcagttcttaggggaaaatgcttacctagggctaaagaggggagtcta

SEQ ID NO: 596840 - DNA, 553 bp, Homo sapiens
tttccttgcactaagtaacctgctctgaaattattgcatcataaattgaacccagcactgactgatttcaaagccctgtcccttttgccgtgtataatagaatgctgcctctttgacctaattggacctatgtttcccctgcaaaatgctatgggatggatgttctgtaaggtcctttatactctcacatcctgtaattccatcctctttattctaaatgcaggattgtaaaacttactaagctttttaaagacttaataagtcttactccaataaatgttcacactatgtttggctcagtatagtagatacttttatatgtaaaagatataaaaygagtgaatatgtataattggccactgggagcaagggattaggtacctgttttctgtaggcatcattttttcagaaagatcctgtttaaaatctaaattcttttatttctttatttgttaaacttctgattacacaacagaacacaaatgaaacaattcacaatccatgctgtgttgaaagaagaaagggattcaacaagtataattgagcccaacag

SEQ ID NO: 596841 - DNA, 614 bp, Homo sapiens
gactcacttcctaataccatcgccttcggggttaggatttctatatataaatttggggagaaagcaaacattcagcccatggcacctgtatataagcaaacactggaaagatatagaaaacattaattaaagtagttacatgtggagtcagacaataggactgggcaaaagagagaaaaaggtgggagcaagactttcattgtactattttgcatttttaatattatttttgaatgacaaaaagatattatctatcctaaaaattgaatgataaaaactgttgcagaaaaataactcataaaattacctcagtactacattattgaaacacaagtaacttcatttgatcagtaccttgattgaacagtttacatacactaaatatggagccagagaaatagaagtttcctccrttttggctccaggaagattgtagtgagggaggaactggaactgggaaagaatttgtcactgttatttattagaacctgcaggccagcaagcatgtcagggatctgaataaaacaaagcaaaaagcattattagcatcaaaaaacaaccactggcagtgagcaacgccacttgcagaatgaataaacaggtgtatagccact

SEQ ID NO: 596842 - DNA, 592 bp, Homo sapiens
atatgttttttgagctctaaaaagctacatggaggaaaactaaaccaaatattcaaactatacaagacgtgtgagagaaagtgcaaaagtaaatctagattttttttaacactgtgaggcaaaataaaatgtttaagatactgagtttctctctgtccttgtggaggtcacagtctagtataatcctttgctttaataaagctgatttcctcactggcctatattttctatatatatatatattaaaccaagtataatttatatatatatatattaaaccaagtataatatatatatattaaaccaagtataatttatatatatatatttcagatatataatgaaatttaattgctaaataagttttacataaaatgyatttccactaaaggcattgcttccttgcaatgttatactgtatcctgtccctcctctctcctcaccctcatgccagcattgtgtcaactcttcctatgcaaatcccattcattttctaatgcctatttagtgtatacaaacactgaatgctaagcatgtgccaggcacttgcttggcccaaaaagcaatgaagagcaattatacagtttaagga

SEQ ID NO: 596843 - DNA, 615 bp, Homo sapiens
gtttgtgaaccacttgtttaggatactagtggtgggagacaagatgagtgacaatgggtttggagagtggragatacgctttccagatgcgatagaactgaaagacatgataacagattagatgaaaatggaagtaaaatataatttcaaggtttatgatttgagtgattgatgcctactagagtctttcagagatctaggaataaaatattaagtttggggtggttggcatagaaaataaatggttatttctcattgggatgtgtcaaatctgaaatactggacattcaaatgcagacatccagaatggtagtgtaatagagagatctgaatgtagaaaaaaagattatgataaaagtgattttaggagtgattaaagttgaagagctaattaaaatcgtgggagcaaaagaagtcacccaaggagagttgagaagtagagaaaactgaaagtagaacgtagaaaacactaacatttaaagaacagattaatggcaaaacctagggaagaaaaaacataattatggtattttagaaatttagcaaggcaagagtttcaagaagtgtaaagtagtcaactattttaaatgtcacaaggagattaaggtaaggata

SEQ ID NO: 596844 - DNA, 547 bp, Homo sapiens
gagagatctgaatgtagaaaaaaagattatgataaaagtgattttaggagtgattaaagttgaagagctaattaaaatcgtgggagcaraagaagtcacccaaggagagttgagaagtagagaaaactgaaagtagaacgtagaaaacactaacatttaaagaacagattaatggcaaaacctagggaagaaaaaacataattatggtattttagaaatttagcaaggcaagagtttcaagaagtgtaaagtagtcaactattttaaatgtcacaaggagattaaggtaaggatatatgtgtccatcaagtttagtaataaagatagttggacctttgctaagaaaaattttgatggtaaagaagtcagattacagtatgaaaaaaatgaatgaattagaactgcaacatgtaaaaagcttagaatttatcgctcttgtctttacagcaaggaacagttaaacaagctgaaaataaacaactttctcacacccatcagagaactgaagtttcagggcaaatcatcacctcaaaatccggagaaaagg

SEQ ID NO: 596845 - DNA, 547 bp, Homo sapiens
gagagatctgaatgtagaaaaaaagattatgataaaagtgattttaggagtgattaaagttgaagagctaattaaaatcgtgggagcaaaagaagtcacccaaggagagttgagaagtagagaaaactgaaagtagaacgtagaaaacactaacatttaaagaacagattaatggcaaaacctagggaagaaaaaacataattatggtattttagaaatttagcaaggcaagagtttcaagaagtgtaaagtagtcaactattttaaatgtcacaaggagattaaggtaaggatatatgtgtccatsaagtttagtaataaagatagttggacctttgctaagaaaaattttgatggtaaagaagtcagattacagtatgaaaaaaatgaatgaattagaactgcaacatgtaaaaagcttagaatttatcgctcttgtctttacagcaaggaacagttaaacaagctgaaaataaacaactttctcacacccatcagagaactgaagtttcagggcaaatcatcacctcaaaatccggagaaaagg

SEQ ID NO: 596846 - DNA, 471 bp, Homo sapiens
actcacagcacagggaggaggataccacaggcaatacagagacatatgggattgcacttgggagcacagtaaacaatcaaggactgtgggaggcaggctttgtaatatcaagagtggagagcaccctcaggtcccatgttggaatgtgattggcctgtctgaataattctgcaagctggcagggaactgaaacctgacactcattgatgagagggatctgcatttggtctatttgataaggagggctggtagactagggaacctcatccaagggagcacagttggcaggtataataaccatgcttctgtatttgatgctttgacaccttgctgatmctaggggaatcccttccagggccagccaattcctagagatagtaaagccctcagctctgcgcacaatctttctttctttctttctctcttttttttttttatttgacagagcctcactctgtagccaggctggag

SEQ ID NO: 596847 - DNA, 517 bp, Homo sapiens
acttcctaactcaatctatgcagccagcatgtcctaatatcaaaactagataaatatattacaagaaaggaaaactacagaccaatatctcctattaacatggacatacaatcctcaacaaaacattagcaaatcaaatccaacagtttataagaaaaatgctcacaacaatcaggtgagatatgttctaggtatgcaaggctggtgtaacattcaaaaatcaattacttaatccatcacatcaacaggttaatgaattaaaatcatatgaccatgtcactggatacagaaaaagcatttcacacaatccaacacacatccgtaataaaaattctcaacaaatagggaatagaagggaacctcagcttgatgaagaacatctayaaaacaatctacaactaacatcatacttaaggatgagaaactggacgtttttcccctaagattgagaataaggcaaggatgtcacatctcacccatccttttcaacattgtacaggaagtcctagctagtata

SEQ ID NO: 596848 - DNA, 620 bp, Homo sapiens
tttagatacaacaccaacagtacaatccatatatatatgctgtattttttaaagctaaaatcttctgttctatgaaagacactgttaggagaatgaaaagacaagacacagatggggagaaaatattttcaaacgatatatctgattaaggactttcatccaaatatacaaagaacttttaaaatttaagaatgaagttttaaaatgagcaaaggatatgaacagacacatcaccaaagaagatatacagatgtcaaatatgcttaataaaagatgctcaacatcatttgtcattagaaaattgtaaattaaaacaacaataagaatataattcagcaataaaaataaaagaaaattgtaaattawaacaaaaataagaatataattcagcaataaaaataaatgttaacaagtcatattttgtggcttgaaggagaggaaagttcataacattaaatgtccacatcagaaagtctgaaagcgtgcaaatagaaaacctaatgtcacacctcaaggaactagagaaacaagaacaaacaaataccaaatccagcagaagaaaagaaataacaaagatcaaagcagaactaaatgaaattgaaacaaaaaaatcaaagata

SEQ ID NO: 596849 - DNA, 641 bp, Homo sapiens
ttcaaatatgttaatataatattttttttcccaaatgaaatttccttctctcttgattaaaaaaaaaaaaaagcaaaaatacctaccttttgtaaataatccagaatataggaaagaacaaagaaggaacaacaatcactctcagttycattatcctgaaaaagcattattaatgttcaggacagagtttctaaacagtagtattattgaagctttagataggataatcctttggtggggagtccccctgctctgcccttacaggatgcttatcagcatttctggccactactcactagatgccagtaccatccatacagttttgacaatgaaaaatttctctagagattgccaaatattccatgaggggcgaaatcacccctggttgagagctactggttttgatgtatatgtgtgtaagtgtgtgtgttcaatcaggttatcatcttggatggcatcaaaaattccagtgcttacctaaactagctacatgccataatgtattttgaaacattttttatagttgtgacaatgggagtcttgaggcccagtgaattacatgggttcttctacataagtagcaggagggacttagtctgatttattctttatcaatttactcatcttttagatgtggacca

SEQ ID NO: 596850 - DNA, 641 bp, Homo sapiens
ttcaaatatgttaatataatattttttttcccaaatgaaatttccttctctcttgattaaaaaaaaaaaaaagcaaaaatacctaccttttgtaaataatccagaatataggaaagaacaaagaaggaacaacaatcactctcagtttcattatcctgaaaaagcattattaatgttcaggacagagtttctaaacagtrgtattattgaagctttagataggataatcctttggtggggagtccccctgctctgcccttacaggatgcttatcagcatttctggccactactcactagatgccagtaccatccatacagttttgacaatgaaaaatttctctagagattgccaaatattccatgaggggcgaaatcacccctggttgagagctactggttttgatgtatatgtgtgtaagtgtgtgtgttcaatcaggttatcatcttggatggcatcaaaaattccagtgcttacctaaactagctacatgccataatgtattttgaaacattttttatagttgtgacaatgggagtcttgaggcccagtgaattacatgggttcttctacataagtagcaggagggacttagtctgatttattctttatcaatttactcatcttttagatgtggacca

SEQ ID NO: 596851 - DNA, 555 bp, Homo sapiens
catccaattcattgaggactcaaataggacaaaaagggagagaaatggtgacttctctctctctctcttctcaagttgggatatccttcttctcttgtccctggacgttgaaactcttgattctcagacatttgggcttcagaacttccracagcagatccctggttcttaggcctttgaacttggattgaattacatcactggctttcctggctctccagcttgcagacttctcagcctccataattatatgataagccaattcttatagtaaatctccttctcatgtatctatagatatcctataggttctgtttctctggagaaccctaagtacagtaggcttccctaatccatggggaattcattccaccatccccaggggatacctgaaaccatgaatagaaacaaactttatatatacatatggtatatcaacatgcacatgtaccatatatatgtacatgtacatattccataagtatatataatgataattcaacttacctttttttttgactttctggtgatgagagtcaaaaagtaaaaaaaaat

SEQ ID NO: 596852 - DNA, 555 bp, Homo sapiens
catccaattcattgaggactcaaataggacaaaaagggagagaaatggtgacttctctctctctctcttctcaagttgggatatccttcttctcttgtccctggacgttgaaactcttgattctcagacatttgggcttcagaacttccgacagcagatccctggttcttaggcctttgaacttggattgaattacatcactggctttcctggctctccagcttgcagacttctcagcctccataattatatgataagccaattcttatagtaaatctccttctcatgtatctatagatatcctataggttctgtttctctggagaaccctaagtacagtaggcttccctaatccatggggaattcattccaccatccccaggggatacctgaaaccatgaatagaaacaaactttatatatacatatggyatatcaacatgcacatgtaccatatatatgtacatgtacatattccataagtatatataatgataattcaacttacctttttttttgactttctggtgatgagagtcaaaaagtaaaaaaaaat

SEQ ID NO: 596853 - DNA, 504 bp, Homo sapiens
ttttggagctctaacacttaatgactgccctattgagtttctgatttgcacggggcctgtagcccctttgttttggccaatttttcccrtttgaaatgggaccatttacccaatacctgtaaccccatcatacactggaagttattaacttgcttttgattttacaggctcataagcagaacggacttgccttgtctcagttgagattttggacctggacttttgggttaatgctagaatgagttaagactttggggtactgttggaaaggcatgattgtgttttgaaatgtgagaaggatatgagctttgggcggggctgggatggaatgatgtgatttggctttgcatcccaacccaactctcatcttgaattgtaatccctgcatgtcaagggagggacctggtgggaggtgattggatcataggggcagtttcccccattctgttctcatgatagtgactgagttctcaccagatctgatggtttaaaagtgtgtggcag

SEQ ID NO: 596854 - DNA, 595 bp, Homo sapiens
acctctgaaacctgtggaagacagtcaatgtgaaggcagggcaaaaccaagtaactatttaaactattagagtaggtagttaggtaggcatgagcaggacaggagcgaggccccatccagaaatgccaggcaaccatcaggtgatggttagttggttgttaaactgttgctctaaaataataattggtcacagccagtgcagggaaaaacagtctcccaataaatagacaatacctgaaactggtgatcagcagcttcctgataagatttcaggagttgggtgaacaggctcaagaatgcccactaaaaagcaaaatggcagagattaactggtatatgatctttctctaggaaaacytgactggtaaggaaaaaatgcctcaaatgagcatgtgtacaactttggcaaacacagtgtgcatgttgcccctccccaagtgctggcggaccagtgtgcatgcagatagcccaccccaagggaagaatcaggggagaagaaatgcaaaccttggaacgatgccaatgtattctttcctccttgcaggcaagaatcgtttgctgcagacctgttggattcacagctggtaacaaaacc

SEQ ID NO: 596855 - DNA, 516 bp, Homo sapiens
aatatggattttccccacaacagacaccattgcagggccatttcaaaatatgtcaaagaaatatatcttggggtaaaatatttcagttttcttcagggcctgctgtctgctatgttggtctcttattgctacagtgtctcccttcgttgtcttaaggactctgtttttttttttttttttgagacagagtctccctctgtcacccaggctggagtgcagtggcacgatcttggctcactgcaacctccgcctcctgggttcaagcaattctctgcctcagcctcccgagtagctgggattacaggtgcccaccaccatgcccggctaatttttgtatttttagtagagacgggtttcaccatcttggccaggcaggtcttgaactcctgacctcgtgatccacccgcctcagcctcccaaagtgmtgaggcgggtgctgggattacaggtgtgagccaccgcatccggccaaggtctctgttttaatgttaatgctggtcagtagtgactgaattc

SEQ ID NO: 596856 - DNA, 484 bp, Homo sapiens
aaaatgatatgaaaatctgtttttctcagacagcatattagtttattaatttagtatttgataattttttcagatacagataatatctaagtgataatttaaaaaaatccaaacatcctaaataaaaatctaagccaaaatctcataacaagcctgtctcttaatgagctgtgacagtgaaataatcctttttacatggtgatagctgatattgtgatagctgtaaacttagctgtcatcacagatcttggctacagaggctgctgtggtaacgagtgaacctaatgggctttgtttacttgagtgaggagttttcttcatgccccaaccctgccygcttgcaatgtgcatctgaagccaggaggatgtctctccaactgatcgtatatttctttcttgtttttcctttttttttttttttttttttgagatggagttttgctcttgttgcccaggctggaatgcaatggcacgatcttggctc

SEQ ID NO: 596857 - DNA, 484 bp, Homo sapiens
aaaatgatatgaaaatctgtttttctcagacagcatattagtttattaatttagtatttgataattttttcagatacagataatatctaagtgataatttaaaaaaatccaaacatcctaaataaaaatctaagccaaaatctcataacaagcctgtctcttaatgagctgtgacagtgaaataatcctttttacatggtgatagctgatattgtgatagctgtaaacttagctgtcatcacagatcttggctacagaggctgctgtggtaacgagtgaacctaatgggctttgtttacttgagtgaggagttttcttcatgccccaaccctgcccgcttgcaatgtgcatctgaagccaggaggatrtctctccaactgatcgtatatttctttcttgtttttcctttttttttttttttttttttgagatggagttttgctcttgttgcccaggctggaatgcaatggcacgatcttggctc

SEQ ID NO: 596858 - DNA, 618 bp, Homo sapiens
tccattaaatcaggatctcatacaagttataacacctgaatgtttgacttttcagagtattttgccatcacaggtgtggcatcttgcccttggatatatctacattctgctgtagaatgtcgtggtctttctgagggtcacatacatcctgtcttgtcataatgttaaccattaagagtcctcaggggcatggaattgaagaaggaactgttgccagcagttaactgaccaagctagagttccctgacccaacgtaagggtgactgtgacacacatggataattttagcttcatgtttaagattttgttatttgggtaggaaacattccaaatgcagtttgaaacacatattaaaattgaggcacacaggaaagaactggctcaagtttagtccccaagttccttatagtaggaataggaatccttagagtataagcaatccatgcatagtattctgttatctatcatgtagatcatttaatctctaattttttggggtggggattctcttgtttctaaatcttacactttcagtttcttctgtgtcttaaatatagattattgactrttgtcttaaatactaataaatacattaaatgtatcttaaatactactatg

SEQ ID NO: 596859 - DNA, 532 bp, Homo sapiens
attttacccaaaagaacaaatacttttagttaccaatgtccatgcgtttaattcatatctatatactgatgactaccaaatctataactgcagctcagctcacttgcctacacttcaaaactatatatccaccagcctatgttcatcacaatgggctatacctcttaccattcaaacttaatacagctatactagaaactcctagacgcctatcccaaatatttattcttttttttctaataacagaaaccttgatctttggttaggcacacagccaccagaaaaatcaaatagtgccccttgtccataagagtcagcatatgaatactttctttccaatggagtctctattttgtyggctggaatcctaatgtgcatttcatagttagaatacatatgtgctagttgaagcatggattgccacagtagaccaggatttggaagacacgtaatcaagctggtaggacagcacaatagtaggagactagattcctaattattttgtgaacctccctattagctcttacctgcc

SEQ ID NO: 596860 - DNA, 564 bp, Homo sapiens
ttctttttttttttttaaagaaagtgctgtggccaaaccaaatatttctgtgggcctccatagaactatgaaacactaatctatgaccattgactaacaactgctaccggaagtagttacttgctactcccaggactcacagtccaactatcttttagattccctgcatagcaaccggcagacctccatgtagcatgagctgacacagacagacatacagacatacacacacacacatgcacacgcacatttacagagtgcatatgaatgaaaatcccatttatatcaggagaaaaacccacatcctccccaatattggtgttgggctccacagactactcaaagccatcactgtggtttgcccatttagtctcaartaacactttatgtggaagagaaatgttacattatagtccatatgccactgcgtcaaatccaatgcactttgcattcaatcttgccttcaggatgaggtaaagaaaagttgctactgtatgcatggcataatctcatctcctatctcctggaagcaaatggttaaacaaaaattataaacacaacttc

SEQ ID NO: 596861 - DNA, 303 bp, Homo sapiens
aaatgatcaaattctataataaactgtaaatgtatttcaaaaaaataggaattttcttatgtttagtacattttgcttatgtagcaatctggtagcatctttacataagacagtcatgagattataatcatcatatagtgctctgtaagtaccctgacctctccttgctgtaccctcccccaagaaaagttcccctaagcctagtgcctccaactacgtaayagtcatacatttttgtctcataggtatagagaggcaggatatatatagcattgaagaaatgactgaagatggttcttacct

SEQ ID NO: 596862 - DNA, 563 bp, Homo sapiens
cctgggctgattccctgtgggtgtcaccatcgggctctatgtgccgcctgtctgtgccttcccatttatggaaatggcagcacccttatcctggcccccaacactgcacttaggacaccactctgactcctctgtctttttgcctatcatctaatcagtctggccaagggatatcaagagttcattctaaaactcttttccgtttttctcattttcactgtyactacctcaatctaggccttcatagctttggggctgaattattgtattagcttaaattttatttttctcattaccacccctcgcaaacacatgcccacaccttcacctgctcatgcatctgacacacagttgctagattaatactacaaaaataccatttctattaggcttatctcctttaaaaaagaaacctttgattttttttaaattcacagataaacattatatatattcatgtgtacaacatgaagttttcatatatgtatacattgtggaaaggtttaagcaaattaacatattcattacctcacatacttatccttttttttgtagtgagaaca

SEQ ID NO: 596863 - DNA, 547 bp, Homo sapiens
gaactgcttgaacccaggaggyggaggttgcagtgagccgctactgtgccactacactccagcctgggcgacagagcgaagctccgtctcaaaatgaataaataaataaataaataggattttaagagtactataaacaaccgtatgccaacaaattggattatctagatataatggataaatcccgagaaacaaacaacctagctagattaaattatgaagaaacagaagatctgaatatatttgaaataaggattttaagtagtaatcaaaaccctcccaacaaagtaaaccccaggacaagatggcttcatgggtaattctaccaaacatttaaagaagaacaaacaccagtctttctcaaagtcttccaaaaacttgaagaaggaggaacacttgaaactcattctatgtgaccagcattatcctgataccaaagccagagaaagatactagaaaactatacagccatatctcttacgaatactgatacaagaatactcaacaaaatgcaggtaaaacaaattcggcagtgtagcaaaaggat

SEQ ID NO: 596864 - DNA, 529 bp, Homo sapiens
tgaggcataccatgtccacctagctcttctggagccgaggagcaaccgggcttcagccaagatctttgagattgagcctggggacttcctccccattccctgtctccttcagctttgcagtggcttgtagtgtttctttaccatgaggtgcacatttctgagcctatatcccttgggttctggatgagtttgctttggtaacaaatgaccacaaactgggggattaaaacagtggaaatggattatttcagttctgtaaaccagaagtccgcaatcaaggtgtcagcagggactcacgcctccaaaggctcaaggggagggttcttccttgcctcttccagtttctggtgatcccgggtgctccttcatgtggcagcatcactctgatctctgccttcataggccatcttcrctgtggttctcaaatctccctctcctttctcttataaagacatcaggggcagagcacggtggctcatgcctataatcccagcactttgggaggccaaggtgggaggattgcttgaac

SEQ ID NO: 596865 - DNA, 529 bp, Homo sapiens
ttactgaaaatgacacggatgacaccctgggagtggaagtcagtgcatgcactaccttaaattggcccccatggtgtccttggtatgtagagtgagcactgccatcactgacctgtaggaccattctttactctttgctaggtaatgtagaccagtgcttctcacatgtcaatgtgtatattaatcattcagggatcttgcaaaaatacaggttytgattcaacaggtctaaatgaaataggcagagatttgcatttcttatcatctctcataccttgctgatgctgcggatccatagaccacactttgaatattaatcatatagagattcattgttaaatctatggttcctaagaaaaagtgaaggccaggcacaatggcttacatctgtagttcagcactttgggaggctgaggcaggaggattgcttgagcccaggagtttgagaccagcctgggcaacatagtgaaactctgtctcttcaaaaaacttcaaacataaaaaaattagccaggtgaggtggcacatg

SEQ ID NO: 596866 - DNA, 302 bp, Homo sapiens
cagcctgatctttcatcattggcaagtgtccagtcagggtcttgatgtgattttctttatcattcagaacttgttctgcgtgyactttggagtcttcaaatgttattttctgtttattaagttcactcacttctcctttccatacttcagcttcttgctgaaaaagctgtttatggcttgtctgaagttgagaattttcattcaaagcatcttttattgctatagcccgtcgttcttcactcattttaaatgtcttgcagatgattttggcttcagctatttgtgatttgagggattttgac

SEQ ID NO: 596867 - DNA, 580 bp, Homo sapiens
actggacgcgtgttcagcttccttcgtagccctggggaagcactgaactccaaggctgtcagctccccacttttcaccagccagcgtgactgagaaatgagcgggaatatctacagggcagaggaagagagagaaggcagtgtcacagatgggagaagcatgaggtttgctcccagtcccaccctcctccccatgccacttccatgcaagttccacttgaacaagcatctcttccacatctgccttctggctcataacccatcacttagattctctttctctctgaaccctctaactaccactgtccactggtgtgtggctcccatggtygtatgctcaggtaaatagaagatgcctatggtccaactcaggatagtgagtgtgtgggacagctctgccctagaagcctgaactgaaggagggatggaagagtccaatcagggtatgtgatggaacaagtcagtgaacactatatgtgtcttagaggttaaaataaaatattagaggcaggtctggtatcaattccattttttataccagagatatgtgagcagctggaatcaaacatgggggtgagaag

SEQ ID NO: 596868 - DNA, 579 bp, Homo sapiens
ccagcatttttaatagtaaatgctaaatttcaaccctaaattgtttcttttcttctctgtgatcctagagcrataggatattctcgattattaatatctactgcataagaatatgccaaaaggatgaattggacaaaccaaatgcacaagatatccaaacttaaaagaataggccaggcacggtggctcgcgcctgtgttcccagcactttgggaggccgaggcgggtggatcacctgaggtcaggagttcgagaccagcctggccaacatggggaaaccccctctctactaaaaatacaaaattagccaggcatggtgcccacgcctgtagtcccagctactcaggaggctgaggcaggggaatcacttaaacctgggagacagaagttgcagtgagccaacaactgcactccagactgggcaacagaagaagactccttctcaaataaataaataagtaaataaataaataaataaataaataaataaaaagaataaagggtaacacatccctaggcctatatgatgtgagtagaaatttgaacacaaccactcatttgttcatttagtcaaagttt

SEQ ID NO: 596869 - DNA, 532 bp, Homo sapiens
aagtaaaacaataacatgtctcataataggaatgcaaatttattrgaaaaaagggtaaataccgaacaactgaaaaatgaagaagatgctatttctcatcaaacaacagtatcggttattaacaatttggcacatttcctcacagcattttttccattattgctgttttgtatatgattttcatgattgtaattacactccatatataatttcaagcatgtctcccttaaaatgtactatgaaaagcacagttctgtattgtttcaaagtcttcagaatttattgagtggcagtactgttatttaactatttttcaactgttggagcaatcttttgaacttaaatattatacgttttaaaaaattaaaaaggcaaatttgaaatacagcttgcatatttttcccttaatggcttttaaaaaataaaaacctcttccacttggttattcatctccctctagatttttttaatagtcccaaacccatgagaagccatgaggctgtttatttcacaggaatagacaggctgcctg

SEQ ID NO: 596870 - DNA, 667 bp, Homo sapiens
agagaggtgtgattaaaacaatagataagtgcaagccaatgagaaaatgtctctgaaagaatgcagaaatccaccagaggggcagaagtcaggagaaaaccagaaggtcgacttggcggatatgtgatggagattgtaatagccaggtttcagtacccttaatttagggattaggatatgtatttgttaaattrtgaaatgttttatgatgcataacaactgagtttttaaaagtatatatttacatatctcattttgttttcacattctgtctcatgaggctcatgaaatgaacagcctaaagacagacatagggcaaaatagatggaagactgtaactgctctttctattaatcaccagagcattctgttgctttcaaagccctacatggtggctggatattttctcctccagatcttaattggttcatgctcccgctattcaatgattagcagcacctttgtatggagcaaatacagcatctaacaccaagaatcgaacggaaatcaactttgacatctgtccttacatgcaactcttagataaaaagtgttgatttaatagtatactaaaaataaaatgaattgagaattaaaaacaaacactaaacaaagagaaaatcgtgaaaacttcttagaagcatggaaacttaggggtgaaagaaaa

SEQ ID NO: 596871 - DNA, 593 bp, Homo sapiens
aaaggtgcaaacccctgataaacccatcagatctcgtgagacttaattcactatcatgagaatagcatgggaattcatcattgaatcaatcattgaaaagaattagcagaggactgataaataagcatagaaagataggaagagcatttcagattcaattacctccccgtgggtccctcccataacatgtgggaattctgggagacacaattcaagttgagatttgggtggggacatagccaaaccatatcaaggatagtcattttttctctgctgtcatatttatggcaaggttcattgttcactcatctggtctccatagttaaaacatttctttgaaaatactttaaccagattcataayattttataagatatgtaataaactgaatgtttgtgttctttcctccaccctcccattcacataggaagctctaacctcaatgcaatggtattgggaggtggggcatttggaaaataattgtgcttagatgaggtcaggagggtagatcccccttgatgggattagtgcccttataactagaggaagagacaccagacctttctctctgcagaatatgagaaggcagccat

SEQ ID NO: 596872 - DNA, 609 bp, Homo sapiens
gaaattctcacacaggtccgtaaaggatgtatacaaggctgctcattacagcatcgtttgtgatacagggaaggtgaaaggatttgggtggccaccactgaaagtgagaataggtaaaatatgatgaattcagactgtggaacaaaagcactggttagaagcaaaagactacagatacacaaaggaaaatgagtagatgtttaaaactcgtcctaattttaaaaagtaaaaagtgtaaagtcgataaaagacagcatttatgtaaattaaaaacacatacaaacagtgcagaattcgttataataagaaaggaataagtaaactaaggcaggagcttgaacaaaccaaagaaaccaaatgataccrtgccatgaagatttcaaggaattctattttctgcaactgtcctcccccaatttaccaaaataggtacactgcaataaaacctacaaagtgcctttatagagattagctctagtgctcgcttcagcagcacgtataccatataaattaaaaaatacatacataaaatacattagctctaaagagtgtggatgtttggaggagagaataagaaaaggcttcaccaagaaggtaacaacagagatg

SEQ ID NO: 596873 - DNA, 525 bp, Homo sapiens
ttcccaaacaagtttcttcatcagtgcgaatgttgcagcgggacagtgtgagccgaggacattggatttggcaacagcaggacctgatatgaccttaatttagatgtagaggttcacgtttcaatggtgggtctgaaggcagactgagggagktcaaggaaagggtgagagttgagaaatcaggcagaagatgcagcgtattccttagtgagctccagaaggagggagggaatctgcaatcccgccttcctcttcgccatctttaatgtctcctctcttggctgcttcccctctgcctataaacgggcaccagcctttactgtggaaatgtacaatctaggaaccacggctcatgcccacttacaggcagaggggaagaggccgagagggagggggatattaaagatgacggaagaagggcagaggctgagagagacagggaggagtcggatgggacaatgaggccttgggtgaaaccagagcaggagctccagacccaggagtggcgcccaggccgggaggaag

SEQ ID NO: 596874 - DNA, 553 bp, Homo sapiens
gaaagtgtggtgaggtggaggccatgacacagctctgaaaaaactgatcaaaaaatgcaccaggaagatccctggagtccaggccctgcctccctccaccccgacctcatctcaggtggacaggcagattctaacaccctccacatgtgccatatccagaggaaaagaggctcaaaaacccaagagcctttgagacccctccagcccaggtctctgcaagaagaagcaggactgtctttccttttctttcagacagaatctcactctgtcacccwggctggagtgcaatggtgccatcatggctcactgcagcctcaacctcccggcctcaagccatcctcccacctcagccttctgagcagctgaggctacaggtgcgcaccaccatgcctggctaattttttattttttgtagagaaaggatctcactatgcaacatagtgagatcaagaccaggctggtcttgaactcctgggctcaagtaatcctcccacctcgacctcctaaagtagtgggattgcaggcatgggccaccgcacccagtcaagactgt

SEQ ID NO: 596875 - DNA, 553 bp, Homo sapiens
gaaagtgtggtgaggtggaggccatgacacagctctgaaaaaactgatcaaaaaatgcaccaggaagatccctggagtccaggccctgcctccctccaccccgacctcatctcaggtggacaggcagattctaacaccctccacatgtgccatatccagaggaaaagaggctcaaaaacccaagagcctttgagacccctccagcccaggtctctgcaagaagaagcaggactgtctttccttttctttcagacagaatctcactctgtcaccctggctggagtgcaatggtgccatcatggctcactgcagcctcaacctcccggcctcaagccatcctcccacctcagccttctgagcagctgaggctacaggtgcrcaccaccatgcctggctaattttttattttttgtagagaaaggatctcactatgcaacatagtgagatcaagaccaggctggtcttgaactcctgggctcaagtaatcctcccacctcgacctcctaaagtagtgggattgcaggcatgggccaccgcacccagtcaagactgt

SEQ ID NO: 596876 - DNA, 349 bp, Homo sapiens
ggaggcggtggcatcagctgggcggttgactgctctttgtgctgccacgaaagacatttgtcatgtggctctctgaggaccagaggctrgcggaggggtcaggaaacagggctctatgcccagctctgatgatagctgtaagcatgacccttctccagcctggattttagtctccaaactgtgaactgagaggattggagctaaaattctgttctctctttgggctaaatgctctatccatagttctgagggcaagagaccctgaagctgagcccacaactgagcaccctgcatagaccctggtacccatctgccaccgctagctgtgttcacatggaaggagtcgcag

SEQ ID NO: 596877 - DNA, 550 bp, Homo sapiens
tacaggcttgagccatcaaacacctggctaaatttttgtatttttagtagagacggggtttcaccatgttggccaagctggtcttgaatccctgacctcaagtgatcacctgcctctgcctcccaaagtgttgggattacaggtgtgagccatcgcgcccggcctcaggacttttttttgagggcccgtcttagaagctttacagattgcaggattctggaaggtgtttcccatagtggtctggcctagggagggctgcatattgcagaygtttctgacctcagggggtcaggcgacgtccccagccttagggtgtcagacatcccgaaccccagggtgggccctggcgctggtttggaggcgtccccgtagcgatggattgatttactgtgattcccctagtcccgggatgcaatgcttagctatttgcgtcccaagtgaaataagcttcttcagccggtaaccctcgtgagacacgggacctcaccacagaccttaacactattaacagcaaagtcagggatccgtccctcggaaccatgaagaattc

SEQ ID NO: 596878 - DNA, 539 bp, Homo sapiens
tgacaagggaaaagcatatcctgtctccttatttttaatcatgttgaatctcctaacaacattatccatttacagcgccttgagccagccaacttccctggcatggcccagtttgaagcctctgcaatcacgtgcccattacaggtggcgagtgctacactgagatgagtgtcttgcccagattcacaccttcctgaagcagagccaatggggagtcctctggttctttagcttttggttgtctccatgagacctagagtggtaacaggagctcttccccaagcagtcagggatctgagccaatgcagtcacagaatgggaaccccttgagccctctggacacctggcatctggagagggcattaggttaggaattggggattgggactctagccctagcacacarctggcacattcccttcttgacatatgcatcatcagatggaggggtggatgaatgtatacatggatggactgatggatgggtggatggatgcatgggttgatggatgggcgggtggatggatgagcaagtggat

SEQ ID NO: 596879 - DNA, 539 bp, Homo sapiens
tgacaagggaaaagcatatcctgtctccttatttttaatcatgttgaatctcctaacaacattatccatttacagcgccttgagccagccaacttccctggcatggcccagtttgaagcctctgcaatcacgtgcccattacaggtggcgagtgctacactgagatgagtgtcttgcccagattcacaccttcctgaagcagagccaatggggagtcctctggttctttagcttttggttgtctccatgagacctagagtggtaacaggagctcttccccaagcagtcagggatctgagccaatgcagtcacagaatgggaaccccttgagccctctggacacctggcatctggagagggcattaggttaggaattggggattgggactctagccctagcacacaactggcacattcccttcttgacatatgcatcatcagayggaggggtggatgaatgtatacatggatggactgatggatgggtggatggatgcatgggttgatggatgggcgggtggatggatgagcaagtggat

SEQ ID NO: 596880 - DNA, 539 bp, Homo sapiens
tgacaagggaaaagcatatcctgtctccttatttttaatcatgttgaatctcctaacaacattatccatttacagcgccttgagccagccaacttccctggcatggcccagtttgaagcctctgcaatcacgtgcccattacaggtggcgagtgctacactgagatgagtgtcttgcccagattcacaccttcctgaagcagagccaatggggagtcctctggttctttagcttttggttgtctccatgagacctagagtggtaacaggagctcttccccaagcagtcagggatctgagccaatgcagtcacagaatgggaaccccttgagccctctggacacctggcatctggagagggcattaggttaggaattggggattgggactctagccctagcacacaactggcacattcccttcttgacatatgcatcatcagatggaggggtggatgaatgtwtacatggatggactgatggatgggtggatggatgcatgggttgatggatgggcgggtggatggatgagcaagtggat

SEQ ID NO: 596881 - DNA, 629 bp, Homo sapiens
gtgttgaatctgtatatcgatttggagaatattcctatcttaaaaatattaaatattccatctgtgaatatcaagtgtctttccatttattcatctcctttaatttctgtcaacatagtttttgttgtttctagtgtacaaatctgatatttcttttgttatttctatgtattgtgttctttttgtggcaaatgtaaattaacttttttattaatttaattttaaaaattctttttgctggtgtataaaaacacagttgatctttttatattgatgttttatcctgcacccttactaaaaatcacttattaattccaacamattgtagtagagcctttagattttctatgtactaaatctaggttttctaagtatagattgctttatttactcttttccaacatgatttttcttgtttttttcttgcttaattgtttatctagaccctccagtacagtactgaacacaagaggtaagaacagacatatgtgtctgcttttttatcttaagggaaaaacattctgtcattcagctaatatgatattaagtgggcttttttcttatgctttgcttaggttgggagagctgccctctatttctagttggctgagtgtttctatcatgaaatg

SEQ ID NO: 596882 - DNA, 384 bp, Homo sapiens
ccttccttaatatatatatgtttaactgatcttttatatagggttatttctttatcatttattgttgtctcctacactggaaggaagccccagaatagcaggatgtctgttttgtttcttgattttctgcaaacacctagaacagtgcctggcatagagaaagtgctccaaataaatktgtggcataatgaatgtttgagagagacaaattgattaacaaactcttattttccccacagctggaccagtgctctttctctgcttatgcatatttcatttctcaagtagccaacattctctcagaattgatttcagtttattgtgcatgcctgaaaagatagtaacaacatttatcacaaatcatttatcatttagattgtttca

SEQ ID NO: 596883 - DNA, 653 bp, Homo sapiens
gggctcgcttttggttccatatgaattttaaaattttcttttttccagttctgtgaagaatgtcattggtgatttgataggaatagtatttaatctgaaaattactttgggtagtacagccattttaatgatattgattcttccatttgtttgtgtcatctgatttctttgagaagtgtttagtaatccttggtgtagagatctttcacctctctgatatgctgtattcctaggtgtattgcctactcataggtatttcattcttttacgtgtggcaattgtgaatgcaattgccttcctgatttggctcttggcttggctgttgttggwatataggaatgctagtgatttttgtatgtttattttataccctgaaactgctgaagtttatcagctgaaggagttttgggatgacactctatagagttctagatatagaatcatgtcatctacaaacagggatagtttgacttcctctcttcctatttgggaccttaatttctttctcttggctaaacttcaatactatgttgaataggagtggtgagagagggtattcttgtcttgtttgggttttcaaggataatgtttccagatttttcctgatcaatatgatattggcattgggtttgtcatagagggcttttattatt

SEQ ID NO: 596884 - DNA, 557 bp, Homo sapiens
gccactcactttccctcaaatggcaccctggctaatgtgtttaatatacagaaatatccaggaaaatgtatgtatccttaaaatattagatatggagttatgtatgataatttaattcacataaattgcattatgtcactgatcakgctgtataattacagatacacagaattagctaaagttatatttaaaatgttctcttctttgtatatttgttgtttgggtcttattgcatacactatgcatatcaaagttatgccggccagattatcctagatggacagatattcctcactctttatttctgtcctacttcatccttcatataaactcatgtaagaaggattgtttacttgaccataacagcatcttaatctgggtacattaagattaccatttaaattctttcaatatttattttttttctcatttcaattcattcgcgtgccagttttggtattctctatttttttgttaattagctcttctgtatgtttatgcagttgttgctatttttattttatttgttaaatgcttgtttctatttttcacatttt

SEQ ID NO: 596885 - DNA, 483 bp, Homo sapiens
cactctcaaaactcggttaggttgttttcagcacctattgttgctggtggaagatctaatcctcctgtaacttagtcctctgtaggtggcctatttctgatttttgaaagtcattgggatcttacatttacgtttggcattctgagatttcacaaactatggccctttatttggatctttatttttttaattgattcattgttctgtaagtagcagtggcatcaatttggaaacrctcttcagggttgctaaactaacttctattattacctgataaatgtatattttaagaaaacatgaatattagtgagaatgaaaatatttgcagaaatattagactacagatcaaaacacagtgaaaatagtattcaaccaatatgagtactggaaagagagaacagataatacaaaattatcaagttagtaatataaattatcagcaggaaattatctaggtaataatagaagatagtttgggaattc

SEQ ID NO: 596886 - DNA, 483 bp, Homo sapiens
caacttctttcagactcctgttaatgtcaatataatattttaatttattttaccttacttttaagttttttaattttttattgttgtgggtacgtagtaggtgtatatctttttgaggtatatagtatattgtgatacatgcatataatgtctaaaaattgtgtcagggtaaatggggtatccgtcacctcaagcatttatcctttgtgttgcaaactatccaattatattatgttagttgtttttaaatgtaaagttaaattattattaactatagtcaccatgttgtgctatcaaatactagatcttattcaatctaactatatttgtgtatccacttaccatccccatttccctgccactacccccactatccttaccggcctcttgttaccattattctactctctatctccrtaagttcaactgttttaatttttaatgcacacaaataagtgagaatatgtaaagtttgtctttctg

SEQ ID NO: 596887 - DNA, 528 bp, Homo sapiens
gttatgtgaactgagttggttaactgataggtaaaaagtctctgtatttatgaaggaaataatgtatacagtggcccatttccaagacaaagtgccttgaatcagcttaggtcagcaaactacagaagaaacaggatatactaggcccctgcttagacagctgacacctgcttgtcagcctccctcttttcactcccttcttcctgccttagttgtcttcacccaaaccaaaaaagtttagtctaaaatgaaagtttactagcctgcaaaatagctcactttgtctgttcttatcagcctgcccagctgcttagatcgtaagtcaaatacttaaagagctcgtaatctaactaggattgaaatgcattgtgggctgcaacaaaatgcagcaagacaaccctaaagaaaacacctaaagcccctactcaataatcaataggcgatrtccaggaagattgtgaccccatagtacccagcctatgaggaaagggggagagacctctgcactagggaataaattgcttgttg

SEQ ID NO: 596888 - DNA, 528 bp, Homo sapiens
gttatgtgaactgagttggttaactgataggtaaaaagtctctgtatttatgaaggaaataatgtatacagtggcccatttccaagacaaagtgccttgaatcagcttaggtcagcaaactacagaagaaacaggatatactaggcccctgcttagacagctgacacctgcttgtcagcctccctcttttcactcccttcttcctgccttagttgtcttcacccaaaccaaaaaagtttagtctaaaatgaaagtttactagcctgcaaaatagctcactttgtctgttcttatcagcctgcccagctgcttagatcgtaagtcaaatacttaaagagctcgtaatctaactaggattgaaatgcattgtgggctgcaacaaaatgcagcaagacaaccctaaagaaaacacctaaagcccctactcaataatcaataggcgatgtccaggaagattgtgaccccatagtacccakcctatgaggaaagggggagagacctctgcactagggaataaattgcttgttg

SEQ ID NO: 596889 - DNA, 603 bp, Homo sapiens
atttagaatctcaacaataaatgcttagccttagagtactgcatttttgtattataatttgatggccacttcttgcatggtttctacaaaaattaaacaagttcctcacccatttttatcaaatatattttaagacacagtttggatgatcaaaaaggaagtggtaaatttaaatatttaatatatagactctttaagacattggtatttatttaaaactttgttctcaattattttaatgtgatgtggttagtcacatttaaacaaaaaaaagagtttttttcttatttatcagcatgaaatataataggaaaataatatttatatgttagaaatttacacttttgagcattattgcatagaattacagaataatgagcttgtcttctcttcaggaagacagtagggcagaatctcctaacttttggaataatctctgatggatagtygtgggtttgtgtcagtcagttataagccccagaagggaaatagctcatgatacttttaacaattaatcatgtgtctgtaatgacatttgcacaattaattctaaacaaaaaggcaaaataagtgatctttgcattttcacttgttcaaagtcaa

SEQ ID NO: 596890 - DNA, 598 bp, Homo sapiens
tgaagatttactataaaattccattatccctgactccaggagattgatatatccttggatatttttttaaaatgccatgccttttcttgccatttttgcactgcttaatgacactgcttaatgcactgcttaatattgtttttcttcccttttctttggaacaagctttcagtatttaatactggaatgcacaactttaygatgcatactatagcattcatttttcataatgtgatgagtgatcaattttaaagcacttgcaattcttctgtaatgtaatatctaatgtatagaaggtttagtacttggaacttattagaagcaatgcttttcagaaaatagagatatttatcatcatattattcctagtctagtttttctctatctttgctcatgtgtaggtcttgacattttaatttagtcccacagggaaattatcttctgccatttcctctctcaagacttagagtgagttcaaaagaagccatggacacagagaaagctctcctttggggaatttgaccatagaataatttgaatgaatgctacatatttttaaaaaattgtatgcaatacaacagaatataagattaagtgt

SEQ ID NO: 596891 - DNA, 537 bp, Homo sapiens
aaaaaagaaagaaaactgagaaacaaagaagagtcaataaaatatttgttgactattactgtcttttccacttagtataaaaattctcagaatcttctaggtggtcttttatggcttgatttcaggaacatggtagacactaacctataagagactactaaagaaagaagaaccaaggagatgagaactgctgaccactgttacatgaaatatttcttttcagtcaatttcgtttcctcttttcaacaaatggaatcccagttactttttcattgcagagaaaaagtgaaaaatggagaaattggccccatctgagaatggggaataaattcttggatagaaattatttagaggtctagtgcrtaggatatgaactaaatattcctaaatttcttctagattgatttagcagccactcagtcaaaatagccagctagtgtgccagatactttgtctctggatgcacaaaatcaaataaaaccagattcccacccaaagcaaaggaaatgggtaaatacacaaagtcaagcacacaag

SEQ ID NO: 596892 - DNA, 582 bp, Homo sapiens
gttatttagaaatatgaagggaaatactaaaataatacacaaaaagtattttaaatgattatttatgaagcaagaattaagcatggtaatggtgagaattgatgaagtaggaaaattcctatttttgttataaatctcaaatacaatttaacttttaaagaatatatattacatttgagaaaaataaaatttgggggaaaaaagtattgaggaaaagacagtaaaatcttgtgaagagacagacaaagagggagaaaagccagaagacctgtagaatgttctataattttcaaacacaaaagagaaaataccaagaacatctcttatatttgattaaggagagttaaattttagggaaaggataagctgtgcatgcaccactcttagttgcctcagcaaccggactacctagtaatgataattattttatcatgtaaaaagttacatgcaaattcagtaaacagtaattaggggcaaagtaacacayggcactgacaggctgcactttggtagaagggctaggacaaggttgttccaagtcaaaggacgagatagtgagcggaagaactaaggaccgaactt

SEQ ID NO: 596893 - DNA, 626 bp, Homo sapiens
taattgctctttggagaaatggaactcattcaccattaggtttgacatgttaaattaatcagatctcttaaaaggcttccaacttctgaaaggctcagacagttcaaaatttcatccccatttatcacactgtttttgacatgatatgcaaagaaaaatagcctcattcattcctatctatactctggcatacttcttgaggcacaggggcatttactgggttacaaatgacttccctgttattcaagataaactgatgcctttaacttgactttattatcaatctattatttatcaataagaaacccttcaaacagtgtttcaaaaattgaagcatacagcagattactttccaattcctttaatttctgatcacatcatttctgattttgagatcactttccaaaaagatgttctcttctctacaatgagatatgttgtgtataacacattttctattacgttgccattttcttttaatggaactcaacttgamgtatccatttttggcttggagcaaaatgagattctttggctgagctcttgcattaacaacccctgttgtgctggttcttgttcttcaaaaccctaagtgatgtactgaatggatcttcttacatcccata

SEQ ID NO: 596894 - DNA, 574 bp, Homo sapiens
ttcttttaatggaactcaacttgacgtatccatttttggcttggagcaaaatgagattctttggctgagctcttgcattaacaacccctgttgtgctggttcttgttcttcaaaaccctaagtgatgtactgaatggatcttctyacatcccatacatctttgcacatttctgactgattctaaatattccctccccaaatataacctttatgcctttctactaagctcttctatttcatttcaatgctgcactcagacatagtttatcatatttttattcaaagatgtggttcttgttttaggagatacaaatacctaaaaataaattttgcagaacttttagataaacttttaagggaactgttcagtcttgaacaaaggtctaactacttcttggcctgtactccgtaaagtctccatctgaatgcatgatctgttgctctcagtactgttgagaaggtgtttcactggctctgagcaggattgcatttgtgctcttgtgctcgctccctctgtttgtacttttccaaagtctcctgaccactctttctctgtccttgtctcacacgcctc

SEQ ID NO: 596895 - DNA, 593 bp, Homo sapiens
tgagacagaatccatgtcctcaaaaaacatccacgggatacaaaatcatatcaccaagtttctggatacaaagcgtgaatccatgcttaaatctggattcaaaaggaacactgtctgcagtgttttttttttttyactgagctggaatctgcttacttagaaggactggtttaaacaaagtgttaaggatattccatgacatctacaagggatttttgtattattaagtacttactaggagcctggcattattcaggcctattacactaattaatcttcaaagcgatcatggaaggaaaaacatttttatccctgtttcattaatgagaaaatcagagctcagaaaatttaaaacatgtccaatatcacatagctaataattaagttgcaatggctattttaactaaatcttatgaatattttcagactcaaatttagcccttatcacccatcttcatcaattattaacatgttgccattctccattcttccttcttccttcttctttcatccatcaccccctgccatttcctttttttttttttttggacagagaagtattttaagcaaattcaatatgacatattacttta

SEQ ID NO: 596896 - DNA, 593 bp, Homo sapiens
tgagacagaatccatgtcctcaaaaaacatccacgggatacaaaatcatatcaccaagtttctggatacaaagcgtgaatccatgcttaaatctggattcaaaaggaacactgtctgcagtgttttttttttttcactgagctggaatctgcttacttagaaggactggtttaaacaaagtgttaaggatattccatgayatctacaagggatttttgtattattaagtacttactaggagcctggcattattcaggcctattacactaattaatcttcaaagcgatcatggaaggaaaaacatttttatccctgtttcattaatgagaaaatcagagctcagaaaatttaaaacatgtccaatatcacatagctaataattaagttgcaatggctattttaactaaatcttatgaatattttcagactcaaatttagcccttatcacccatcttcatcaattattaacatgttgccattctccattcttccttcttccttcttctttcatccatcaccccctgccatttcctttttttttttttttggacagagaagtattttaagcaaattcaatatgacatattacttta

SEQ ID NO: 596897 - DNA, 349 bp, Homo sapiens
caggcatggtggctgatgtctgtaatcccagcctttggggggccaaggtgttaggattgcttgaggcaaggagtttgagaccaacctgggcaacataatgaaacctcatctctacaaaaaatattttaaaaactaggtgtggtgstgtgcacctgtggtcctagccaggcgtggtggtgtatgcctgtggtcttagccacttgggagggaggctgaggtgggggactgtttgagtcccggaattcaaggttacaatgaactatatcacaccatggcactccagcctgggtgaaagaataagaccctctctctaagagtaatcatcatcatcatcatcatcatcatcatc

SEQ ID NO: 596898 - DNA, 349 bp, Homo sapiens
caggcatggtggctgatgtctgtaatcccagcctttggggggccaaggtgttaggattgcttgaggcaaggagtttgagaccaacctgggcaacataatgaaacctcatctctacaaaaaatattttaaaaactaggtgtggtggtgtgcacctgtggtcctagycaggcgtggtggtgtatgcctgtggtcttagccacttgggagggaggctgaggtgggggactgtttgagtcccggaattcaaggttacaatgaactatatcacaccatggcactccagcctgggtgaaagaataagaccctctctctaagagtaatcatcatcatcatcatcatcatcatcatc

SEQ ID NO: 596899 - DNA, 349 bp, Homo sapiens
caggcatggtggctgatgtctgtaatcccagcctttggggggccaaggtgttaggattgcttgaggcaaggagtttgagaccaacctgggcaacataatgaaacctcatctctacaaaaaatattttaaaaactaggtgtggtggtgtgcacctgtggtcctagccaggcrtggtggtgtatgcctgtggtcttagccacttgggagggaggctgaggtgggggactgtttgagtcccggaattcaaggttacaatgaactatatcacaccatggcactccagcctgggtgaaagaataagaccctctctctaagagtaatcatcatcatcatcatcatcatcatcatc

SEQ ID NO: 596900 - DNA, 349 bp, Homo sapiens
caggcatggtggctgatgtctgtaatcccagcctttggggggccaaggtgttaggattgcttgaggcaaggagtttgagaccaacctgggcaacataatgaaacctcatctctacaaaaaatattttaaaaactaggtgtggtggtgtgcacctgtggtcctagccaggcgtggtggtgtatgcctgtggtcttagccacttgggagggaggctgaggtgggggactgtttgagtcccggaattcaaggttacaatgaactatatcacaccayggcactccagcctgggtgaaagaataagaccctctctctaagagtaatcatcatcatcatcatcatcatcatcatc

SEQ ID NO: 596901 - DNA, 604 bp, Homo sapiens
taactgttatatataaacccatggggatttatatataataggtgataggtgagtgtatatgtaagcatgcctgccccgtgattagctctatagaagggttcagtgtttctgttattttttccctgggaaaacaagaatgataatgccttcctcatgggcagggttgagattaattggtatacctacaacattagttgtaaamtaaggccagttttgtctttaggggatctttggcaatgtctgaaaacatttttgattgttaaaacttgggatgaggtggtgctactggtatctaataggaggaagccaaggatgctgctaaataccttttaatgcatagtgtagatcccaaaacaaagagtaatccagtctaaatgccaatattgtcggtgtgcaatgcataatggtgcttatggtgctttttatttcctcatcctcttcaatctatatcactgactatccttttcatccatgtgcattattgtcaacaacctctacttgatgcccccttcttctctgttccttccttaaggaattcaccagctattggacttttgtggggatgttgaaataataaggcaccttatcaagtgactttttttag

SEQ ID NO: 596902 - DNA, 641 bp, Homo sapiens
gtccttgctccagaccactctccatgccctatgggagccctgtagtacacttgggtaagatcatgaacatcagtatcagatacttgaactctaatctccattctgccccagaagctgtctgaccttacacaaggtgcctaatccctgaaggcctcaatttcccctgtagtcaaatgggggtaataatgacttgttcatgaattactgaataggtaaataagataatacctgtagaacatttagcactatgtctggcagtttaggtcttcaaacaatgggaatctctactcattatctgtgtgattgtagaaaggcatttcctctctctgggtatcagtttcctcatctacaaaagagggagsaggtaattggaagatcaacattagggtccctccataaagaaaacttgtctgattctcatgcaaggcccagcatctctcaaggcagctctctcaaggagcccagcagctcgagctcaggagcatggtctgagcctggcagctgcttccatcacacaaagcaataggacaatgttgcaaaaggatctgcaagagaggcaattccatccaggccaacttgaaggaaagactttgtcaagatcattttgaaaatgaaacgtgacttcctcttttgttttgttt

SEQ ID NO: 596903 - DNA, 612 bp, Homo sapiens
ccttatttgaaaaaaatgaaagggccaggtgctgtggctcatgcctgtaatcccagcactttgggaggctgaggcagttgcgttgcctgaggtcaggagttcaagaccagcctggccaacatggaaaaaccccatctctactaaaaatacaaaaaaaaaaatagccaggcatggagacgggcacctgtaatcccagctactcgggaggctgaggcaggagaattgctagaacctgggaagtggaggttgcattaagctgagatcacgccactgcactccagcctgggcaacagaaggagactccataaaaaaaataaaagaaaaaaaggggggtggggacgacatctttgcagatgtgattaaggattttgagatgaggaggttatcccgcattattaaataaggcttaaatgcaattgaaygaattgtttaaaagggagggagagagagattagacagacacacaaaagaggcatagcaatgtgaagacagggtcagtgagcaaagtgatatggccacgagccaaggaatgctggcagcccctagtaattggcagaggcaaagaaggattctgccctagagcctccagagggagtgcagccctgtcaacac

SEQ ID NO: 596904 - DNA, 613 bp, Homo sapiens
atagaatagaactcctcaacctaatcaagggcatctataaaaaacctatagctaacataatgctagcactgaaagactgaatttttctcccctaagattagagacaatacaaggatgtctgctcaccatttttattcaacattatactygaggcttttggataggtgattaggcaatggaaagaacattttaaaaatccagattggaaaggaagaagtaaaattatttatatttgcaaatggcatgaccttgcacatgggaaaccgaatggaatacactaaaaaactattgaaatatgtttacattgaaatatgttcagcaagtttgaagaatagaaaatcaacatacaaaagtcaattgtatttctgtaaactagcaataaacaatctaaaataaaagttaaaaacaattccatatacaatagaatcaaatagaatacttaaaaataaattgaaaaaaggtggaagaattttacactgaaaactacaaaacattgctgaaagaaattaaagatttaaataagtgcaaagaaatcccatgtttatggatcagaagacttaatattgttaggatggtaatatttcccaatagatgtacaaatttaatacaattc

SEQ ID NO: 596905 - DNA, 540 bp, Homo sapiens
taaatgattttaaaaatacacaatgaaaatattttaaaagaagactttttggaacagtaattcataatccctgtctactaaagacaagtagtgggacagaagtctccagtgcaaggacaaagtgttgccctagaaggtgaaacttgataggggcaaaagttattttcagagtgtggtgtatttttttgattaaaaaaaatcctctatgatgaagagtctcatttaattatctgcatgattcaatggaggtgctttgtccagaaagcccccgatctctctttttcttctgctctcaagcgttcatagcctgcctctcagatgtgccccaacaagcaataagaaatgcctgaattccagcattgaactcccaatcttatcaaaaagctctaatatttaaaatcaaactcagttagcaagtttatgatcactgagtaaataagttatacttaaaaacttatgtgaaacatgatagttttttgctgtacattttcaaayttttaaactaaacctatttagtaaagagcacctgttaaaaagtat

SEQ ID NO: 596906 - DNA, 492 bp, Homo sapiens
ttccttgtgtatcttttcaagaatgtagaaatctgttcccaaaatcctctacttgacttttgttcgcttgcctattcctggtttaggcaatcacaagcttggcccagtaaggattaaccctgagttacgtgtgggaaagttaatacctaaaaagttctggcctttgtcaaaaaggaagaagagagggcaaccaagaatgtcagatccacctactctttggagtcttagaaaaaaaagwgccaggaatggtggctcaggcctgtaatcccagcattttgggaggccaaggcgggaggattgcttgagtccagaagttttagatcagcctgggcaacacagcaagacctcatctctacaaaaaaataaaaaaattagccatgtgtggtggtgtgaacctgtggtcccagctacttgggaggctgaggtgggaggattgcttgagcccagaaggttgaggctgcaatgaaccgtggtcgtgccactgcactgcag

SEQ ID NO: 596907 - DNA, 566 bp, Homo sapiens
aatgcaaccatgaagacttttgasttaaatttttctcttttcttttcttctttcttttttttgctaaagaaaaagccaattcatcaggtaggaaaggactgcttttcgtggtcccaggtcctgccagagacaaatgactgtaaaaatttaaaatcagttattaacagattagctgttggtccaaagtaaatagcttattaagcatcaggcagagtgagataaaggggaagagttattgaaaatgaggatgttgtctggggctctgcttgtggggtagcacaggaggaggctattgctttgtgactctaattacaaatggaaaacaaggtagttggctgaaaaagttgaatccctcgttgtgttaaacagagtcctgtggttttctgttctatgtcatggctttattcaccttgattagcatggaagttggttgtgctccccagctgttctcctctttgccttctaagcaaaatctgtcaactgctgttcactcaaccccgcaaagcagcccagaaacagtggctaagactccttagtttcaggaactggacatttcttaccccttt

SEQ ID NO: 596908 - DNA, 566 bp, Homo sapiens
aatgcaaccatgaagacttttgagttaaatttttctcttttcttttcttctttcttttttttgctaaagaaaaagccaattcatcaggtaggaaaggactgcttttcgtggtcccaggtcctgccagagacaaatgactgtaaaaatttaaaatcagttattaacagattagctgttggtccaaagtaaatagcttattaagcatcaggcagagtgagataaaggggaagagttattgaaaatgaggatgttgtctggggctctgcttgtggggtagcacaggaggaggctattgctttgtgactctaattacaaatggaaaacaaggtagttggctgaaaaagttgaatccctcgttgtgttaaacagagtcctgtggttttctgttctatgtcatggctttattcaccttgattagcatggaagttggttgtgctccccagctgttctcctctttgccttctaagcaaaatctgtcaactgctgttcactcaacccsgcaaagcagcccagaaacagtggctaagactccttagtttcaggaactggacatttcttaccccttt

SEQ ID NO: 596909 - DNA, 547 bp, Homo sapiens
caattgtatcactccgatctctgtcagtatcacattcatttaacattcctaaagtaattttttgagagtctatattgacccaagtattttgctagacaccagggatatgatggtgactgagacaccaaggaaattaaagattagtgggaagacagctaaaagaagagaattcaacacaattagataaattctattgtaagggctaaaacaaatttctatgtgaacatataaaagacatgaaaaagwttttttgctgtagataatttagaaaaaaaaaaccctgaaacgtttaagaaaagtaaaagtttactggagaggaaaagtgaggaacagaaagaacctaattttggaagacgctatgtttaaatggttgtggggcagggttgggcagtgctggggttaggaagtacaggtctagaaatctgagcacagaccagtttaacatgtgatggcttgtctgggacagtctcagttggctttcctcatgcctagctgatctgtgcccattttccttcaagtatcctggtgtgaatgagagattgcataa

SEQ ID NO: 596910 - DNA, 517 bp, Homo sapiens
ggagtgaattctcccttctgccttttgttatatttatgactgactgattgaaagaggcccactccattgaggagggcaatctaatttctgaatccaccaattcaaatgctaatttcttgtggaaacaccctcacagacacacacagaaatgaactctaatctacacacctgtggctcagtagacttaacataaaattaaccatcacaagagttaacctaccaggcctaactgcttattcttaaaatgtcctgcttacaaggttggccctctgatggtgtccaggaacttggatttcaggggagttcctgctactctcagaacagattggagtggcttgctatgcctaaccaaacaaatcgtatggtttctgctgaacacacttgcctcatggattcctggcattctggtatgtgccaggcagacaatgcctatgtaaccagcccctggtaaaaaccctgggcaccaagtccctygtgaacttctaccaaccctggtgtctccactgggataggactc

SEQ ID NO: 596911 - DNA, 592 bp, Homo sapiens
  misc_feature 321, 322: n = A,T,C or G
cactctatgactaaaccatgctagttaaaaaattttaatatcttttctcctattcactgccttttgccagtcaatttttcagcgaatcttcatctattacacagaaaatggagtggcttgtataaagaataatcatttagtacatcacagttactaagggagcagcttccctgggtgagttgcaggaggctacagttctctgaaggctgggccgggtgcagactccgcttcccagtggctcgttttgattctgggaagcggtggtggctkctgaagggagtagcaactcctccacggtgcctttccacagggcctttgcanntcagctagctgcctcagtcgtgagtgacccaagctagagtgaggtagaagccataatcttttaggcctagcagaagtcacacatttttttctctaatactttactggtgactgtgaacctaaaataatcaaaaaggtcagaatctagtttaaagagagttatttaagcacaaatttcgaggacaagccacccaggaagcacagattccaaagaaaggaaatcagtattacaaagtgtagaggcttgggattgcttatccagacaaagctt

SEQ ID NO: 596912 - DNA, 574 bp, Homo sapiens
  misc_feature 1, 2, 3, 4, 5, 6: n = A,T,C or G
nnnnnncagaataatttataattcccttacgtgtatctgtaaatgattgttatccttttagaaacactatatattttcatcaaaataatttaaaacacatatataaacacacaagacatgatgctgctaacttgatagasaaataatggcatcccatgttgatttaaatgtttattaatgaagttgagcaaatttcttatacatgttgcttccattgctccaatatcttaaaagtactctgcctttgaggaacctccatcccaatttgtgtaatgactttactaatttatattcccaccaacagtgtataaaattcccttttcttcatatcctcatcaacatttgttactttttgtctttttgataataaccattctaacaaatgtgaggttgtatttcactgtgattttgaattccatttctctgatgattagtgacattgaacatgcttcatatgtatgttggccatttgtatgtcttttttgagatgtctattcaggtattatgttcatttttaaatctgatttgttgttgttgctttgcttttgagttatttgtgtctctgtatattctg

SEQ ID NO: 596913 - DNA, 425 bp, Homo sapiens
ttattctccttattatttaatagccatctaatatattataccctttacttatttagcttattcaatagctactttttccatcatatagttgaatgatttggccataactctattctccatttctctattgggggagcaattgctatgggctggtcatatttgggcatactatgcctggtttacaataattaaccattattaataatatacatttttgatattgatttattagctaaactatttcaggatataacagaaattgaaatgattctcaaatatccaaaagagactagcttagcattaacctcatatggaaatcagacagaaggagtacaaataaagatatagactaattatacttattaatataaatgtagraaactaaaataaattttaataggaaaagaataatgctttataataaa

SEQ ID NO: 596914 - DNA, 503 bp, Homo sapiens
ggtctcgcagtcagccccttcaaacctgtgtgatgaaaagctggctcccatatatgtgcgttttgcatttcacaataatgtgttttacgtccaagttygtttgtaaaagatacatgtattttttgaacctgttcaaacccatattgttcaagggtaaactgtagttagaatcactcatttagtcttttcgggctggcttttttcacctagcaaaatgcatttaagatttctctatgtcattttgtagcttgatagtgtattcctctttatcactgaatgataatcaattatataaacgtactttagtttgtttatcagtttacctattgatgggcagcttgtttgcacctaattcttggcagttatgaataaagtgctataaacaattgtcagcaggcttttgtgtggtcctaagctttcgtttcatttaataaatacctagcaacataaatgggagttgccattgctttctgtcctcatcagcatttgatgtcagtgtttgg

SEQ ID NO: 596915 - DNA, 555 bp, Homo sapiens
acctggccagatcatgacagtacctgtgctaggcctcaactttgctccaaaattggagtaggcaccaggagcggggagaggtcaggcagcaggagcaggcacttctgagcctgtgggacaggagggcttcctggtctccaagaatgcagagattcccggtttgcagccacagctaggcagctgctgttgcacctgggaggctggggctcccaactcaccarttcagaaaggggattggctgccacctgttctctgctccctctggctccatggagcacatagcccatgccacagatcctccactgcagccagcatcatggcagtggctactccaaccaggtcaccactgccatgaccaccacggcacatgtttacctacgtaacaaacctatacatcctgcacagagaccctttggctgttaaagcttgaaacttacatttgttttatctgagttccttcctcaggaaatgaacttcaggcctctcctaaaaagtatcaaagaactgaaaccagatcaccacaccagatgctggagccctcactcaccatggttg

SEQ ID NO: 596916 - DNA, 396 bp, Homo sapiens
ccaggggctctgttccagcccgtttgcaaacccctggctggaggtgataaaattccctcagggaggcacgacccagtgaggagggatagatctgggtcttacctgatgaagcagtctggccatgatctgccacagccactgcactgctctgtggggaattcctcttgggccctataatttaaaaaatgaataaaacatggaccccgagcatgctagccagtgagaaggggaaaaagagtataagaaccagtaggagaaaaagagtattgtagcatctgccctggttctcaggccatgkctatgaaagcagaactcatagagaaccctgggcaattgagtaatagagacaaaaattttaaataaataaaatgatttttaaaaaattcaggaaagaat

SEQ ID NO: 596917 - DNA, 605 bp, Homo sapiens
tttctaattagcataactttcatgccctctgtttgtcttattgcatgcactgagacttcgagtacaatgttggagagatgcggtgagagatargcatgtctactgacaacactttccctgaatttttacttttctgagaaagtttttatttcttcttcacttttgaaggataataacagagtacagaattctaaattggcgtcttgggttttttgtgtttttttcttttctcattcaacaatttttagtatttcacttcactttcttctgacttgtgtggtttcagatgggaagtcatatataactcttattcctgttcttctatggaggaactgccccattctccccatgtgacttccttcaagactttctctttgtcctttgtttcatgcagtttgactatgatatgcctagatgaagactttctggtttttcaccctgcatggttttctctgtgcctcctggatctgtggtttattgtatgtcatttatttttaaaaattctcagtcattattaattcaaatattccttttgtttctttattctttttctactattcctattatatgcatttatagcttttgtaatgatccctcagtttggg

SEQ ID NO: 596918 - DNA, 666 bp, Homo sapiens
cccactaccaaaaacaaaaataatatatatattttatatgattccaccttctttttgaggcatgataactttgtacatttacttatatgtattcattcagttgttcttaaattattaaaacatcactaggatttctttaagagagaattaagttttcacaccttctttgctgtacagcttttgttcaaatttggggaagtggaaattagttccaatatgatcaggttcagttgttgagcaattagcaggaacatttttcaatatagttcaattaaagctgtaaaattttttgatttttaatatgatgattacatattaatgtaatattcttattcctgtaagraatttgggataagccaaaaagattactgggtgtctccagtggaaaatcatacattgtatagaacacacactttcacattgccttttattacctttgagctattacgtacttttgtaagttgtaaatacttgctagcaatgcaaaagaattcttgtctatagatctacaaattaattctgttttctggaggtccattaacttcccactcaggtatcctgccagcctcccttactcctatgccgaaaaaggcagttgtgagtctacctaaaattgcatttcctcatctctcctctctctgtgtgtgtgtgtgtggtgtgtgtata

SEQ ID NO: 596919 - DNA, 601 bp, Homo sapiens
aagaactatttgggagatgctccattcaggagagggatgcttgaagggaacttcatcggcagggactagcctcttacggtggcaggacaagaagactgccaaaggtgcagggtgaaaggcaggccttttgttagaactactatatgggaaggaggggctttgggtcccatacctattaatcatagctgcaacttcattgtgtaaacaattaaaagaagcaaattaaaaataacctrttggtgagacaacagattggcaaaacgactgaggaaaccagacaagagcaaaaagaaaaaattacttagaggaatttgtagaacgatgcacagacaaatcgggaagatttttgggtagaagtacaatcagattaggcgagagagagagtgacatttggcatggaatttgaaattggtcaattttatttagagagggagaaagcccatagtcctctggcagagtcttgttcctttaggccaaagcaaaggcctcaggcagctgcaagtccctactccactacctggggctgaccctgcccaggctccccatcagaccctaaaaagcagacttattccccttggccaacctttccagggacaggcag

SEQ ID NO: 596920 - DNA, 484 bp, Homo sapiens
gcagaatagaattcttggcacttttatgtaattgagctgtggtagaaaatgtcaaattagggtttcttggactgacaaaacaatggttctttcactgggtgatcacattgagacagtggttttttttttttttttttttttttagtttggtctctattaaatgcagtgactaagcaatgtccaactattacctgtgctaggaatatacactaaaaattttagtcctggaggcaacattgttctttctgtcaatgcggttgaagaacaggagttttggtaatctacactgatgatcatatagagagttgctcatatcwgttaacagtaaataaaagtgttttttctgatacccgttattggtgcttagcagggctaaatccagttagtaaattgaattacatttgtagtataaataagcaagctacacatacacacacacacacacataaacacacacacacaaacacacacacacagaaactca

SEQ ID NO: 596921 - DNA, 532 bp, Homo sapiens
tttgctgatattaacatgcatggcactgaatttacaaattactctaaaatatatcatactctgtattgtaaattcttctagccaatttattttaaatgaaagctttcattgattttggctaaactcttgcctatgtaaccaatctctggtgcaattctatcgttatttgttaaaacaagactacaaataaaggcttgattactatctgattcagcaaatatgtcactaatgtcatcaatgaatgagtgcaagtctgccatgaaggttttgcttatgttaaagrgtatggtgaaggtgtaacaaggcagatgtacgtcggaaattccctcccttgtcaaagacatgagcaacttctttgttgaatcagataataattttcaacactgaaataatattttctcacatttttgagctatgcacaatgtaatggctaaagacatgaaaccccctattaatatttattaatattaatatttttctgtttcattttttaaagtctagacaatctacaaaacaataaatgaaaccctgg

SEQ ID NO: 596922 - DNA, 542 bp, Homo sapiens
ctttatgaaactaataagtatcctgctactcacaaccagaaaatacttttgtgcgcacacacacacaccgaaaaaaaattacaaccaatatatttcaaaaacttagacataatttatgaataaagagaattcactaattcataaaagaattayaccctgaaatcgatttgattgtatcccgtgtttataagccaggtccagtatttggaatcaatcaatataatcctctatgccaaaaactaaagaaaacaaaccacatgattagtcataccaatggatgcagaaaaagcatcaattcaacactaattcatgataaaaactgtcagcaatctcaaaatagaggtcaatttcctcaacttgataaagaacatctgcaaaaacagccaatataacattcagtggtgaatgctgaatgtctgttcctaccgctcttattcaacataatactgaaaccaaggcaatagggcaagaaaagcaaataaattgtgtacacattaaaaaggaagtcataaaaccatcctcattaacagatggcatgttta

SEQ ID NO: 596923 - DNA, 678 bp, Homo sapiens
actttatcgagcttttatccccacctattgatatggctatattgtatgtattgatatggttatgttatgttgacatatgtatatatttcttaatatatacataatgtgtgcatatattatatagtacgtaaacttttaacctattaatatggcaaattacagtaatagatgttttagatatatcaaccttgataataaacaaaatacatttcttatatattgttgtgttggtttatcaagattrtgttaatatttttaaatttatatttatgagagtgattgacctataattggcctgttttattcatagtattattttttttgagatggagtctcgctctgttgccaggcttgagtgcagtggcgtgatctcaactcactgcaacctccccctcccgggttcaagtgattctcctgcctcagtttcccaagtaactgggactacaggcacacaccactatgcccaactaattttgtgtatttttagtagagatgctgtttcaccatgttggccaggagggtctcaacctcttaacctcatgatccgccagccttggcctcccaaagtgctgggattacaggcatgagccaccgctttttcagtatatgcttcttttttctatgttattgttaccacaagtttatctatatcattaatatatatatttgacattatca

SEQ ID NO: 596924 - DNA, 678 bp, Homo sapiens
actttatcgagcttttatccccacctattgatatggctatattgtatgtattgatatggttatgttatgttgacatatgtatatatttcttaatatatacataatgtgtgcatatattatatagtacgtaaacttttaacctattaatatggcaaattacagtaatagatgttttagatatatcaaccttgataataaacaaaatacatttcttatatattgttgtgttggtttatcaagattatgttaatatttttaaatttatatttatgagagtgattgacctataattggcctgttttattcatagtattattttttttgagatggagtctcgctctgttgccaggcttgagtgcagtggcgtgatctcaactcactgcaacctccccctcccgggttcaagtgattctcctgcctcagyttcccaagtaactgggactacaggcacacaccactatgcccaactaattttgtgtatttttagtagagatgctgtttcaccatgttggccaggagggtctcaacctcttaacctcatgatccgccagccttggcctcccaaagtgctgggattacaggcatgagccaccgctttttcagtatatgcttcttttttctatgttattgttaccacaagtttatctatatcattaatatatatatttgacattatca

SEQ ID NO: 596925 - DNA, 533 bp, Homo sapiens
tccatctctgttgttaccttcttggtgaagccttttcttattctctcctacaagacatccacactytttagagctaatgtattttatgtatgtattttttaatttatatggtatacgtgctgctgaagcgagcactagagctaatctctataaaggcactttgtaggttttattgcagtgtacctattttggtaaattgggggaggacagttgcagaaaatagaattccttgaaatcttcatggcacggtatcatttggtttctttggtaatgttcaagctcctgccttagtttacttattcctctcttattataacgaattctgcactgtttgtatgtgtttttaatttacataaatgctgtcttttatcgactttacactttttactttttaaaattaggacgagttttaaacatctactcattttcctttgtgtatctgtagtcttttgcttctaaccagtgcttttgttccacagtctgaattcatcatattttacctattctcactttcaatggtggccacccaaatc

SEQ ID NO: 596926 - DNA, 533 bp, Homo sapiens
tccatctctgttgttaccttcttggtgaagccttttcttattctctcctacaagacatccacactctttagagctaatgtattttatgtatgtattttttaatttatatggtatacgtgctgctgaagcgagcactagagctaatctctataaaggcactttgtaggttttattgcagtgtacctattttggtaaattgsgggaggacagttgcagaaaatagaattccttgaaatcttcatggcacggtatcatttggtttctttggtaatgttcaagctcctgccttagtttacttattcctctcttattataacgaattctgcactgtttgtatgtgtttttaatttacataaatgctgtcttttatcgactttacactttttactttttaaaattaggacgagttttaaacatctactcattttcctttgtgtatctgtagtcttttgcttctaaccagtgcttttgttccacagtctgaattcatcatattttacctattctcactttcaatggtggccacccaaatc

SEQ ID NO: 596927 - DNA, 533 bp, Homo sapiens
tccatctctgttgttaccttcttggtgaagccttttcttattctctcctacaagacatccacactctttagagctaatgtattttatgtatgtattttttaatttatatggtatacgtgctgctgaagcgagcactagagctaatctctataaaggcactttgtaggttttattgcagtgtacctattttggtaaattgggggaggacagttgcagaaaatagaattccttgaaatcttcatggcacggtatcatttggtttctttggtaatgttcaagctcctgccttagtktacttattcctctcttattataacgaattctgcactgtttgtatgtgtttttaatttacataaatgctgtcttttatcgactttacactttttactttttaaaattaggacgagttttaaacatctactcattttcctttgtgtatctgtagtcttttgcttctaaccagtgcttttgttccacagtctgaattcatcatattttacctattctcactttcaatggtggccacccaaatc

SEQ ID NO: 596928 - DNA, 603 bp, Homo sapiens
catctctgttgttaccttcttggtgaagccttttcttattctctcctacaagacatccacactctttagagctaatgtattttatgtatgtattttttaatttatatggtatacgtgctgctgaagcgagcactagagctaatctctataaaggcactttgtaggttttattgcagtgtacctattttggtaaattgggggaggacagttgcagaaaatagaattccttgaaatcttcatggcacggtatcatttggtttctttggtaatgttcaagctcctgccttagtttacttattcctctcttattataacgaattctgcactgtttgtatgtgtttttaatttacataaatgctgtcttttatcgactttacactttttactttttaaaattaggacgagttttaaacatctactcattttcctttgtgtatctgtagtcttttgcttctaaccagtgcttttgttccacagtctgaattcatcatattttacctattctcactttcaatggtggccacccaaatcctttcaccttccctgtatcacaaacgatgctgtaatgrgcagccttgtatacatcctttacggacctgtgtg

SEQ ID NO: 596929 - DNA, 508 bp, Homo sapiens
atggtgggggaaaataaatttacagctaaaattacatttattttaaaagtaagatttataataagttaaatattcaactcagaaatatacaatgaccaaaaattaaaataaaaatagtatataatttatataagagcaaacgttattggaaaaataaagaatgataaacattattaaaatagaatcttgattcctttttcaaaaaatactaataaaatagactgatcagaaaaaaaggggaaaagatgtgtatatagaatattaggtacaaaaagttataaaaacaagatgtagaktttttaaatgacaatagaatgttataagcaaaacttatttcaataaatttaaaagatttgaagatattccagttctcagagggaatgctttcaactttttcccattcaatattatgttggctgtgggtttgtcatagatggccttttttacattaaggtatgtcccttgtatgccaattttgctgacagttttaatcataaagggatgctgg

SEQ ID NO: 596930 - DNA, 605 bp, Homo sapiens
tattatacaatttcagaagcactgtaataaaaaatcacaatgcaaactgtaattcttacctgttaatgccaaatttctgctatttacagacttagctactagactaatttaacatttttctctttcagatatacctaatgtagataatttattttgatgctttcggtgttgaatttcttgtttaaattgtaaggtaaaatagttgtttgtsgggggttgcctcatgtttctattgcctcatgaaattaagtagtggttttatagaacaatgggcctaattgactgcaaactagatttatgttacataagaagaagagtgacacaaaggatttgttttaaaatatgaaattcatttttctgagctatttaaacatgagaattatcaaatttgtgagtcccttttttctaaatttttgtaggtacatagtaggtgtatatatttatggggtatatgagatgttttgatacaggcacgcaatgtgaaataagcacatcatagggaatgaggcacccagaccctcaagcatttaccctctaagttacaaaaaatccaattacattctttaatgtgaatgtaatccaattacattctttaatgtgaatgt

SEQ ID NO: 596931 - DNA, 605 bp, Homo sapiens
tattatacaatttcagaagcactgtaataaaaaatcacaatgcaaactgtaattcttacctgttaatgccaaatttctgctatttacagacttagctactagactaatttaacatttttctctttcagatatacctaatgtagataatttattttgatgctttcggtgttgaatttcttgtttaaattgtaaggtaaaatagttgtttgtcgggggttgcctcatgtttctattgcctcatgaaattaagtagtggttttatagaacaatgggcctaattgactgcaaactagatttatgttacataagaagaagagtgacacaaaggatttgttttaaaatatgaaattcatttttctgagctatttaaacatgagaattatcawatttgtgagtcccttttttctaaatttttgtaggtacatagtaggtgtatatatttatggggtatatgagatgttttgatacaggcacgcaatgtgaaataagcacatcatagggaatgaggcacccagaccctcaagcatttaccctctaagttacaaaaaatccaattacattctttaatgtgaatgtaatccaattacattctttaatgtgaatgt

SEQ ID NO: 596932 - DNA, 572 bp, Homo sapiens
aatatttgtgagtatttttaatagtcttatcaatccaaccaggttacatgtgcctacaaacaagtacagtcttatatgccctcagctaagacatgtagcaggacgtaatatatgttcagttaatacctgtggatttatattttgtgatttagctacttggagatgggggaagatgagatgacaccattggtccttctattttattgtgtgcctttattatatgaaattttaaaagtagcattgttatcttyattggactcagatattgcaaggaagttgaggtgaaagtgaataacacttttctatacatttgggaccactgaatcctattgttggaaaggatcttggcaaaaaaatagttcaacttctcacatgacaaaggaatcccatcttgaatagatggttaattaatctatgaattaaaacactcactgaaatcttcattcctaataaaattactaattttcaagaaggcaatttcaataatgatcagattatttattgactaagataatatcaccttccaataatttctactttgaattatgattcttgctttgaagcaaaactta

SEQ ID NO: 596933 - DNA, 553 bp, Homo sapiens
tgactcagtatttagtatgtttctactccccttctctctccctcttctctcctctcttgtattctcaggctcataaaatattaggaccttttgcttggggatccttcagctgtgagatgatccctacttctgtatcgatccacctgacctttgcacagtgcagttccacagggataaatgaaacagtgtgggagttggaacttactctagttcaacctcttgcttatgcgatcacagtaaatgatkaaacacttgaccgttgcttttattttggctggttgcttagcttggttactcagacacttggaaactcagctgtctcaagctcagcttcttgacagaaatacaattgatatttgagtacaaaacttttattctgcagcattgttgaatttatttgtttgagctgattttaaaaaattccttagaattttctattcacaagatcatttcaccttatgcctttccaatctggatgccttttatttctttttcttgtttaattgctctggctagaacttccagtctaatgctgaacagaagcagcaacaaa

SEQ ID NO: 596934 - DNA, 519 bp, Homo sapiens
tcccttgtatttctagtctggtgtgtgtgtgtgtgtgtgtgtgtgtgtgtgtgtgtgtgtgagtgtgtgtgtcaggaaaggattttggaattgtcaaatgcctttagtatgtataattagatgtgttttcttttctttattttattaacatggtctattacattgagttttgaatgtttaaacaaccttgcattctttgaataaacctcacttggtaattatgcttgctgcatttggtttgctggtattcgttgaataattttgcatctrtattcataaagaaattggtctatagtttttatttcctgtgatgcctttgatttttttgatatcaggtgatattggcctcatagaataagatgggaaatgttccattttcttctattttgagagatttttatgaagaaatagtagtaattattcttttaaaaattaaatagtatttgttactacagcaatgtgattggcaactttatttggtgttagttttaaaattactgtgctaacttctttacttac

SEQ ID NO: 596935 - DNA, 504 bp, Homo sapiens
acaaagaggtccaactaagacaaacacacaggtagcaaatatgaccacttggttaacccaggtgtcagaacaggccagcttgaggacagacagaatttcacagaagaggtggttcacatcccggggcccrcagaacggcaaccttagaagaagaattgcatgtaccagggacagggcaaacccacatgaccaggatgtgagagccaggatcgtgcacactctccagctcatgatgacagtgtactggagagggtggcaaatggccacatacctatcataggacatcaccaccaaaatcagacactctgtagcagcaaaagagaaatacaaataggtctgcattatgcatggaagaaaggagatggttcttttcttgttcatcagatttgccaacatcttgggaacattgttggaagcataggacatgtcaatgatggccaggtgtgagaggaagaagtacatgggggtaggcagaatgtggtccagacagatgagtcccaagat

SEQ ID NO: 596936 - DNA, 504 bp, Homo sapiens
acaaagaggtccaactaagacaaacacacaggtagcaaatatgaccacttggttaacccaggtgtcagaacaggccagcttgaggacagacagaatttcacagaagaggtggttcacatcccggggcccgcagaacggcaaccttagaagaagaattgcatgtaccagggacagggcaaacccacatgaccaggatgtgagagccaggatcgtgcacactctccagctcatgatgacagtgtactggagagggtggcaaatggccacatacctatcataggacatcaccaccaaaatcagacactctgtagcagcaaaagagaaatrcaaataggtctgcattatgcatggaagaaaggagatggttcttttcttgttcatcagatttgccaacatcttgggaacattgttggaagcataggacatgtcaatgatggccaggtgtgagaggaagaagtacatgggggtaggcagaatgtggtccagacagatgagtcccaagat

SEQ ID NO: 596937 - DNA, 597 bp, Homo sapiens
atgtttgttcctattagataagccccttcaaattcccaagatttattacctttctgtttttagcatttaattatgaaataaatttaaacttaaaaatagtgtcacaaagttttcaaagaactcccacttaatttcatasagattcagcaaatgttaacatttattatttgtcttattctctttctctatgtaatttttattttttgaaccagttgagattaaagtgtagacataataccaatttaattttaaatttctgatcttttagtaagaaaaaactaattcccactagcttgaccataatataagtattaaaatcagaaaatttaatattgacattgacatgtttaatattgatattgatattgatattgacatgtttcttttctctaatatacaatattctccctccaaccacaccagtctaggacctaacccaagattatgcattatatctaaagtcatctgtctttagtctcctgtacctgtaatatttactcagcctttttgtgcctttctgaacactgatattttgaagagttctttagcataatgtccaacaaattgagagtgtacaatattcctcaatgtttttgt

SEQ ID NO: 596938 - DNA, 597 bp, Homo sapiens
atgtttgttcctattagataagccccttcaaattcccaagatttattacctttctgtttttagcatttaattatgaaataaatttaaacttaaaaatagtgtcacaaagttttcaaagaactcccacttaatttcatagagattcagcaaatgttaacatttattatttgtcttattctctttctctatgtaatttttattttttgaaccagttgagattaaagtgtagacataataccaatttaattttaaatttctgatcttttagtaagaaaaaactaattcccactagcttgaccataatataagtattaaawtcagaaaatttaatattgacattgacatgtttaatattgatattgatattgatattgacatgtttcttttctctaatatacaatattctccctccaaccacaccagtctaggacctaacccaagattatgcattatatctaaagtcatctgtctttagtctcctgtacctgtaatatttactcagcctttttgtgcctttctgaacactgatattttgaagagttctttagcataatgtccaacaaattgagagtgtacaatattcctcaatgtttttgt

SEQ ID NO: 596939 - DNA, 581 bp, Homo sapiens
atcagccttagagaggcatatattttatggcagtggcatcttaagagcaatggctcaaactcaaatgagagacagtcttagatctataaatatgaatatattttgggaggtttatataaatgtgcatgaagttcataacatgaatttttgctacaactaaagaaaattcctgtaatataaaaatggatgtagtaacatcttaactttttcgtttaattatttttttctctgaattattaaatcctttatctccattgccatctggagatatttcactgttaaaaaataaacatgaaaataatagtgaagaaagagcaaaactttttagaaggtgcagcattgaaatataggagaaaaacttaaggtacctaaataaattttttccttccaaatagagccaataaaatagtagaaatgcagaaaacaatagtatgaaggatcagtatgtaaaatactctcctgggacagtcctgtaactgagctgtaactgtgctttatcttatttcttcaactctgatcagaagaattggcactctttctgctctattttgtggtargatgaatcccatatcacatacagt

SEQ ID NO: 596940 - DNA, 583 bp, Homo sapiens
agcaccaatatggctctcaaaagatttctyagcagaaatcttacaggccgagagagtgggttgatttactcaaagtgccaaagaggaaaacaaagactgacaaccaagaatactcgaatgacaaagctgtccttcagaaatgaaggagagataaagactgtcccagacaaacaaaagctaaggcaatttaccaccactgcacctgccttacaataacagctgaagggagttcttctacctaaaagaaaaggaccctaattggcaacatgaaacatgaaaggagataacttaatggtaaaagaagtacacagtctaattcagaatactctaaaaccataatggtggtgtgttaattacttatatgtatagtataaaggttaaattataaactattaaaaattactacaataatttttaagggatacgtaacataaaaagatgtaaatggtgacatcaaatattcaaaatgtgtggtggaagggagtagaataaaaatgtagtgctttctcagaaatctgtggaacaaaaaaatgaaaaataaataaataaatttaaaatgtagtgctttttgtggccaaagata

SEQ ID NO: 596941 - DNA, 583 bp, Homo sapiens
agcaccaatatggctctcaaaagatttcttagcagaaatcttacaggccgagagagtgggttgatttactcaaagtgccaaagaggaaaacaaagactgacaaccaagaatactcgaatgacaaagctgtccttcagaaatgaaggagagataaagactgtcccagacaaacaaaagctaaggcaatttaccaccactgcacctgccttacaataacagctgaagggagttcttctacctaaaagaaaaggaccctaattggcaacatgaaacatgaaaggagataacttaatggtaaaagaagtacacagtctaattcagaatactctaaaaccataatggtggtgtgttaattacttatatgtatagtataaaggttaaattataaactattaaaaattactacaataatttttaagggatacgtaacataaaaagatgtaaatggtgacatcaaatattcaaaatgtgtggtggaagggagtagaataaaaatgtagtgctttctcagaaatctgtggaacaaaaaaatgaaraataaataaataaatttaaaatgtagtgctttttgtggccaaagata

SEQ ID NO: 596942 - DNA, 585 bp, Homo sapiens
aataaactatatagcaaggttgtgttgtaggatataaggttaacatacaaattgctttcttacaccagaaatgagcaattggaacttgaaattaaaaaatattattccatttacattagcactaaaaaataagtacttaggtatacatctaacaaaatatgtacaagatctatacaaagggaactgaaaaacttcgatgaaagaaatcaaagaagatctaaataatggagagatattccatgcacatrggaaatctcacttattgtcaagatttcaggaacttctaaatttacctataggttcaatacaaccccaatcaaattttaacaagttatttgtggatacgacaaactgattttacagtttatatggaaagacaaaagacccagagtagccacacaacgttgaaaaagaggaataaagatgaatgactgacattatctgatgtggtttggttgtgtccccacccaaaatctcaccttgaattataaataatccccacctgtcaaaggagagaccaggtgacagtaattgaatcatgggggaggtttcctccatgctgttcttgtgatgatgagtggattc

SEQ ID NO: 596943 - DNA, 357 bp, Homo sapiens
aataatggagagatattccatgcacataggaaatctcacttattgtcaagatttcaggaacttctaaatttacctataggttcaatacaaccccaatcaaattttaacaagttatttgtggatacgacaaactgattttacagtttatatggaaagacaaaagacccagagtagccacacaacgttgaaaaagaggaataaagatgaatgactgacattatctgatgtggtttggttgtgtccccacccaaaatctcaccttgaattataaataatccccacctgtcaaaggagagaccaggtgacagtaattgaatcatgggggmggtttcctccatgctgttcttgtgatgatga

SEQ ID NO: 596944 - DNA, 599 bp, Homo sapiens
agaagcgagttcccttcaggattgattccgccttcaaaggagcctgctactggacatccagaaccacagcaagaaacctgacaatattgttgctttcttcaaaagtaattttgactgatctcattttcagtttaagtaactgctgttacttaagtgattgcacttttctcaaattgaagtttaatggaataatagttctcaggatagtatttygtaaataaagatggtttgaatatgaatcttatgagtaaatcatttccattttattatattctagatcatataacttttaacttggtgaactaatccactcttagagaaacaatagtgggagttttatatatgtaatcttgcaggtgaggaggctttaaattctaaaggttgtggtgtcttcatgccaagaactgtattcactgtggttgtagataaatgtgaaagtaactttatgcttaatttaataaattttcattgattttttttaaaaaaagaaaactgaaaggagatatagatgaatccacaattatagttagaaatttcctcatgcctttttcaataattgatagaactagacagaaaatcagcaaggagtgttggctttg

SEQ ID NO: 596945 - DNA, 593 bp, Homo sapiens
tttcacctctctggttagctgtattcctatgtattttattctttttgtggcaattgtgaatgggactgcattcccgatttggctcttggcttgactgttgttggtgtatagaaattctagtgatttttgtatgttgattctgtaggttttataggtactctttttcaaattaaggaattttttttctatttaaattttgcagtcctttagtctgagtagtaaatgagtaatgaaaaaaatgaattttgcagttcttttgtaggaaataaattctaaattttgtattctttgtgaattttgttttgaagaaaatgtcaagaacatggtgaagagtgaaagagacaaaaaatatcttaaagggcagataagagacatacaagatatgttgatagatgataatattgatccaatagaaattccagaaagtctacacacagtgaaacgtagagtatggaggaaagatagtcatccaygaaaattgtcggtcatttacatttatttagaatttattttttatttattctattttgttctcagggttcatttttaatctaaagactcaggtcatcttcagttatgaaaatttcaatttg

SEQ ID NO: 596946 - DNA, 574 bp, Homo sapiens
ctggtgtattcaagatttaagtgtcaaaggcagaactctaaagcttttagaagatatacaagagaaggattttttaaacaatacacataattgctattgtgaaataatatctgatattataaaatctttaagctgcattaaataaaaatattagtgtatgtgactgggttgaaattaagaacttatgttaatcaaaacagggcataaaaagtgaaaggacaagccacaaaatcttctggaagactttctgatttatcagctctcaagcagtacatccccaaagaccagcatatttcagagtctcatgcattgtcttgactaggtgactttcaatcatatctcttcagtctgtctttttatggcattattaagtacttgaagtttttccctttatatatttttttcacatgtgtgttgtcagtttacaatcagtaatatacaagatcgtcgtacacatcaattttgtcttgtcatarctgtgtctctagtatctagagcagagctaggtacagagaagattctcaacaattatctgttgacagacgaccaataggtatccccaggaaagtgtaag

SEQ ID NO: 596947 - DNA, 381 bp, Homo sapiens
ttctgtctggactggttccatcccaacaattccatctgcctttaccttctgttggactctccagttcattaatcatgccatcctcttttttgatttactcctttgttttgatggagcacctcctacaaaagctttataaggttaaggtgagatgcaatcacagaattgatggcaaaaacagcccttaacatttcaaatcccttctcatcatttatattattttatcttcttcaataacccattgaaatcctatgaargaagtagaatttttaaaaaagaaataaaaacagtaaaaactcaagccctgcaaaggagctatttctctctcgagacagcaaatgttaaaatatgcttaggccagctgtaggtatagtaattgat

SEQ ID NO: 596948 - DNA, 597 bp, Homo sapiens
ttgcaggtgggaaaagggaaccagaagtgaatgacatttccagcttaaggtatttttgacaaaacactgccctcgtgtagtttccttctggccctaagcctatgtttataactggggtcctgagaggagctctggggaccactactggtccttacaaccatggggtggccatggttcctctcaccctcctggtccctcatcctcacatgccagtgcctggctttgtcatgactccgccagagaagaggaagagataatatcatgtaggatattatctggctaaagggctaaaaagaactccagagactacatggcccaggttcctcttcttacaaataagaaaacactaaatcagagttatcaagtagttcacttgtcctgagattgattgatcttccttctgccattgctaactgtctgcccttccgattcttgaaccattgtctggctaactaggacccactgctcarttgttcaagacagagatgccactctctcatagggcaacccagtgcctgtggggaaaagattctctttttgtttccttatttagcagaggaactgttaaacatataacgcatttccttgttattattg

SEQ ID NO: 596949 - DNA, 581 bp, Homo sapiens
  misc_feature 426: n = A,T,C or G
ctcatttaatcctcacaaccatcctataaggtagggtttgttacccaccccattttgcagatgggggcactgaggcacagtaaggcacagaaaagtcgtaaatttagtgtgtagcaaagccaggatctgaacccaggcaatagggctctatctagaatctttgcttgttttttttctaaattatgctattcattaggatcaaattgagtatcaaagtaactactgagatggtaagtaatttttgagtgattgcaaatatttgaaaaatctgtgctgtcccagaaccccgtctttgatagccatggcttccattctgactaaaatatcaataaaaaygtttacttttgatcggtgttaaatatcctaaatatgtccccttttcttccataagattctctctctctctctctctctctctctctctgncataggcatggcagaatagcactttgagttttgaaaacttgtattttcttctttaatacaggaatgaggttacattaaatgattcttttcatctcttcaagtttctttttaaacttaattttatgaatcaaaatagaaaaacaatggcaatgaaa

SEQ ID NO: 596950 - DNA, 571 bp, Homo sapiens
cttgtattgcagcattttgtcagtgtcatctctaatttcactatgttaataactaaggattccaccctataaaagaagcagagtacctgaattctcctaaatgacacgtgtttccatgcatgtatgtgtatacagtaatacaagatatattatattacaccttatgttaatttttttttatataagaagtattatagctatacttttttttcgattactctrctggtagaagaggatttttttaatttcatgagcataattgagttggttccagtaacatatttgaaaacaaattcaacaaagaatccattcaaaataatacatttcttaatgctccctctgaaacactcagcaaatattgtgcatctttgacccacagctctgaccttcctgtcctagatgagggtttgtctttctctgccacaagagcatggaaggcaaccagacatggatcacagacatcaccctgctgggattccaggttggtccagcactggcgattctcctctgtggactcttctctgtcttctatacactcaccctgctggggaatggggtcatctttgggatt

SEQ ID NO: 596951 - DNA, 571 bp, Homo sapiens
cttgtattgcagcattttgtcagtgtcatctctaatttcactatgttaataactaaggattccaccctataaaagaagcagagtacctgaattctcctaaatgacacgtgtttccatgcatgtatgtgtatacagtaatacaagatatattatattacaccttatgttaatttttttttatataagaagtattatagctatacttttttttcgattactctaytggtagaagaggatttttttaatttcatgagcataattgagttggttccagtaacatatttgaaaacaaattcaacaaagaatccattcaaaataatacatttcttaatgctccctctgaaacactcagcaaatattgtgcatctttgacccacagctctgaccttcctgtcctagatgagggtttgtctttctctgccacaagagcatggaaggcaaccagacatggatcacagacatcaccctgctgggattccaggttggtccagcactggcgattctcctctgtggactcttctctgtcttctatacactcaccctgctggggaatggggtcatctttgggatt

SEQ ID NO: 596952 - DNA, 583 bp, Homo sapiens
cttattacttagatgaatgacatttttagttagttatagatttagttatttacgtatatgtatattaaatatactctgtaactatatgtataaaatatatgggatatatatagtaaatgtatataatatatatttttgtctattggccaggacatgatttatactttttaaaaaaagtataatacttagatgaatgacatttttacttatagatttagttattcatgtatatgtatattaaatatactctataaactatacatatataacatatagaatatatatggtaaatatatataatatatatttttgtctattggccaggacatgatttatactttttagaaaaagtgtaaaaataatttatacttttttwaaaaagtgtaaaaataatttatacttttttaaaaaagtgtaaaaataatttatactttttaaaaaaacattacagctacaatttgattatttgaaatgtcaaaataattaaaaacagtattttcaaaggatacattcaaattagcataatggtagggactatattgcgtctgtagataaaatggccccacttaaatgtactgtatgt

SEQ ID NO: 596953 - DNA, 583 bp, Homo sapiens
cttattacttagatgaatgacatttttagttagttatagatttagttatttacgtatatgtatattaaatatactctgtaactatatgtataaaatatatgggatatatatagtaaatgtatataatatatatttttgtctattggccaggacatgatttatactttttaaaaaaagtataatacttagatgaatgacatttttacttatagatttagttattcatgtatatgtatattaaatatactctataaactatacatatataacatatagaatatatatggtaaatatatataatatatatttttgtctattggccaggacatgatttatactttttagaaaaagtgtaaaaataatttatactttttttaaaaagtgtaaaaataatttatacttttttaaaaaagtgtaaaaataatttatactttttaaaaaaacattacagctacaatttgattatttgaaatgtcaaaataattaaaaacagtatttkcaaaggatacattcaaattagcataatggtagggactatattgcgtctgtagataaaatggccccacttaaatgtactgtatgt

SEQ ID NO: 596954 - DNA, 503 bp, Homo sapiens
gagaactaagcctcaaaagaacagaaagcagatcctgggtaggggtgggacctgggagtaggagttcatggcactttgcacctctgctgcaccacacggctcagcgcctgtctgcatgtgctttgtgatctgcatggtactccacgtttagggatagaatccaatcaatatacattcttgatatcagaaatctamgagatgagactgtaaggcatttacaccactgttcctacaaatctcattgggagcaaatcttcaaccctctagactttccctggcatccctcactttgatctctgtttccacaacactctttcagggcacccttgacctctgggttcctcaggctgtagatcaaggggttcagcatcgggttgaaaaggctgaaaacagggaaagaccttctgctgctcctcaggggggcgggacttgggggccatgtacatgacaatggtgctgccaaagaagagtcccaccatgcaaaggtgggagtagcaggtgga

SEQ ID NO: 596955 - DNA, 598 bp, Homo sapiens
ctcattcacccttagttatggctgagccatgccagggagacagggaggttcccatcatcagacaacagggcttgagcacactgatggagtaacaaatattacatcttagcaatgcacacaaccaagaagaagaggacataaacccttttactatytttttcactttggatctgaaaagacgttgttctatatatgatttaaagatcctaaacactacctagcccagagaaggaaatttccctaatttttaaaaatcctaaattctttttaatttctttataaggttatatatgacctaatcaccataagttctacaatacaagcccaagcacaccaactaaataaaggctgcagagaatggaatctcctatcaaaacaggaacactcgatattataacttagttttaatcttaaatcaaccaaaacaccctgaaccttccaataatacctattaaaagaagctacattagcaagtctttagttcagctaaaagatcattttgtatcaccctgctttcctcataactagtttttttaaaatgatcaattcctttcaggatgtagatttccccgcaaccccctttctttatcataagaga

SEQ ID NO: 596956 - DNA, 632 bp, Homo sapiens
gcttactgctcctaggctacaaacctgtacagcatgttactgcactgaatactgtaggcaattggaagaaaagtcactaggcaataggaatttttcaagtccattataatctactgagaccactgttgtatatgtaatttgttgttgaccaaaacattgcacatgattatattttctcagaagagagccttctgatgtaatagaaagtcttccatagtttgatgggttgtctacaaacacacagacacacacaaattaagctctatacttcagatttttgcattttgctgtatttaggttgcattttactctattaaaacctttttttwaaagtaattaaaagaactaaaacagtgaatatggaggagagagcctagaaccatgactaactgtcaggagacataaacaaagaaaagaagaaattgacagagtaggatatacaaaaagatgcaaaaacaaattttttaaaaaacaggaggagcaaacctggggagcaacagttggattttactccagcaacgtaaatgaacccatcatgaccacatgaaaaagctggcactgttgtctatactccagtcataagattactccaggatacattttgttaacttttctttcactctgcattgcca

SEQ ID NO: 596957 - DNA, 508 bp, Homo sapiens
tggggagcaacagttggattttactccagcaacgtaaatgaacccatcatgaccacatgaaaaagctggcactgttgtctatactccagtcataagattactccaggatacattttgttaacttttctttcactctgcattgccatgctttattattttttttaaaatcccttctccttttctaactaactcttctggattaaacactaaacttgttttctttgggtttggtcctgttgcatggagtctatctcccctgcayaggattctggtctttatcttgcgtgttcatgcagtaatacctatagaaagggtgatctcttccacacagcttaccatatttctataagacactcctcagatgggattggtgtgatctcttacctgccacttactgaccattgtgtgggatagcaggagtaacaggtgaagggaaaagggagcaagaaaggacagtacattaaaaataagaagcagctaaaatagctgtgaataaaggagtaagaac

SEQ ID NO: 596958 - DNA, 489 bp, Homo sapiens
tttacttttgggagatgccaacaaaaaactatgttccaaaagagccatggtkgcctacatgtatattgttgtgactcgcatgtttcacatgcaaatttcacatcttgaaactcaccttcatggtagttatttggagaggagctgatgataaccttcagcagctccaaatattcaggctattacaaatgtatagtttttgtgtgtgtgtgttttaaagaagttttattgaatgaccttcaggagaaaagtttaagtttacagatacaaaactggttaaaaacatgttgaatttcagttcaaagttttaaccttatttctttaaaacaatgccttcaaatggtaacctaaggcacctctaaaacaatataatgagtatgtcatgtatacaggtgattgcagagggaagcagattcctttacttcatttctaaagagtaggggaaaaatcttctgcaattgggcagatatagtggaaggacgaacatcacag

SEQ ID NO: 596959 - DNA, 489 bp, Homo sapiens
tttacttttgggagatgccaacaaaaaactatgttccaaaagagccatggtggcctacatgtatattgytgtgactcgcatgtttcacatgcaaatttcacatcttgaaactcaccttcatggtagttatttggagaggagctgatgataaccttcagcagctccaaatattcaggctattacaaatgtatagtttttgtgtgtgtgtgttttaaagaagttttattgaatgaccttcaggagaaaagtttaagtttacagatacaaaactggttaaaaacatgttgaatttcagttcaaagttttaaccttatttctttaaaacaatgccttcaaatggtaacctaaggcacctctaaaacaatataatgagtatgtcatgtatacaggtgattgcagagggaagcagattcctttacttcatttctaaagagtaggggaaaaatcttctgcaattgggcagatatagtggaaggacgaacatcacag

SEQ ID NO: 596960 - DNA, 571 bp, Homo sapiens
ttacttttgggagatgccaacaaaaaactatgttccaaaagagccatggtggcctacatgtatattgttgtgactcgcatgtttcacatgcaaatttcacatcttgaaactcaccttcatggtagttatttggagaggagctgatgataaccttcagcagctccaaatattcaggctattacaaatgtatagtttttgtgtgtgtgtgttttaaagaagttttattgaatgaccttcaggagaaaagtttaagtttacagatacaaaactggttaaaaacatgttgaatttcagttcaaagttttaaccttatttctttaaaacaatgccttcaaatggtaacctaaggcacctctaaaacaatataatgagtatgtcatgtatacaggtgattgcagagggaagcagattcctttacttcatttctaaagagtaggggaaaaatcttctgcaattgggcagatatagtggaaggacgaacatcacagtcaagagttggtgccctgcttttyctttcccccatgttcctcatggatagctgagtgcctcttgcagggagatgggaggaaag

SEQ ID NO: 596961 - DNA, 622 bp, Homo sapiens
gcttgggtgtggaatgatgatagtggcatttccataatggtggaggcataaaaatcactgataaattcttactgaccatttatttgtcacattggcctataatcttagccttctaggttacaaccttccctttctcttattaattaaaacagatccccaaatacctctcactttgtgacttctcactctataaaaagtagaatttyaaaacattatttgtaatgaaaaatgtaatgtgtttttattttttatatatgtattttatttatttaacagaagagaaacacatctgtcaaaggacctagccctttttctttcataacagggcttccagagggttatgttttgatgacactaacatggaacactaacattgaagcctagcttttagatatagtttcagcaactgctgctattagtgatttcaattacatatccatggaatcatgggatgccttttattacagtgtattcttttaaagaaaaaaaaggagactagactaatgaagtactaataaggagaagataatggagaagatagaattgcatatagtcaccaagttttcattcgatcttgctactaaaatgcacttccccttctaactcatctgttctccaaatg

SEQ ID NO: 596962 - DNA, 593 bp, Homo sapiens
gtgagcattgaccatttccaaggaggaaagcaaagggcccagtgggataactggagctaaaaggcactcctgagatgttggtggtgcatgctggcaaacagggacagtggcttcccaatagggcactttcagggcagcctaagtgggaggagctgaaatctggggattgcctggacaggtagcacaggaatggccagcagcatgtgctgaaaatgcttattagtgcattcatactaacagctccagtactgggctaagttaccattcagaggcagctcaggccagctctaagctctgcctttaagccttcatcggataccacagacactttataaaactatgtcagcataagaattacttcacattttcccttcaacgtcattctcagatcccaattctgtcattgtcctgtattctatccggaagagtcatgtctgcactctttttatagacctggytcctttcagtggagagttggacagatcacaacatgctgagttgaatttctacaaagaactttgtcttcttatccctgtggtcaatataaataatagattcatgtgcattaatacacccagtatgtgtttcctggc

SEQ ID NO: 596963 - DNA, 633 bp, Homo sapiens
ggagagatacaactgtgtacaagatggaaaaggaccttactctgcctgaggtcaggagttctaaaccatcctggccaacatggtgaaaccccatctctactaaaaatacaaaagttatctgggcatggtagtgggtgcctgtaatcccagctacttgggaggctgaggcaagagaatcgcttgaacrcggagagcaaaggttgcagtgagccaagatcatgccactgctctccagtctgggtaacagagtgagactccatctcaaaaaaacagaaaacaaaaaaaaacccaaaaaacaaaaggaccttacttttctggagcttatgacatagagagggagatggaaaataagcaattaaataaatgaacaagatgatttcagattatgataaatgttgagcagacaacagaacataatgtgataagagagactcagatggggaaaagaccacttcagactgggttgtcaggaaaggcctcttggaggaagtagattggagaggagagctaaatgatataaggaaattgaacatgtgaacatctgaagacatagagctactgggtagagaggacagctagtgcacaatccagaaatcaggcaacagctaagcatgtttgaaagcaggaaaggcc

SEQ ID NO: 596964 - DNA, 476 bp, Homo sapiens
actaaatattttttaaagcttgcttggtctcccctctatccctgtcagctttctttcatgctgtctttatatatgacgcaactctcttaagtgacctctctctctgtggcccacatgctcctcagagctgtgccagtgagctgtgtgttccttctctgccaagttttctgtccttttccgtggtcccgacatgcttcctttctccaggatatttttttaaagataaagaggaaacgagaatactaagtattacgaataagggtttggcctttaatgaagataacttcaggttaaattcttcagaaatawtggctatcttttttacaaaggaacttcaaagagcattcacttttttaattgaccaatttttgtgtttctaactactccatgtattaaatttaaaatatgagcaattatcagaaatgcatatttaaatttttctcatgcactaaaatttcaacttctgccagtttctc

SEQ ID NO: 596965 - DNA, 424 bp, Homo sapiens
gttttaccccttaagatagtagaattgttgtctgggccaactcttccaatctttccttcctgccgtgaatctttaggtccaggaaacacacatagctttttttttttttttttttcctccaacttgtacattttgcgtttgtatagactgaagcacactttgttaacaagaaaatgtctcagtataccatctgtaatttcagttttcagtttactgtatatttgctgaagcagcggttaagagaaacgtgcagctaatagaataatgtgtaacaaatagtgaattgtatgtattttaaagggttatactttggcatcttccccttgcaatcttgasagaatgaaactggacttgctctcataccaaaaagaacaacactaggcaaaataaatatggcaaatatttttaggaattgaacaacagg

SEQ ID NO: 596966 - DNA, 599 bp, Homo sapiens
catttaagatagggcatggtaagattatgagggaagtacagtcatccttccatatccacgggggttttgtttcaggaccccccagggataccaaaatctgtgattgttcaagtctcttatgtaaaatggcatagtatgtgcatgtagcttatgtatatccttctgcatgctttaaatcatctctagattacttgtagctaatacattgtaaatgctatgtaaatagttgttacactgtattgttttcttaaaatttgtattatttattattctattgtaagttttaattgtttttttccaaatgtttttgatttgaggttggttgaacctgtgagatgcaaaayccatggatggagagggccgcagaaaccaagaggtgggctgtggaagtcattctagtgagtcagggagcgtttttcaggaaaaaaaaaaaaatagtggctagctcagcaaatcagaaggaaagtgtagccatctaggtagccaattataaatgcaaagcaagaaacagcatatatttgggtaaccaatggttagagcaaagactacacgtggaagttttggactacaggtagaagatgggccggaaaggaatgaag

SEQ ID NO: 596967 - DNA, 612 bp, Homo sapiens
  misc_feature 608: n = A,T,C or G
tagatgtctagagtaattttttttgttgagttccctaaagtagacaagattttcttcatgtttatctcctactctataagtacatagcacgatggcttactctgaggctcacaaagtgtttgcaacagtgaattaaatgttgaatgtggggcatttacaattctgattgctttcttagtcaatttaagatcgatgtggcgatatataagttgcactgccaatttgtcctcagttttctcatcagtgatgcaggatgaatagtacctttccttatagagtcatgagtaatactggaatagtttgttgaagtgttgttaaatatactaagattccaatgaaatgtctatgatataagtagttccttagttgcatattgatgtttctcatagacagtcattgtttattgtttgtttgaaagtggtttgaaaataatagagactatcttaaaccagtgtaccatttgatttctttgtagcaaaaatgtttacttgctatgcttccgctttgcactatagtgaatgtgktagcttctggaaactgccctggaaagttaggtgacacaatgaatttttttggaatggtaatttaagtcactaacagcattattnctct

SEQ ID NO: 596968 - DNA, 573 bp, Homo sapiens
caccctgtggatcaaaagtttgagcacctatgttttagtggaaggactgtacattttggagcaaaayggtttttaagggttttatttgtctcctctgtctcccacttgctgtgtaatcacagccaatttacttggcctctctggtcttccattttttatatatcaggctaatcacccttataattatttgctcaagcatgtcttccttgctgaaatataatatccagaaggtcaggattatgtctgtttcgttcatcccacattaccaaagtctagtacagcacattacatgatacatgatagggtctcaataaataatcataaattgattgacagggtggctgtgagtcttaaatagaataatgtgtataaagtgccccatgaggtacctggcagatggcaaatgtcataggtgctcagtaaatgccagatccctttctttaccactaatgctgttctcagtggtaccacacaggagacaaaattcatggcttgtctacataaagtaaatatttaaggcactggttcccaaagtgtggtgtccaaactagtagcatcagtatcacctttaga

SEQ ID NO: 596969 - DNA, 573 bp, Homo sapiens
caccctgtggatcaaaagtttgagcacctatgttttagtggaaggactgtacattttggagcaaaatggtttttaagggttttatttgtctcctctgtctcccacttgctgtgtaatcacagccaatttacttggcctctctggtcttccattttttatatatcaggctaatcacccttataattatttgctcaagcatrtcttccttgctgaaatataatatccagaaggtcaggattatgtctgtttcgttcatcccacattaccaaagtctagtacagcacattacatgatacatgatagggtctcaataaataatcataaattgattgacagggtggctgtgagtcttaaatagaataatgtgtataaagtgccccatgaggtacctggcagatggcaaatgtcataggtgctcagtaaatgccagatccctttctttaccactaatgctgttctcagtggtaccacacaggagacaaaattcatggcttgtctacataaagtaaatatttaaggcactggttcccaaagtgtggtgtccaaactagtagcatcagtatcacctttaga

SEQ ID NO: 596970 - DNA, 523 bp, Homo sapiens
ttgctaagggaatggagatgcacccagagtgacagagggagtatcctatgtgccaaaaaagttctaggttctctggagtcatatcaagaagtgtgatatacaactgctacttggaaaagcttgcaacatgctacagacatggtcatatctatgaataaccatgttacaaggcacacaatgcaggggctgaagcatagccaggccaggagagggtatggtaaagagaattaacttcaacttggagaatccaagcccaagaagcaaagatcttatgaagcatggactggataaatgtgccctggtctgaattggaatagggataccctaaatttcattcctcttcctcccagttgccagtgctttgacaactgaccaaattatttataaaacagtactattaatatctaacccacagaatatacacttctagtgactgtgtatgtatttatatttatataattaaataattttatttttctgcaagataaatrcatattatctgaaataaattaacattactttt

SEQ ID NO: 596971 - DNA, 493 bp, Homo sapiens
tgtgttctgagccaaagatgtaaaagcaacatttaagaaagtttgttctttttgaatgacgctttaatttaaaacagaataaaggattcccctgtgtgttcctggaactgtaaacactcataaactctctttgtttactttattgactcaattgtgacatttaaaatagaaagctaagtctatgcatgagcaattttttacagaacatgcacattaacagagatggctgcagacaatgactttgtacaaattcaatcacatttattgggtaaatattgcactggctccaagagacagcaatgtaataagtcccaagcctactcctcctaacactctaatggaggtgggagacacccccgcaatcatccctaactcatacttaataaagatcagcagtgcacatggtgccagagattggckccactgctgtaattatctccagggaacttgagtttctttatgaggggagtaatcagaagggttgttgaatgag

SEQ ID NO: 596972 - DNA, 383 bp, Homo sapiens
gcctttagcagatgatcaggtcatgaaggctgggattaaagcctttatgaaaggggttttacactgagtttggccctttttgccctcccttcttttctaccatgtgaggacactgygttcatcccctctggagaatgcagtaacaaggtgctatcttggaagcaaagagaccaggccctcaccaaatactaaaactgctgatgccttgatcttggacttcccagcctccagaactgtgagaaataaatttctattgtttataaagtacctagcctatggcattttgttaaagcaacacaaataaactaagagagagaacaggaaaaagcatgagaattgtagattgtttaggtttccctctgccaccgtaggtggggatgaga

SEQ ID NO: 596973 - DNA, 383 bp, Homo sapiens
gcctttagcagatgatcaggtcatgaaggctgggattaaagcctttatgaaaggggttttacactgagtttggccctttttgccctcccttcttttctaccatgtgaggacactgcgttcatcccctctggagaatgcagtaacaaggtgctatcttggaagcaaaragaccaggccctcaccaaatactaaaactgctgatgccttgatcttggacttcccagcctccagaactgtgagaaataaatttctattgtttataaagtacctagcctatggcattttgttaaagcaacacaaataaactaagagagagaacaggaaaaagcatgagaattgtagattgtttaggtttccctctgccaccgtaggtggggatgaga

SEQ ID NO: 596974 - DNA, 593 bp, Homo sapiens
aaaaaaaaaaaaaagaaagaaaataaaaggaaacagaaattccatttcaaaactaaatgctcaccctgactcattcagggaaggatccaaggtttttgatgcagggcactgactctctgcctgtttttccccttcatcatctgctccccttaaaaaatggtatcaactgcattggtaagaatccacatttcttcccttttgttccctggcttcattccaggatttcacttgtcacactgatgggtgagatgcctttcatattggcataagacactgagcggatgcctcctcttatcttatcaaacagaaacccggcgagtgaatctacccagagctgaagcttcctttgcaacttgggaacaccagggccacagtgactttgtggcttggctttagataaatttgaccatggctgtagaacccagcagctcagaatccattaaaaggagagctgggaggaggtgagtgatagagacaaggggatttygatgttacaattgttgaggggactgtggctggcgggcaacttgctgtgggggcagtgattgaaaacatggattattagctggttacaaatcttcatttgtacagat

SEQ ID NO: 596975 - DNA, 621 bp, Homo sapiens
ttgtaaaaattaaatgggatggtaagtagagtgcctaacagattgcctggaaatagtacatgctcagcacatcttaattccttttctctcacctgtaatataagaagtttatgttgaatggtccctaaggtatttatattatttttaattttataaatgtagaaggtggtagacacctttctaggcattggggttataattatgaacaagacgacaaaacagacatatcccttgccttcatagaaattaaattttagaggatacaattaacatgcaaggaaatgcacaatgacttttccttcttcttccttcatctttgcaagttcaatccaattcaaattttgagtttatctctgaggctacctcttaacaaaacctggaagtaatgtttttggacttaacattttcatatttagtartcatacactggttttgcctgcttagcatccgtctcccctttcctggtaggaggaccctgaatatcccttggagaattgtccctgtgtctcactcgcaatgtgtgtagatcaggtggggctccatcctggctccaggagtgctatagaagacatcacatgctcctagacattgtggaagtcctggcccattagtgtaattcca

SEQ ID NO: 596976 - DNA, 654 bp, Homo sapiens
acaaaaatgaaattgttagaatcaggctgcctggattcaaacactggctccactaagggcaagaactgggaaaagtcgctttatctctgagctatttattgctcatctatacctgcttcacagagttgcagtgaggattagatgagataaagcatttcaaatgcctaatggaatgtctggaatgttgaagtaactctgtaaagttacctattgtcatgtttcttattacattacactgccaggacttagctagtctttctcatgctttgagacatatattctatttcaatgtcccattatttgcctgtcccacacaggttgttttctatcaaactctcaggtattctttatctccttcttccacaattactgtctctagcttacatccttcttcccccaaccaaaaattcagtgtttagaagttttcacatctgcttggaaagaataaaacttccaaacctctggctttgcggttttgcctcaactttaattatctccagctattctgcgtctcgttcactttctggcacagaaaatgcagtagaattgtttgacttgagaaattctctttgagaataagctccttgaatacagmggctgtgtgcaacaaatctttgcccttctttggagcaaaaatgcctcccacagttagca

SEQ ID NO: 596977 - DNA, 630 bp, Homo sapiens
  misc_feature 293, 307, 420, 483: n = A,T,C or G
accaaaagcgagcaggagtagctattttatcagacaaaacaaacttgaaagcaacagcacttaaaagagatgaagagggacattacataatggtaaaagccttgtccaacaggaaaataycacaatcctaaacagatatgcacctaacactggagcacccacatttagaaaacaattactaatagacctaggaaatgagatagacagcaacacaatagtagtgggaaactttaagactccactgacagcattagacatgtcatcaagacaaagtcaacaaagaaacgatttanactatatggaacanatggacttatagatagacatatacagaacatttcatccaacgactgcagaatacacattccattcaacagtgagtagaactttctctaagacagaccatatgaaaggccatanaataaacctcaataaattaaaaaaattgaaattatatcaagcactctctcagaccacagcggnaataaaactggaaatcaacttcaaaaggaactttcaaaaccatgcaaatactgtggaaattaaataacctgctcctgaatgagcattggatcaaaaacaaaattaagatgaaaactaaaaaattcttcaaactgaacaacaataatg

SEQ ID NO: 596978 - DNA, 568 bp, Homo sapiens
acacacatatatttactcatcccaaatgagatacatgctataagaacagggtgaagttgagttgttgaaagaaggtcaatatggttggaaagtgagaagtgacagttagcagtaaacaatgaggtcactgatccatataggggccggagaaagcagggcttgatgagccaggttaaggattctggtctttgtcttaagagcaatgggaagcctttgaaagggcttaagcaggagagtggcataatcagatttgcatttttaaaaagatcactctaactgcattgtggtgagccagttggagagcggccagaaagagggtcagtctagtagaccaaaagagagatgatattagcttggatgagggcaatagctatggagacagaaatgggcctagtttacggatattcatgtaggaatatagacaaatcttgatagttgattgactacmaaggagtcaaagatgactttgagtgttctcacttgcacacctgtaaaaatcagggtgtcatgcacaaaaatggggaggaacactgtccttattgtttccgtattctccaggcttaccaga

SEQ ID NO: 596979 - DNA, 505 bp, Homo sapiens
ccttgaaaaaaatattgaatgataatcttttagcttattcaaatgatgagctgcctaggctaggacatatcctgaaaacactatattattwaaaaaaaaatgttttaaatctagttctgagaaataacctaaatcaaatttgtagtcaataggctcatgagaacagtctccctgaatgatgaaatttgagaacttgtgtgtgggagtaaggcaaactcagtttcactactggattttggatttctatcctcctgcagaaaactttcagtggcactatgattgcccattttgaaccatccttcgtcacctgccagaaacagccttggagactgtggatgggcttgatgcctggcttattcattcatgatggtgacttagtaccaggatgtctctcccacagagttttaataagaaaaaatgttgtccctccacttacagataacaaaaatagataagcaaattgagcacagtgtttggtgtgttgtagacatgcaagggcaaacag

SEQ ID NO: 596980 - DNA, 505 bp, Homo sapiens
ccttgaaaaaaatattgaatgataatcttttagcttattcaaatgatgagctgcctaggctaggacatatcctgaaaacactatattatttaaaaaaaaatgttttaaatctagttctgagaaataacctaaatcaaatttgtagtcaataggctcatgagaacagtctccytgaatgatgaaatttgagaacttgtgtgtgggagtaaggcaaactcagtttcactactggattttggatttctatcctcctgcagaaaactttcagtggcactatgattgcccattttgaaccatccttcgtcacctgccagaaacagccttggagactgtggatgggcttgatgcctggcttattcattcatgatggtgacttagtaccaggatgtctctcccacagagttttaataagaaaaaatgttgtccctccacttacagataacaaaaatagataagcaaattgagcacagtgtttggtgtgttgtagacatgcaagggcaaacag

SEQ ID NO: 596981 - DNA, 604 bp, Homo sapiens
ctagaattgatatttttagattactcttcaayagttaggttgttacacctaatatttactccatttcactcgagactgggtgtgggtatttttttcattttgtataccttcattcaatcctcattcaataagaaataataagtcatattccaagaaactgaatcattcccatataacatcttcaagactccagcttttcattcgttccacatttattagcacctactgtgtaccagacactgatctagggactgggaattccacagtgaaaacagagacaaaaccccctgctttccaggaggttacatgcacaatgtattccagccatgcctccaacaaagaaatgtgccattcaaattggagctatccattgtgaacaaactttgtgccacactctgtgctgattgcttagggaagacgggtgcagtgatgaacagaaaccctggaatatggcaatgatggtgggtgtgttgggtaagtgacacatgagcaagtgactgtgagacagaaaatacaaaatcatgacaggtgtcatggcaatccaagaattgatttagaataaatttatgatgaataattcattaaggcttactaaggaaagttg

SEQ ID NO: 596982 - DNA, 604 bp, Homo sapiens
ctagaattgatatttttagattactcttcaacagttaggttgttacacctaatatttactccatttcactcgagactgggtgtgggtatttttttcattttgtataccttcattcaatcctcattcaataagaaataataagtcatattccaagaaactgaatyattcccatataacatcttcaagactccagcttttcattcgttccacatttattagcacctactgtgtaccagacactgatctagggactgggaattccacagtgaaaacagagacaaaaccccctgctttccaggaggttacatgcacaatgtattccagccatgcctccaacaaagaaatgtgccattcaaattggagctatccattgtgaacaaactttgtgccacactctgtgctgattgcttagggaagacgggtgcagtgatgaacagaaaccctggaatatggcaatgatggtgggtgtgttgggtaagtgacacatgagcaagtgactgtgagacagaaaatacaaaatcatgacaggtgtcatggcaatccaagaattgatttagaataaatttatgatgaataattcattaaggcttactaaggaaagttg

SEQ ID NO: 596983 - DNA, 604 bp, Homo sapiens
ctagaattgatatttttagattactcttcaacagttaggttgttacacctaatatttactccatttcactcgagactgggtgtgggtatttttttcattttgtataccttcattcaatcctcattcaataagaaataataagtcatattccaagaaactgaatcattcccatataacatcttcaagactccagcttttcattcgttccacatttattagcacctactgtrtaccagacactgatctagggactgggaattccacagtgaaaacagagacaaaaccccctgctttccaggaggttacatgcacaatgtattccagccatgcctccaacaaagaaatgtgccattcaaattggagctatccattgtgaacaaactttgtgccacactctgtgctgattgcttagggaagacgggtgcagtgatgaacagaaaccctggaatatggcaatgatggtgggtgtgttgggtaagtgacacatgagcaagtgactgtgagacagaaaatacaaaatcatgacaggtgtcatggcaatccaagaattgatttagaataaatttatgatgaataattcattaaggcttactaaggaaagttg

SEQ ID NO: 596984 - DNA, 604 bp, Homo sapiens
ctagaattgatatttttagattactcttcaacagttaggttgttacacctaatatttactccatttcactcgagactgggtgtgggtatttttttcattttgtataccttcattcaatcctcattcaataagaaataataagtcatattccaagaaactgaatcattcccatataacatcttcaagactccagcttttcattcgttccacatttattagcacctactgtgtaccagacactgatctagggactgggaattccacagtgaaaacagagacaaaaccccctgctttccaggaggttacatgcacaatgtattccagccatgcctccaacaaagaaatgtgccattcaaattggagctatccattgtgaacaaactttgtgccacactctgtgctgattgcttagggaagacgggtgcagtgatgaacagaaaccctggaatatggcaatgatggtgggtgtgttgggtaagtgacacatgagcaagtgactgtgagacagaaaatacaaaatcatgacaggtgtcatggcaatccaagaattgatttagaataaatktatgatgaataattcattaaggcttactaaggaaagttg

SEQ ID NO: 596985 - DNA, 345 bp, Homo sapiens
tacataatgtcaggaaggttgctgtttcaatcaatatatgacaaatgaaatgataaaggaaatctggctggctacaaatggaccatacaaatgcatcacaaaraaactcaaagcctgctgttatggactgtaagaaatgccaggagtcttgtaattgtgagagagagagagagaaagaaagagacaaagaaaaaagagaaagaaagaaagaaagaaagaaagaaagaaagaaagaaagaaagaaagaaagaaagaaagaaaatgaagaggaagaggagaaaaaaagaattccatccatactaagtattcgattcaaagcaacaattcttacagattcttcatgtc

SEQ ID NO: 596986 - DNA, 345 bp, Homo sapiens
tacataatgtcaggaaggttgctgtttcaatcaatatatgacaaatgaaatgataaaggaaatctggctggctacaaatggaccatacaaatgcatcacaaaaaaactcaaagcctgctgttatggactgtaagaaatgccaggagtcttgtaattgtgagagagagagagagaaagaaagagacaaagaaaraagagaaagaaagaaagaaagaaagaaagaaagaaagaaagaaagaaagaaagaaagaaagaaagaaaatgaagaggaagaggagaaaaaaagaattccatccatactaagtattcgattcaaagcaacaattcttacagattcttcatgtc

SEQ ID NO: 596987 - DNA, 590 bp, Homo sapiens
tcatatgcactttagggtacaagaaaaacagagttaaatgaattaactgtgagttctgaatgaaacacattgtcacagacacaatctgcttgtttgctcatcattggcagatataagctgatatggcttgcgtatgcattgaatgtacacactacattcatatgcatgtgaattgacatggatcacatagatgacatcatggctgcctctttagcaaaactatgcagttaaggggacaagtgagggaggacagggttatttgtcacagagaggaactcctcagcttattttagatgatgctctcttttcagagargctttaagctgtaggtctaatcagcttttccacaaagcccccaccagtctactcaccctctgctgaccccaggaccttgcctagataatttattcctgaggagcagtctagtagacctctgatgtccttcctctcatgattcagagagcaggtgtgtgatgcccttgacagctgagggcccttctctctctactacttctatgaaaagccatcttcaccacctgcttctgggtgacagaccttctgctcaccctggctctacaatgggtgaggag

SEQ ID NO: 596988 - DNA, 590 bp, Homo sapiens
tcatatgcactttagggtacaagaaaaacagagttaaatgaattaactgtgagttctgaatgaaacacattgtcacagacacaatctgcttgtttgctcatcattggcagatataagctgatatggcttgcgtatgcattgaatgtacacactacattcatatgcatgtgaattgacatggatcacatagatgacatcatggctgcctctttagcaaaactatgcagttaaggggacaagtgagggaggacagggttatttgtcacagagaggaactcctcagcttattttagatgatgctctcttttcagagaggctttaagctgtaggtctaatcagcttttccacaaagcccccaccagtctactcaccctctgctgaccccaggaccttgcctagataatttattcctgaggagcagtctagtagacctctgatgtccttcctctcatgattcagagagcaggtgtgtgatgcccttgacagctgagggcccttctctctctactacttctatgaaaagccatcttcaccrcctgcttctgggtgacagaccttctgctcaccctggctctacaatgggtgaggag

SEQ ID NO: 596989 - DNA, 470 bp, Homo sapiens
tattttggtgcatttcaaagcaaattgcagacatcaatacatttctccttaattatatcagtatatattgaaatagarcttaatattgcaacaatctttctgattcttttccagcatagaattattttgcctgttttagaacttcatataaatggaaacatatagtatgtactctcttttgcataaggctcattcactaaatagtattcttgagattcatctatgttactgcatgcttattcctttgaattgctagattgtattccatggcatggatgatccccagttagtttgtccttgcaccacttgatggatattataaataaggctgctattcatacacatttgtgtacagaggctatctttttttttttttttttttttttaccttggataaatacctataattgagatttctgagacagagggtgcactgcccttcgtttttctcctcaaacataccaaacttt

SEQ ID NO: 596990 - DNA, 543 bp, Homo sapiens
tggattacagcccagcataaatacctcattttaactcaattacctataactaaatatagtcacattctcactaggggttagcacttcaacatatgagttgtgggaggacacaattgagcccacaacttaagaaggacgaaatatttctaagggtgtgttctgagcccagtagggtttcctttaaagcttggtgcttttaacaatctcaatgctgatagtgtttyttcagagtgaattaagaacaaaatcctcattgcaaatgttattatgtacagagtaatataattatggaagcaatgaaacatataattaggtcaggtttttttggctttgcaatcttttctggcaaagttttctttttttttttttaaattaaattttaggttcagggtacatgtgaaccctgttcgggtttgttacataggtgaactcatgtcacaagggtttgttgtacagataatttcatcacgtaggtatgaagcccagtacccaatagttatctttctgctcctctccctcctcccaccctccactctcaagtag

SEQ ID NO: 596991 - DNA, 565 bp, Homo sapiens
tggtgtgatgtgcagatatgtcagggaggtttcttagctgccacccagggaacaaaatctttctgtaacagtatggccaaagcctaggtcttgcttcctttctcagacctgaacctccactgctctatcacagaccaagttacagaagtcatttggtttagtgactcaagacaaagcatcaaaaactaggggatatatattctttaaccaagaaaaaggaagcattttttcctgagaataagtgacttatttgcaaaagacccaccaaacagacccagaaaatgacctcgaaacattcttaaaggcttgtcaaggtcaaaattgatatggacaatgaagatgcagctagtgctttttataacatcctaccactgactcttgtaagagaagaacaaatcctttttcatgaaatgtcttccacctgcttttctacctagaaaactcctactcatccttgaggaccgaaataaaatttcctctatgaacatttttccaatccttccccaccttaaatatatacacacgcatcaatatcaatgaaycgttatcttctctataatgcctc

SEQ ID NO: 596992 - DNA, 572 bp, Homo sapiens
taaaaatgtcttcttcacagggttgaggttaggcagtatgctgagtttttaaaccacatttacatatagatatttttaaattgttaaatgaattcttactatatattcttaggcaagcagcctttttatgtctatattaatctacatcacaatttataatagctagaaaatatcccaatatatggrtataacaagaaaaatgcctaacttaatcccctactgttgagcatttgtttctaattttttactgttgtgcacaatgcttccatgagcatggtttatattaggtactcctgattagaccctagtctaatttggccaaacctaaagaatcatcaagaaaacagaagtggggccaggcacagtggctcacacctgtaatctcagcactttgggaggctgaggcgggcagatcacttgaggtcaggagttccagactagcctgggcaacatggagaaaccccatctctacaaaaaataaaaaaattagccaggcatggtgacgcatgcctgtaatcctagctatttgggaggctgaggctggagaatcacttgaacccaggaggcagagg

SEQ ID NO: 596993 - DNA, 605 bp, Homo sapiens
  misc_feature 602: n = A,T,C or G
agacaagagtactgaagccatgctctcatgggacagtgaagaagtaaagcaagacaatgaatgcagagtgcttcagtatccgaaaattcctctggaaataaaacatttatgttgtggtagcagactgaagaacaacttgttagtaactctattctccccctttctgcctttagactcttttatattaaagaaaggaagttgggagggaaataggtagagggcaaggccttgtgactttactttgagtaacaagaattttattcatttaacgttaattgagcacctattgtgtcttaatctgtttgggctgctataacaaactaccacagactgggtggcttataaacagcagaaatttatttctcatagttayggaggctggaatgccataaatcaaagcatcagcagatttggtgtctggagacagaacccatttcctagttcatagatggctgtcttcttgctatgtccttacatggtagaagaggtgaggaagatctctggggtctctcctataagggcactaatttcattcataagggcccttccttcatgacctcatcatctctcaaaggcccaaccaccaaatatcatcaaaattnggg

SEQ ID NO: 596994 - DNA, 605 bp, Homo sapiens
  misc_feature 602: n = A,T,C or G
agacaagagtactgaagccatgctctcatgggacagtgaagaagtaaagcaagacaatgaatgcagagtgcttcagtatccgaaaattcctctggaaataaaacatttatgttgtggtagcagactgaagaacaacttgttagtaactctattctccccctttctgcctttagactcttttatattaaagaaaggaagttgggagggaaataggtagagggcaaggccttgtgactttactttgagtaacaagaattttattcatttaacgttaattgagcacctattgtgtcttaatctgtttgggctgctataacaaactaccacagactgggtggcttataaacagcagaaatttatttctcatagttacggaggctggaatgccataaatcaaagcatcagcagatttggtgtctggagacagaacccatttcctagttcatagatggctgtcttcttgctatgtccttacatggtagaagaggtgaggaagatctctggggtctctcctataagggcactaatttcattcataagggcccttccttcatgacctcatcatctctcaaaggcccmaccaccaaatatcatcaaaattnggg

SEQ ID NO: 596995 - DNA, 533 bp, Homo sapiens
tgagtctcaattataccagtatctaaagaaaacagagtatgaaaaattggcacacagagctgtaatttggaaccgggtgttgtccttagattgctgtaggtgtgttgggggaggtgtgtttggctttgcatcatgatctgaagctagagcaagaaaaggataaaattaggacatgtttcttcctctgtaaaatggaggatttccagattccaccacctaatctgtatcccacccctttcctgtttcaccatcagccccgtcttcatccttactccccaagcccagcaaaacagaataagccctgtgtagaatttccagaaacattgcagcctacttctggggaatagtcttaacaartctaactgagagaggcctaacaatacaggtgaaaacagacagggttctagttgacttgaactgtagtgtcaggtcactgggaatagggacaatattttgaagactttttgaaactcaggatttctgacttgtggtgtgtcactatgggaacaatgaagaatagaatcgactcgggg

SEQ ID NO: 596996 - DNA, 533 bp, Homo sapiens
tgagtctcaattataccagtatctaaagaaaacagagtatgaaaaattggcacacagagctgtaatttggaaccgggtgttgtccttagattgctgtaggtgtgttgggggaggtgtgtttggctttgcatcatgatctgaagctagagcaagaaaaggataaaattaggacatgtttcttcctctgtaaaatggaggatttccagattccaccacctaatctgtatcccacccctttcctgtttcaccatcagccccgtcttcatccttactccccaagcccagcaaaacagaataagccctgtgtagaatttccagaaacattgcagcctacttctggggaatagtcttaacaaatctaactgagagaggcctaacaatacaggtgaaaayagacagggttctagttgacttgaactgtagtgtcaggtcactgggaatagggacaatattttgaagactttttgaaactcaggatttctgacttgtggtgtgtcactatgggaacaatgaagaatagaatcgactcgggg

SEQ ID NO: 596997 - DNA, 568 bp, Homo sapiens
tatccatgttgctgcaaagaacatgatctcattcttttttatggctgtgtagtacttcatgatgtatatgtaccatattttctttattcaatccaccataaatgggcacctaggttgattccctgatgtttttattatgatagtactgcaatgaacatataaatgcatgtgtctttttggtagaacaatytattttcctttgggtatacacccagtaataggacttctgggttgaatggcagttctatttttagttttttgagaaatctccagtggctttccacaagggctaagcaaatttgcattcccaccaatagtgtatgagcatccccttttctctataacctcatcaattattttttgacctttaataatagccattctgactgttgtgaggtggtgtctcatttgatttgcatctctctgatgcaaatgttgagcacgttttcatatgtttgttggccgcttacacatcttattttcagaactcatcttttctaaatgaagtggcaacctcatgccctgatctgtgtaactggccttctcctccttagcctgcctaggattc

SEQ ID NO: 596998 - DNA, 574 bp, Homo sapiens
caaggcctgtaattttcatcttttgaaaatctttttaaaaaacacttgcctattgaaacaagcgtaagtaatgctgaggcatgtattaataactttwtctgttctgtttctatcacctcttcctactgcaatgtgcaatggatgatctacagtgtttctggtcatgctgttagtatatatagaaagggacaaattaacaggtatggagcatctgtgagtgaggcactgttctaggaaccttcaagatggtgtcatcaaactctcacagtaatgcagggtaagagtttggaaggcttcaaaaattgtcattatttttcccccactccacatatccatgccttttgtagtgtgcctttgtggctcttaccatcaagtagaatagtctatttctacacccacttgaatctgggctagccttgtgacgtgtttttaatagaatgcagcagaagtgacattctgccagttctgagcctaaacctgtaggaggtctagcatacttccatgtagccaccatgagaacaagcccaggccctctttttggaggatgaatgagagatgggctatagatgagcca

SEQ ID NO: 596999 - DNA, 472 bp, Homo sapiens
ggtatttattaccttcgttcttaatataatttttagcttttatagtttaagtattattaatggttgtatttaacaaccagcttgcaaaatttctgaaaatttaacagttgatgctttggagctagcgcaagccagctccagcattccactcactaagtgttatgaagattaaaaagaaataattaattttaaaatgcctaatagtgtcttggaggatcataggtcttaagtaaatcttcattttgtttcctcttatttcgtgttttattaagccccatcctactcctcggagtccatgacagcatctttagttttaacaccaattccaaagacaaaatagcttcatgcactgttktgaatattcagacaaactggtaagcaggatttacttactattattctgctaaaaagggtcagcttgaatataaagaagaaagacaccgacatctccatctaccttgtaattgtgtgt

SEQ ID NO: 597000 - DNA, 511 bp, Homo sapiens
ttaaactcctttccccctttccccatctaatttctgttatttgcatgtatctacacagtcaagatattaacatatcagcattagagtgttgtttctgtcccagcaccctaatactgacagtttattttggtcttatttgaagagttaaatgtattcagtgcactgtttttttgccatactttcctcagtcatctcataattgtcctctagtatttttctcaagaaagactccaaattacaatatatctgtaattcctatatgttcaaaaatattagtcagtggcctttataactaaaggacagtttggctgtatttaaaatctttagctcttaatttcattctttgaaaaccttgcaagtgttgctatattgtatttcagtggagaatttctctgtagaaaaatcggatgcaagkctgatttataccccatggttttgcatggttgcctaggcaattctttagagcgtgtgataaactttactaagacatgtctcagtattgactattttt

SEQ ID NO: 597001 - DNA, 592 bp, Homo sapiens
gtcactcgctgctggcaagacctccaggggatgcatcttaagttcctacttgtaaaatctccacagtacatttgtaatagcacttgcagacaagaggacctgtcctgcatgtggatcttatacatggtgctcaagtgattgcccattgatacacaatagaatagtacttcctatgaaaagtgttctctgctcccagaatcttgtcaggcagccaataccaccaatgcagattcattcaatagcagtaaggctttgcatctccaggagagctcctttaaagattaaaaacccctgacaggggtactcacttttgacagaatggataattagttggtgagctttccaaaaatagaggtaggcagaaaagaatgggacacagaagggggtgaattttgataagggagggagaatgtgcgaaagaacagcatttggggctttgctgaaggggcagatccktgcagatctgtgagggagcccttggaggccaagggcactgtctaacagaggccctgtgaagacatggagaaggggcagaaatcagacgtgagactgctgattttttatgtatttcccaacaaaagagaagcccaaa

SEQ ID NO: 597002 - DNA, 539 bp, Homo sapiens
gtttcctctggctgttttctacagagctgtgtgctagggaactgttattctatgaggtgctaatagataatcttaaaaggaacaatggtagactttataacataaaacagtttttttgtaacaggacattttagagccattactatgttaatttgcactgtgaatctccaaaaaggagatatggtgtataatatttcccaaaattatttaatcacaaaaacacaktagaagacacatgaaacacattagaagacaaatgattaacagagaagaaaaagcatttttaaaatgctagaggctaaagaataacaggtagaggcatattgcatttgggaatattttatttactatgaaaagtgttgtagggagccgaagtgagaatgcccaggaaacagtgcagtgtaggaggtgctgtctttcatgtactacactgggtgctgagcttgtggttaagtcagagttccagctctagcctggaaggtctactctaaataaatgcctgctggattcagcaacttaagtcaggtatatcaaggtga

SEQ ID NO: 597003 - DNA, 606 bp, Homo sapiens
ctcttctgtctccaaaattcctttaataccctagagaaaggtgactatttgagtcaagtcttgaaggatgggttgtagttttaaagcaggcaatagaaagataaaaagcccactggagagatggaacagcttgggcgaaggagtaggggtctgaggatggggtaataagagaggggtacagaattgagttatagaattagggtgtgggagagaggaaggagcaagacagaacaagctggcctaaaggaccttgcatgccttgcaactaacaatagctagtgccatttactgaccacctattaagtttcagtgacttttatttataatttactatcttatttaatattcataacaaccttacaaatagtcatcatcattcctattttacagatgggtaaattaagattcaaagaatcttttttgttttctcgtttgttttttggttggttttgttttgcttttcagagagtcatgtatctstctgtcatcaaagtcttgtgtgtttccaactgtgttggctaaaatacaaaagttatcatttaaaatccctctctttcagtggatcccaggcactttcatgattaagagcaaactccctaatatagc

SEQ ID NO: 597004 - DNA, 559 bp, Homo sapiens
ggatattgaaactatatgatttgaattggtttcagcttataaccatacatttgctatgaaaacatccaaaaacacaggtgaaataaatgtacatatcaatgagtaagaaaattggagacttttccagactatataattggaccatgtaaaagacaagataacttctaagattctttcaatcctgagctgtgcaatacaaataaagcaaaaattcactagcacgccacgtattacaccctggattgaactcaatcatactagaccacttaacctaggaattccaaacraaattcttgactcccaggctctctgagatatccattgtgtcagaccattagcctcagaagcatgctttggcttaccctagatcttacaaaaatcaaagtttggaatttcaaccaccgatctaggacttatatttcaacattctctcttcaacttagctttccactgtcagcaggtttttgcctgcaacataaagtgaccaatctactgatcaagaatgggtctgagatagactagatggctcccctgagcccatcaccagctgaagagaaat

SEQ ID NO: 597005 - DNA, 394 bp, Homo sapiens
acctcaaacctccccattcatagaagttaaaaatgtatgtataaaggaaagaaatcacagaacaaggagcttaggaagtaaactttgtaaccacctattggaagtattcacaaaacacaggaagggaatcggattcacaaatagaactgtttctctccatccaagcaaagtggaatagaagtttcgatctaagtaaccaagaaccaggcctcccaaattggatattacctcttctccccagcatagggaagatgatattcccataggattaggcaggtccctattattccaccccatagaaaataactgtcaaccatttctgctgaagacagcaagtctatttccaggctgcttarcttgactggcaagtcaaatacagggcagacatggacat

SEQ ID NO: 597006 - DNA, 554 bp, Homo sapiens
ggtatctgccaaatcaaattctctggatgagctaatgcccacccaagtggcaagttgaggaaaggagggtgctgttgacttacggtccatttctaatctgtcctgagcrttggtaaggccaggggctggacagtgggctattggagaggactccagtctcaggccaatgtactcggtacttccatcaggagggtatgtggcagctggcccttccatccacagtatcttttgggcagctatactgatcactgtgggaaagagagtttctgcggtgccagctgagttggtcttccctgtgtgagacacccaaggggagccatgggcggcctctgaggagaaaagtcttcttattgccttcatgtctttatgccccgacagcataaccactcagcagaattccacagttgctcaaggaggtaacactcccttgaagcagtggagtataatcaaacatcttggcccctcctgaaagccactcccacccatttcagtcccgataagttaaagatcttaagtagtttagacacatgcctttgctcaaggaaattcacaga

SEQ ID NO: 597007 - DNA, 546 bp, Homo sapiens
ggacttggagaacttttctgtctagctagaggwttataaatgcaccaatcagcactctgtgtctagctaaaggattgtaaatgcgccagtcagcaccctgtaacattgcaccaatcagcactctgtatctagctagaggattgtaaatgcacctatcagcactctgtaaaatggaccaattagccctctgtaaaatggaccaatcagcaggacatgggcagggacaaataaggggataaaagctggccactccagccagcagtgacaacccgcttgggtccccttccatgctgtggaagctttgttctttagctcttcacagtaaatcttgctgctgctcactctttgggtccatgccatctttaagagctgtgacactcatggcgaaggtccacagcttcattcttgaagtcagtgagaccaagaacccaccagaaggaaccaactctggacacatcttgtcaaccatgaagggactatcgccaagcagtgagtaccattgaacccctttcacttgctattctgtcctatttttccttagaattc

SEQ ID NO: 597008 - DNA, 536 bp, Homo sapiens
gaattcctgggtcaagtggggacttggagaacttttctgtctagctagaggattataaatgcaccaatcagcactctgtgtctagctaaaggattgtaaatgcgccagtcagcaccctgtaacawtgcaccaatcagcactctgtatctagctagaggattgtaaatgcacctatcagcactctgtaaaatggaccaattagccctctgtaaaatggaccaatcagcaggacatgggcagggacaaataaggggataaaagctggccactccagccagcagtgacaacccgcttgggtccccttccatgctgtggaagctttgttctttagctcttcacagtaaatcttgctgctgctcactctttgggtccatgccatctttaagagctgtgacactcatggcgaaggtccacagcttcattcttgaagtcagtgagaccaagaacccaccagaaggaaccaactctggacacatcttgtcaaccatgaagggactatcgccaagcagtgagtaccattgaacccctttcacttg

SEQ ID NO: 597009 - DNA, 545 bp, Homo sapiens
ggacttggagaacttttctgtctagctagaggattataaatgcaccaatcagcactctgtgtctagctaaaggattgtaaatgcgccagtcagcaccctgtaacattgcaccaawcagcactctgtatctagctagaggattgtaaatgcacctatcagcactctgtaaaatggaccaattagccctctgtaaaatggaccaatcagcaggacatgggcagggacaaataaggggataaaagctggccactccagccagcagtgacaacccgcttgggtccccttccatgctgtggaagctttgttctttagctcttcacagtaaatcttgctgctgctcactctttgggtccatgccatctttaagagctgtgacactcatggcgaaggtccacagcttcattcttgaagtcagtgagaccaagaacccaccagaaggaaccaactctggacacatcttgtcaaccatgaagggactatcgccaagcagtgagtaccattgaacccctttcacttgctattctgtcctatttttccttagaatt

SEQ ID NO: 597010 - DNA, 536 bp, Homo sapiens
gaattcctgggtcaagtggggacttggagaacttttctgtctagctagaggattataaatgcaccaatcagcactctgtgtctagctaaaggattgtaaatgcgccagtcagcaccctgtaacattgcaccaatcagcactctgtatctagctagaggattgtaaatgcacctatcagcactctgtaaaatggaccaattagccctctgtaaaatggaccaatcagcaggacatgggcagggacaaataaggggataaaagctggccactccagccagcagtgacaacccgcttgggyccccttccatgctgtggaagctttgttctttagctcttcacagtaaatcttgctgctgctcactctttgggtccatgccatctttaagagctgtgacactcatggcgaaggtccacagcttcattcttgaagtcagtgagaccaagaacccaccagaaggaaccaactctggacacatcttgtcaaccatgaagggactatcgccaagcagtgagtaccattgaacccctttcacttg

SEQ ID NO: 597011 - DNA, 532 bp, Homo sapiens
taaatcttttctatcttgctaggctgtcattttcctggtccttttgctagagaggacagacttctgttaagactttttgtttgttgtttgctcctgttgatgtttccaggtatcacctcttcacatcccgaagttcctaatagctctgtcttcttttctctaccttttagagccttcctaatctgtgtgtatatatatatatatatatatatatatatatatatatatatatatatatatatatatawaacgacaagggttttcagctgcgcttagtgtaatgaataatgaaaattatgggtagtccatattgctggaagtggaaaaacacattccttttgagatatctaagacatgcatttggagatgctcagtaaacagctgaatacatgagtcatgagttcagagcaaggtctggacaggagatataaatctaagagtcataatatatatggcatttaacaccatgatcctagatgaagtcactaagggagttactgtaagtagaaaagagacacccaaaacttagtgc

SEQ ID NO: 597012 - DNA, 526 bp, Homo sapiens
caagtcttaggcacaaagaacctgtctaaaattgagacaaaaaaaaaaggagagacaagaatctcttctggctatacgactaggttgagaataagtaacaaaagtggtagcctacatctagagmtgtgggagagtaaagtagagaagaactgctctgtggtttaagaatgcaacggctgctgaaatttcgggatagaagagaaacattgagaaaaatcttttggtttaaggtttccacactatgcacaaggtaacaacaaaccactacttcaagaattttaaggctgcgttgcactgaacataaatgtagcaaaaataaaacaaattgaatttaactcctgactagattgaatcaactcttgactccactgttggcctcagataatcaaagccataccaatttctgaggatagatactatttatattgtgctctattttttctcttatacaacatattcagcaatttttagagacagtgctttcctttgtcacctaggctggagtgcagtggtgtaattttggttc

SEQ ID NO: 597013 - DNA, 542 bp, Homo sapiens
caaatactgctcttttcccatggtctttgcaacaggcagaccaggagatttcctcctgtgcctggtttggcgggtcccacgcccactgatgcctgcttagtgttagtgcagcagtctgagatcgaactggaacgctgaagtttggcaggcggaggggcattcaccattgctgagtcttgagtaggmggttctatgctcacagtgtaaacaaagcagcagggaacctcgaactgggcagagcccactgcatctcagcaaggcttactgcctctctagattccacctctgggggcagggcatatctgaacaaaaggcagcagacagcttctgcagacttaaatgtccctgcctgacagctctgaagagagcagtggttctcccagcatggcattagagctccgataacggacagactggctcctcaagtgggtccctgaccccactgtagcctgactgggagacacctcccagtagcagccaacagacacctcatacaggtgggtgcccctctggggtgaagtgtccagaggaaggatcaggca

SEQ ID NO: 597014 - DNA, 585 bp, Homo sapiens
actggatgagatggtatctcattgtggttttgatttgtatttccctcatggttagtaatgagcattttttcatgtatctgttggccatttgtttatcttgagaaatgtctgtgaaggtcttttgctcatttaaaaatcaggttagttttttttttgctattaagttccttatatagtctggatattaaccccttgtcagatgtataatttgcaaatattttctcccattctttaggccatctsttcactctgctatttcctttgctgtgcaaatgtttattagtttcatgtaatcctatttgtctatttttgcttttgttgcctgtgcttttaacttcttaaattatattgctgtgtttgctctcctgttttctttgttcttctggtctactattttaaataatccctttactatttaatgaggctttgattacatgtgtttatattgtgccacattaaaccagcattcaaccctagatttgaatgcctcctctgttatgttcctgtgatgggactttgaagaagttacttaaactctataggcctcagttttggtcaacttaaaggggaaaaatagtattatat

SEQ ID NO: 597015 - DNA, 648 bp, Homo sapiens
gtatttggttttatttctgggttctctattccgtcccattggtctaagtgcctgtttttatataagtaccatgctgttttggtaactgtagctttgtagtataatttgaagattggtaatgtgatgtctccagatctgttctttttgcttagtattgctttgattatgtgggctcttttttggttccatatgaattttagaattgttttttctagttctgtgaaaaattataatggtattttgacaggaattgcattgtatctgtagattgcttttggcagtctrgtcattttcacaatattgattcttcccatctatgagcatgggatgtgaatccatttgtttgtgttatgtgtcatttctttcagcagtgttttgtagttttccttgtagagatctttcacctccttggttaagtatattcctagggttttctttttttttcagctgttgtaaaagtgatcgagttcttgatttgattctcagcttggttgtttttggtgtatagcagtactactgatttgtgtacattgattttgtaacttgagactctgctgaatttgtttacagatctaggagccttttggataagtctttagggtgttctatatatatgatcatatcattggagaacactgacagtttgat

SEQ ID NO: 597016 - DNA, 557 bp, Homo sapiens
aagtttttcaagttacccaatgagaaaaagacaaaaacaaaacaaaatgaacaaagcctccaagaaattttggattatgttacatacacaaatgtaagaataattggtgttcctgaggaagaagagaaatctagaagttttgaaaacatatttgggggaataatcaaggaaaactttcctggccttgctagaaatctagacatccaaatacaagaagctmgaaggaaacctgggaaatgcaacacaaaaaggtcatcacccaggtgcgtaatcatcaggttatccaaagtcaagacaaggaaaaaatcttaagagctgtgaggcaaagtcatcaggtaacctataaaggaaaacctattagattaacggcacatttctcagcagaaacccgacaagccagaagggatgggagttctatcattaacctcctcaaacaaaataattgctagccaagaattttgtattgagcaaaaactaagcttcataaatgaaggagagataaagtctttttcagactaacaaatgctgagagcatttgccactctcaagccagcact

SEQ ID NO: 597017 - DNA, 557 bp, Homo sapiens
aagtttttcaagttacccaatgagaaaaagacaaaaacaaaacaaaatgaacaaagcctccaagaaattttggattatgttacatacacaaatgtaagaataattggtgttcctgaggaagaagagaaatctagaagttttgaaaacatatttgggggaataatcaaggaaaactttcctggccttgctagaaatctagacatccaaatacaagaagctcgaaggaaacctgggaaatgcaacacaaaaaggtcatcacccaggygcgtaatcatcaggttatccaaagtcaagacaaggaaaaaatcttaagagctgtgaggcaaagtcatcaggtaacctataaaggaaaacctattagattaacggcacatttctcagcagaaacccgacaagccagaagggatgggagttctatcattaacctcctcaaacaaaataattgctagccaagaattttgtattgagcaaaaactaagcttcataaatgaaggagagataaagtctttttcagactaacaaatgctgagagcatttgccactctcaagccagcact

SEQ ID NO: 597018 - DNA, 410 bp, Homo sapiens
cccatgtgtgatagggagtcataattctgaagagttagaaaacgcaggttcaagtttcaacccttttactagataggaaaaaccaaactgcttttctttgtgctcatactcaacacacaactcttctgacatcaaatgttgggggcagtgggttcccacactagccaattctccaacttccagacaccaactgggtgttctacaatttaactcaatttttatactgtctacctggcaatagcatgagatcccataagttaagagctcagccccacaagactgctcccactttagatgccagtcacaagtccaggttgccacctatgcttttgactgagtggcagtaaatcagaggttcccacaaccccttcctygggtttaataatttgcttgaacagcttacagaattc

SEQ ID NO: 597019 - DNA, 619 bp, Homo sapiens
catgagatattttgatacagacatgcaatgcataataatcacatcagggtaaatgaggtatccatcctgcctcaagcatttatcctttgtgttacaaacaatccagttatactcttttagttatttttaaaatgtataattaaattatttttgactagagtcacccggttgtactagcaaatactgggtcttattcatatacctgtttgacatgtgtatgtcttcttttgagaaatacccattcagatattttgcccattttttaaattggggtattagatttttttmctatggagttgtttgaaatttatatttcctgattattaatcccttgtcagatagatagtctgcaaatattttctcccattctgtgggttgtctcttcactttattaattatttcttttgctgtgcagatgctttttaacttgaagtgatcccatttgttctttttgctttggttgcctgtgcttgtggggtgttactcaagaaatttttgcccagttcaatgtcctggagggtttccccaatgttttcttttagtagtttcatagtttgaggtcttagatttaggttttaaatccattttgatttgatttttgtaatatggtgaaagaagg

SEQ ID NO: 597020 - DNA, 613 bp, Homo sapiens
catacagcctaacaagattgaaccatgaagaaatccaaaacttgaacggactaataacaaataacaagagcaaacctttagtaacagttctcctagcaaagaaaagcccagtctctgatgaccaaacatttaaagaacaactaataccaattctactcaaactatttcaaaaaatagaggagagaatacttccraactcattctataagaccagtatcaccctgataccaaaaccagacagagacacatcaaaaaaaaacaaacccccgactacaggccagtatcactaataaatattgatgcaaaaattctcaatagaatattagcaaactgaattcaacaatatattcagaagatcattcatcatgaccaaatgggatttatcccagggatgcaaggataatgcacaaatcaattaatgtaaaacataatattaacagaatgaaggacaaaaaccatatgatcatttcaaatgatgctaaaaaagcattcaacaaaatttaacattcatgataaaaaccctcaaaaaagtgggtatagaaggaacatacctccacataataaaagccatatactacagaccaatcactagtatcatactgaatggggaaaa

SEQ ID NO: 597021 - DNA, 476 bp, Homo sapiens
tcccagccctggcagcttccacttcagacagggaaacagacaagacactggccatttccattcagagaggtgagagctggagtagagataagcttataggttataagcacacaaggagggattcctaacaacagtttcaaggcccaggaagaattctcagatgagttctaggtgagaaatgtttgtaccaagttgaatcaaatgactaaggcaaaaaagctaaagctgaagattaaaggcagcatagttgcccccaagtgttgctgcatttggggaaagatttgtttttttgtcatggtcatcacagctgttactattattatcttcatcaagcattcctctactcatgtargacattttcctggatcaaaaatttctcagtttccaggatttcttgggcagtcaggatcagagaaacctgggtttaaatcctggtactgctacatggtggtcattttgacctcagacaaatgact

SEQ ID NO: 597022 - DNA, 566 bp, Homo sapiens
ctgactcactgtgtggtcaggaccttgggtcaatcccttcacctggtgactcactccctacctgtaaggtgtggaggacagctggagtcactgtggcacctgtgtgtttagcagtgtgtttgcttgttcctgcttttatgtctctggctggtctaagatggaatgataaaaaaataacggaatgcactttgtaaacgagagcatcctagacacatgtaaagattggaaaattagaaagctgtctctactgtagttacttctcagatatgaccaaccattattaagaattcattggctaatagkgctacattttctcatgatcattcttctgttttagaagtgggcaactgcagttttaagaataaatgtgtaaatgtgtgttttcatgagagacaataaagctgttttcattaagaatgaaatatgcaacttgcaaacacttttacttttcttgaattgggtccttcagcagaagcagtttgcccagccctgacatggaaagtttactttgctcatcaacctgaaggagaccgaaagctatgagaggcggctcctgaaaagaatct

SEQ ID NO: 597023 - DNA, 485 bp, Homo sapiens
aggtaaatgtatgtttgagattactagataactgttgtacaaattggtatgtcacttaaattgttttctctcagaaagtccacataaattaatgaaatagactactagtaatataggtagaaaaaaacacccttaacattatttccatagataaaactaattagaactgtaaattctagggagattatttatctaaactaattttaaaatcagaagttaaggcaggtgttttagatggctcattcacaactatctttcccctttaaatatgatttattgtctttctcatacacagatgtattgcttggtaaaagattggcctccaatcaaacctgaacaggctatggaacttctggactgtaattacccagatcctatggttcgargttttgctgttcggtgcttggaaaaatatttaacagatgacaaactttctcagtatttaattcagctagtacaggtaaaataatgtaaaatagtaaata

SEQ ID NO: 597024 - DNA, 485 bp, Homo sapiens
aggtaaatgtatgtttgagattactagataactgttgtacaaattggtatgtcacttaaattgttttctctcagaaagtccacataaattaatgaaatagactactagtaatataggtagaaaaaaacacccttaacattatttccatagataaaactaattagaactgtaaattctagggagattatttatctaaactaattttaaaatcagaagttaaggcaggtgttttagatggctcattcacaactatctttcccctttaaatatgatttattgtctttctcatacacagatgtattgcttggtaaaagattggcctccaatcaaacctgaacaggctatggaacttctggactgtaattacccagatcctatggttcgaggttttgctgttcggtgcttggaaaaatatttaacagatracaaactttctcagtatttaattcagctagtacaggtaaaataatgtaaaatagtaaata

SEQ ID NO: 597025 - DNA, 485 bp, Homo sapiens
aggtaaatgtatgtttgagattactagataactgttgtacaaattggtatgtcacttaaattgttttctctcagaaagtccacataaattaatgaaatagactactagtaatataggtagaaaaaaacacccttaacattatttccatagataaaactaattagaactgtaaattctagggagattatttatctaaactaattttaaaatcagaagttaaggcaggtgttttagatggctcattcacaactatctttcccctttaaatatgatttattgtctttctcatacacagatgtattgcttggtaaaagattggcctccaatcaaacctgaacaggctatggaacttctggactgtaattacccagatcctatggttcgaggttttgctgttcggtgcttggaaaaatatttaacagatgacaaactttctcagtatttaattcagctagtacargtaaaataatgtaaaatagtaaata

SEQ ID NO: 597026 - DNA, 580 bp, Homo sapiens
gaaaatatggttgttccatatgcagctgaatgtcttaagggaaagatctgagaaggctgcttggaagaggagcattggtatcaagagaagagagcatactctctgctgacaggagtgggtgtggagaggtggggtatccctggtttatggggcaaactacttggttgataattcaaagagagttgaagaaagttcatctgggaattgtgatggaataacccagatcctgggagtcaataaaggtaaaggagcttgacctggagcacctaggaaggtgggtcagtgcatatttcattcccagtcatctgtggtgaggtcaaggctccagggtgcttacaaaagacatgtgcatatgtggatggccttggagacagacaggttccctagtgggtggcccaaacctcttgcctcttcttgcattgtgtgtgatgggctagagctctagattaaatccatgcctatgagcactgtcactaagagaagataagaactatgagcagagatgcttatctttatagctrttctggtttgatttatatatatatatattgtgtgtgtgtatgtgtgtgtgtgtgtgtgt

SEQ ID NO: 597027 - DNA, 580 bp, Homo sapiens
gaaaatatggttgttccatatgcagctgaatgtcttaagggaaagatctgagaaggctgcttggaagaggagcattggtatcaagagaagagagcatactctctgctgacaggagtgggtgtggagaggtggggtatccctggtttatggggcaaactacttggttgataattcaaagagagttgaagaaagttcatctgggaattgtgatggaataacccagatcctgggagtcaataaaggtaaaggagcttgacctggagcacctaggaaggtgggtcagtgcatatttcattcccagtcatctgtggtgaggtcaaggctccagggtgcttacaaaagacatgtgcatatgtggatggccttggagacagacaggttccctagtgggtggcccaaacctcttgcctcttcttgcattgtgtgtgatgggctagagctctagattaaatccatgcctatgagcactgtcactaagagaagataagaactatgagcagagatgcttatctttatagctattctggtttgatttatatatatatatattgtgtgtgtgtrtgtgtgtgtgtgtgtgtgt

SEQ ID NO: 597028 - DNA, 470 bp, Homo sapiens
atttactataaaagaggtcatataagtaaataggaaaaatgtactaatagtaaaatggcttacaaacatgcacagaaaatttactaaaaagaaaattacagagagccatctgcactcccatgtttattgcagcactattcataatagctgagatacagaatcaacataggtgtccaacaccagatgaatgaataaagaaaatgtggtatacaaacaccatggaatactattcagccataaaaaagaatgaaatcctgtcatttgcagcaacatggatagaagyggacattatgttaagtgaaataagccaggaacagaaagttgaatgccacgtgttctcactcgtgtggaagctttaaaaagttgatctcttagaagtaaaaagaagtacagaggatactagatgctggaaatggtagggggaagggaggggtagggaaagatgtattaaagaatacaaatgtatggct

SEQ ID NO: 597029 - DNA, 541 bp, Homo sapiens
gattacaggtgtgagcctctacaccgagcagataccttattattaactaaactctatagttcatattargttttattattcgtgttgtacattctatggttttgacaaatgtaaaatgacatttatccaacatagtgtcatacagaatagtttcactaccttagaaatcccttgtgttgcaccaattcatccctccccgcaagcccatacactggaaaccatagatctttttgctcagtcacccaggctggagtgcaatggtgcagtcatagctcattgcagccttgaactcctaggctcaagggattctcctggcccagccttctgagacactgggactacaggtgtgtgccaccgtacccagctagttttattttttaatttttagtagagatgggtctcactgtgttggcgagattggtctcaaacttctggcctcaagctgtccttctgccttagcctcccaaagtgctgggattacaggcataagccagtgtgcctggcctatcatagctttgccatttccagaatgttgtgtata

SEQ ID NO: 597030 - DNA, 541 bp, Homo sapiens
gattacaggtgtgagcctctacaccgagcagataccttattattaactaaactctatagttcatattaggttttattattcgtgttgtacattctatggttttgacaaatgtaaaatgacatttatccaacatagtgtcatacagaatagtttcactaccttagaaatcccttgtgttgcaccaattcatccctccccgcaagcccatacactggaaaccatagatctttttgctcagtcacccaggctggagtgcaatggtgcagtcatagctcattgcagccttgaactcctargctcaagggattctcctggcccagccttctgagacactgggactacaggtgtgtgccaccgtacccagctagttttattttttaatttttagtagagatgggtctcactgtgttggcgagattggtctcaaacttctggcctcaagctgtccttctgccttagcctcccaaagtgctgggattacaggcataagccagtgtgcctggcctatcatagctttgccatttccagaatgttgtgtata

SEQ ID NO: 597031 - DNA, 597 bp, Homo sapiens
gatcctggacagtctttcttttcttttcctatcttttctcttactcttttttcatattaaaaaaattttaatagtctttattttctctagtttatccaaataaaaaaataatcctttagaagaaataaataaatacataaataaataaataaataaagtatggtctggaggctcctggagacccacaagatgctgaaaggggttccgtcaggtcaaaactatyttggtaaaaataccaagatgttatttgcctttttcactctttctcatgagtgtagagttttccaaaaactacttgcaacagatacatgcagaagcacataagggaatccaggggctttctattaaagtagaccgtaaagagatttgccagattgtaaaactatgtcataattctattttcttttgttttggaaaatatatttctgatacatgaaaaatgttaattatattaacatgtaatggttttatattatcattgaatgaattaataaatactttttaaaaataaccggttttggcttggtgtggtggttcatgcctcagcactttgggaggccgaggcaggcgatcatttgaggtcaggagttcgagacc

SEQ ID NO: 597032 - DNA, 532 bp, Homo sapiens
ctcttcctcttggcttactccttttctaatggagatgctcgttctcttcttacctaaagcattgtaaattgagtttgggtctgaaaaattcaaaagtgttatgtgtggtttcagaytgaaggggttggaagtcagaaactttggattttacaaattaaggaaccagaacatgtactaaggatttgctgtgaaaattggatgtgagaacattcctctaaacttctcattggatggggtggtagacttcgcatctccccaacccttctctcaatttctccatcctcctgtatgtctagtctagctactggaggaacatagatcactttatttggatatgctggtaaattggctgtccagaaagaaaaaaaaatcttcagtttgtggtatttgctgatttccatggagtaaatgctgctaccatgggcagtttcaattactaatgtaatattactgaactccaagttgggacgagaagaacatactgtaattggctctcacaagctgatttaagcagtttcccagcacatctgtt

SEQ ID NO: 597033 - DNA, 532 bp, Homo sapiens
ctcttcctcttggcttactccttttctaatggagatgctcgttctcttcttacctaaagcattgtaaattgagtttgggtctgaaaaattcaaaagtgttatgtgtggtttcagattgaaggggttggaagtcagaaactttggattttacaaattaaggaaccagaacatgtactaaggatttgctgtgaaaattggatgtgagaacattcctcyaaacttctcattggatggggtggtagacttcgcatctccccaacccttctctcaatttctccatcctcctgtatgtctagtctagctactggaggaacatagatcactttatttggatatgctggtaaattggctgtccagaaagaaaaaaaaatcttcagtttgtggtatttgctgatttccatggagtaaatgctgctaccatgggcagtttcaattactaatgtaatattactgaactccaagttgggacgagaagaacatactgtaattggctctcacaagctgatttaagcagtttcccagcacatctgtt

SEQ ID NO: 597034 - DNA, 599 bp, Homo sapiens
ttaagtctgtctttagggatttttctattgtattactctttctaaagattcaacttttattgagttwattttccttattgtctatttaatattttacttgtttctgctcttatgaccgtctattttgggtttaatttgctcttctttccatagcttcttaacatagaaacgtggtcattttaaaagcttcttttctaatacaagatttaaaactttaagttttcctctaaacactgcttagctgtatcctataaattttgttgtattttcattctgtctgcctagaacataacattttcaaatttcctttgtgtttttttgtcatttatttgtttatttataaatttggtgtttaatttcaaaatttggggagctttcttaatctattgtaatttatgtacaatttaattacgttgtgttcagagaaactactgtgtaatatttcaatctttaaaaatgtgttaacatttactatatgcagaatccatcatatggtctatttttgtgaaaatctcatgtattctttaaaataatgtgtatcctgaggttattataaataatgttctatattatatataatgttctataaaaccaccttg

SEQ ID NO: 597035 - DNA, 592 bp, Homo sapiens
ttgggagacaattctctatgtgtctctcatatttttgggcatctgggcaagaggctttcacatctttgttctgtttatatgcctaatatctccttccaggtcaggtgacagatttgtttcctaaccaggatgataaatwtaattttttccttcctgagaaatattaggcaggtttgctagcattctccctataagattgagggtttcctaagctgagggtatctcaactactgtaacacaattctactgcatgtgcagtatctatgtaggcccacatcctcatcaccatatggtacttggaaacaggatatcagtatgaacatgaagctcatgttgcctgctgtggcctgggtagtaaagtcttttgtttctgaccccgtggtctcatgtcttctaccagcacatacaaaactgtagacagggtaatgcattagcttgcaggcagggtaaaatctcagacccttcaaaattcttgacattcaatttttctctacataatttaagagattaaggtgagatgatttctcaggttcttttcatgtttaatctttgatattctaagtggctctgtcattttcatcattgttgcaga

SEQ ID NO: 597036 - DNA, 592 bp, Homo sapiens
ttgggagacaattctctatgtgtctctcatatttttgggcatctgggcaagaggctttcacatctttgttctgtttatatgcctaatatctccttccaggtcaggtgacagatttgtttcctaaccaggatgataaatttaattttttccttcctgagaaatattaggcaggtttgctagcattctccctataagattgagggtttcctaagctgagggtatctcaactactgtaacacaattctactgcatgtgcagtatctatgtaggcccacatcctcatcaccatatggtacttggaaacaggatatcagtatgaacatgaagctcatgttgcctgctgtggcctgggtagtaaagtcttttgtttctgaccccgtggtctcatgtcttctaccagcrcatacaaaactgtagacagggtaatgcattagcttgcaggcagggtaaaatctcagacccttcaaaattcttgacattcaatttttctctacataatttaagagattaaggtgagatgatttctcaggttcttttcatgtttaatctttgatattctaagtggctctgtcattttcatcattgttgcaga

SEQ ID NO: 597037 - DNA, 605 bp, Homo sapiens
gagtgatgtaataaattttagggactcagaagggagaggtggaagggagtgagggataaaaaagtacacatgtgtacaatgtacactacttgggtgatacgtacagtaaaayctcagagtacacctctatacaattcatgcatataacaaaaaaccacttctaccccaaaaactattgaaataaaaaatatacaaaataaaagaaaaagaaaaaaatagttggtataataatcaccaccagtggttataattgaacttctctcttcttcctctctctttttctttctttttttaaagtttttatatacagaaagggtctcactatgtcgcccaggctgattttgaactcctgggctcaatcaatcctccttccttggcctcccagaatgctgggtttacaggcatgagcaaccacacccgaccttactctctcttttttttcctgtaattaatttcacctatgcttacttacaggtgaaattacaggctcaaaatttcccaaatttggtatataagcccttctcaagctgtattcttttgaaatgaactcattgatatttaaagcctcctttgtctctggcataaaatatccaagactgatttta

SEQ ID NO: 597038 - DNA, 605 bp, Homo sapiens
gagtgatgtaataaattttagggactcagaagggagaggtggaagggagtgagggataaaaaagtacacatgtgtacaatgtacactacttgggtgatacgtacagtaaaacctcagagtacacctctrtacaattcatgcatataacaaaaaaccacttctaccccaaaaactattgaaataaaaaatatacaaaataaaagaaaaagaaaaaaatagttggtataataatcaccaccagtggttataattgaacttctctcttcttcctctctctttttctttctttttttaaagtttttatatacagaaagggtctcactatgtcgcccaggctgattttgaactcctgggctcaatcaatcctccttccttggcctcccagaatgctgggtttacaggcatgagcaaccacacccgaccttactctctcttttttttcctgtaattaatttcacctatgcttacttacaggtgaaattacaggctcaaaatttcccaaatttggtatataagcccttctcaagctgtattcttttgaaatgaactcattgatatttaaagcctcctttgtctctggcataaaatatccaagactgatttta

SEQ ID NO: 597039 - DNA, 605 bp, Homo sapiens
gagtgatgtaataaattttagggactcagaagggagaggtggaagggagtgagggataaaaaagtacacatgtgtacaatgtacactacttgggtgatacgtacagtaaaacctcagagtacacctctatacaattcatgcatataacaaaaaaccacttctaccccaaaaactattgaaataaaaaatatacaaaataaaagaaaaagaaaaaaatagttggtataataatcaccaccagtggttataattgaacttctctcttcttcctctctctttttctttctttttttaaartttttatatacagaaagggtctcactatgtcgcccaggctgattttgaactcctgggctcaatcaatcctccttccttggcctcccagaatgctgggtttacaggcatgagcaaccacacccgaccttactctctcttttttttcctgtaattaatttcacctatgcttacttacaggtgaaattacaggctcaaaatttcccaaatttggtatataagcccttctcaagctgtattcttttgaaatgaactcattgatatttaaagcctcctttgtctctggcataaaatatccaagactgatttta

SEQ ID NO: 597040 - DNA, 605 bp, Homo sapiens
gagtgatgtaataaattttagggactcagaagggagaggtggaagggagtgagggataaaaaagtacacatgtgtacaatgtacactacttgggtgatacgtacagtaaaacctcagagtacacctctatacaattcatgcatataacaaaaaaccacttctaccccaaaaactattgaaataaaaaatatacaaaataaaagaaaaagaaaaaaatagttggtataataatcaccaccagtggttataattgaacttctctcttcttcctctctctttttctttctttttttaaagtttttatatasagaaagggtctcactatgtcgcccaggctgattttgaactcctgggctcaatcaatcctccttccttggcctcccagaatgctgggtttacaggcatgagcaaccacacccgaccttactctctcttttttttcctgtaattaatttcacctatgcttacttacaggtgaaattacaggctcaaaatttcccaaatttggtatataagcccttctcaagctgtattcttttgaaatgaactcattgatatttaaagcctcctttgtctctggcataaaatatccaagactgatttta

SEQ ID NO: 597041 - DNA, 493 bp, Homo sapiens
atgtaaaatagttcatgagattaatagcagcactctcagattattgaaattttctctagtttatgtgtgtcttgttaaatgaatgcaactaagtggacaaatgacttcggaagattccttcaagggaaatgcagatttaaaataattcaaataggccagccatggtggttcacgcctgtaatcccagcactttgggaggccaaggctggcagatcacctgaggtcaagagttcaagaccagcctggccaacatggtgaagccccgtctctacaaaaattagccaggcatgatggtgggtgcctataatcccagctactcaggtggctgaggcaggagaatcacttgaggctgggaagcaaaggttgcaatgagcagagattgtgccattgccctttagcctgagcaacagagcaagtytccctttccaaaaaaaaaaaaaaaaaaaaaaaaaaaagataatttaaatataaggagaggagaccagtaacacaa

SEQ ID NO: 597042 - DNA, 599 bp, Homo sapiens
tatagttactttggagaggaataggtatgaaaacctaaaactgtcactaagaacagaggacattctattaaaatctttgtaataagtggccaggtgctgtggctcacccctgtaatcccagcactttgggaagccaagatgggaggattgcttgaagccagaagttcaagaccagcctgagcaacatggtgaaaccccatctctataaaaaatacaaaaattagccaggcttggtggtgcacccctgtgggcccagctactgaggaggctgaagtgggagaatcacctgagcccaggaagtcaaggctgcagtgagccatggtcatgccacggcactccagcctgggtgactgagtgaaacccygtctccaaaaaaaaaaaaagttgtaataagtgtctggaaaaatttttaatgagagggaggtgcggcagcctgaagatcttctggaataaggaatttatttacctctttactatagtgcagaaaaggagtttcttgatcacttgcctacctttatgaaagaattagggcacagttttatttttgacctactatattaccaaattgaaaaagactaaataagaaatttagaaaatta

SEQ ID NO: 597043 - DNA, 559 bp, Homo sapiens
tgaaaatgttcttagtttttgacacagctatcctaaacaggaatttatttttcagatgtacatgcagaagatccaaagatatgtgtctggtaatattcttgcagcatattcatattatggacatactgggaacaatctaaaaatctatcaacaaatgattgactgaatgacatattgtacaggaatttacaagatgaagtcaatttgacataatgtaaacatgggaagacattcaagaccaattgatatatggaacaaaaggtgtaaaacagcttggataatatggttctttcttagtctaaaaaagagaaaaacactacaaatacatgtttagaaaaataaatactgtggaaattaataccaaattataagcaatggttaataaaatagctacagataattttcatttttatgtagtatatctctataatattgtattggacttttttcttttaaatgaggtcttgktatattgcccgagctagtcttgaactcctgggctcaagcaatcctcttgcctcagcctcctgagtagccgggattacagaagagtgccacc

SEQ ID NO: 597044 - DNA, 613 bp, Homo sapiens
ttgctctacctgtgtttcataacaactctagcagtcacttctgccagtaacttggtccacaacattcttcctctctggaactctcttttgttctctctctactcgtatagattctatccacccataaaaccctcacctcttgtgattttccagtcactgtaacaggctttccctgttttcattggtttcatcattatataggcatggtaaggccaacatagcaagagatgattgccatttgaaaaggttgtttgtacattgtaattcccaagacggggaggcatgctatgctgtgggactatgtatggagaagcaccagggtcagttaggaggcagagtgtgaggggaacccaaaggcaagagcctttaatgtggttttcatgaggtggaatggggaaggagtaagcaggcttaggattggctagcatgaatgattttagctggctctggggcatagaggctgtgcctagttgtctgatacctggccctgggataataagggcatgtggagagcggcctggastatgagatgccaataagagaggtagctggaagtatgagctctggattagttggtttgcatttgaaagccatgctcaggccaagttattta

SEQ ID NO: 597045 - DNA, 453 bp, Homo sapiens
gaaaaaaatatatttctatgaacagtctttatagctttaataaaccctcattgagcatccaccaagtgccactcacattaatccctcattggccaggcatggtcatgtaagtctgtaatttcagctattcaggaagctgaagcagaaggattacttgagcccaggagtttgaggctgcagtggactatgatcatgcttgtaaatagcctctacrctccagtgtgggcaacataatgagatcctgtctttaaaaaacaaatcaagacaaaacaaaatgccaaatcataaactctgtctacttgtaacttaaaatcttctggagaagacaaatacatgtcaatgtgaacttttataagaacaactaagtataaatatgtgttgttttgagatcctataataggagcaagaactcagggaggtcagaaaaggcttccttgagaaaaaaacacttaa

SEQ ID NO: 597046 - DNA, 506 bp, Homo sapiens
tcatacaacttgaatggaaaagaggccgacagatacattcggtctattttccagagcctgaagctcctaggaaagaatatgaattaactcagtcaatgtggctgggtgaaaattacactatgtaaatagatgtcgggaaaattaatagattatcctcatacttacatcactgtgccaattattagaatccaaaataaatatctagaaaggtttctagttataaaatctcagattgtatagattactttttcttttgcacaaattttgggagttgaactgcctcttttaccatacccatgcccccaaatcaaggtcctagcatcctcaataagaatttgttcttttaggtagcatttttgttgttgttgttaaagcttgagatttcaaactgaattgctctgcaagggttttctcatcttaggtataataacagagtggtgaagktgaggtatgggaattcattgagttgatgttaaaaaagtccttcaggctatgggagccctgat

SEQ ID NO: 597047 - DNA, 551 bp, Homo sapiens
aacagtattttgtatatatatattacacatatgtatgagtctatatatgtacatattacatgcatagagaaagctctaaaagaaaaggcactaaggtattacaaagaggatatccaggtggagggaatgtaaagttttatttttctcctgcctatattagttttctacatcacacacatactatatctgtaataataaacatatttttaaagagcaagtaaatgaaaaccaggaaaatataccatttgtattacaaggaacaccaaaattttggccrtaagtccttcaagaggacttacgaatcataaattgctttgactccttttgagcaatgctcttaccatcatatataaagaatctttagggatgtgcagccacatatgttgatgctgaggcctgatttataataaacactaaatatgtcagctaggtcaaccactcaccatggtgtctggttaggtctggatgagcatgaatttaagtatattgctattcattcatacctcaaatccacctcatttacgtgtccctgaaatttgtcagtaatggtt

SEQ ID NO: 597048 - DNA, 634 bp, Homo sapiens
gttgatgaaaaacctccaatcaagcagataagcaaaaaacagaattggtataaacagccaagagcattccctgataggtaaacttccactaaataaactctaggtctgtttgaccacaattgggtccccagtgacggctatgtctttgtcctcacatactcctcttcacartcttccattgtgcagagaccaaaggagaaaagtaaatgatctgtataggattctgaacttcaggatccaccagaaaatgttgctactttgagagttggtttaaagtctccagaagagactttaaaagaaaatgattcagaatacttgattttctccacatgtcattttaaaaagatgtaactcctatgctttttggctctgaagtaaaaataaatcagcagtccctcaaattaaaattttcttgcacatagtgttacatgagggggcaaacagaagttttcttctatgctgcttcatttccttttttcttagaagagagatgaatttaggagctatctcctgcaaagtgacacatagcctcatgactatgaagctgaatttctagaagtagagaaacatgttagaagagaaaaaaaattctaaaaatttatatttacacattctctggcaccatctgatcaaa

SEQ ID NO: 597049 - DNA, 564 bp, Homo sapiens
atttatgttcttctctaaactggttattctagttagcaattcctctaaccttttttcaaggttcttagcttccttgcattgagttagaacatgctcctttagctctgaggagtttgttattacccaccttttgaagcctacttctgtcaattggtcaaactcattctccattcagttttgtttccttgctggcgagaagttgtgatcctttggaggagaagaggcattctggtttttggaattttcagcctttttgcactggtttttcctcatctttgtggatttatctacctttggtctttgatgttggtgacctgcagatggggtttttgtgtgggcatcctttttgttgatgttgatgttattgctttctgtttgttaatttttcttctaacagtcaggcctctctgcttcaggtctgctggagtttgccgaaggtccactccagaccctgtttgcctgggtatccccagcgaaggctgtaraatagcaaagattactgcctgttcctgcctctggaagcttcatcccagaggggcactcactggatgccagctggagctc

SEQ ID NO: 597050 - DNA, 457 bp, Homo sapiens
tgcactgagtacctggaagggcaacatatttgctttcaaaatttacttcatcaacaaatttctcctttacttatatgacgacaccttctgaacaaaaactattcttcttctcgtgttcttacagcgactgaaacttgaacaagactggcaaaatactgcaacactcaaacctagctctatccttctccagagccctagaccatcctctcagacttctgcattaaacactgcagagtggaattctttagccaaagtccacctgccactcattcacaatgtttcttcgcttatattatcatcsgagccataactggaatttgccacctggaagaagtcacgtaagattcacatatcctaaaaagctgacttgccaaaatatagcatcttccccatcagtattaacataactcctccttaagaaatttttgcctaaccccaagtcaagattttctgctag

SEQ ID NO: 597051 - DNA, 577 bp, Homo sapiens
tgggcctttcttcatggttgtttgggcttccttacggcatggctgcaaggttccaaggagtgttccaagaagataagtctcaatgagcaagtgcttatcaaacctctgtttttaacttgcttgctaatgtctcattgaccaaagcaagttacatggccaagaccagcygtcaacatggtatgggacaactggagggcatgagtactgtccaccaactgtctaccacagtgcacttcttgaacaacatttgaagttggggagcctctggaaaaatggaacacttgttcaaagacccaagacttagaagagaaaaagaacatatactctgtgcatatgtgatctgggtctcagaccgtttataaaatatacattatcttaagataaaatgttagtggaaaaaattaaaatgatgagatattttctattgttgatttctatcttcattgactcatggatagagattaacggtaaaacaatgatttgaatttatgaacagtttcacgtcttctatttcccacatcatctagccaagttctttgtatatagtaagaagtctaagtatttgctgagtgaattt

SEQ ID NO: 597052 - DNA, 583 bp, Homo sapiens
ccaatgataccatcctcgtttcttctgtggcatgctccccacttcaatccttccttcagaggccccaaaccctcctggtctctccttgtcaccttgtgaaaatctgatcttcagggaaaaattccttactatttatactagtataatgtgaatcttctatgggattttaagaaagttcaaagccttggtttactcagcaaatatttagcttgcactcactatgtggcgggcatcctaatgayggagtatatgtaaagacaaaaaaagtttccggacctcaaagtgttctccatctataggggcagatgactgagttgacatctcgagaagtagaatagcagagtggctaagagtgccagctctgtctcaatcacctaggtctcacctcagcattaatttcactttcctcattgtaaatgagcatatctcttagaattgggataagcattaaataatatagacttggaatgaatttgcttagaactaattccatgcacaagtttatcacagcctaaggtttggtctagaccagaggtctgccaagtatgacctgtgggctcaatctgtcccactacctattgtt

SEQ ID NO: 597053 - DNA, 617 bp, Homo sapiens
gcatatctcttagaattgggataagcattaaataatatagacttggaatgaatttgcttagaactaattccatgcacaagtttatcacagcctaaggtttggtctagaccagaggtctgccaagtatgacctgtgggctcaatctgtcccactacctattgttgttgttgctgttgttttttaatgacctgtgagctaagaatgggttttactattctaattagttacattctcaatggttatttaagtacctccataatatcctcaattttgcctaaaatatttaccatctggccctttacagaataagtttgctgacttattggtctggaccaatgctatctaataaaactttctgcaatgatgaaaatgktctctatctgtacccttgaatacagcagccactagcctaatgtggctttttgagctcttgaaatatagttagtgtgactaagagattgaattttaattaatttaaatttatggagccacatgtgactatgacattagagcagctctagacagcctgaagtctaaagactctatgctttgtcggtgctcccctctctcaattgaatcaactaccctgaggctgcatgagtcaaggggaaggccac

SEQ ID NO: 597054 - DNA, 393 bp, Homo sapiens
ctttgccatgcatgctgatttaaaaacctaacccctatggcagatatgagtccactagtcataaacattttaatctggcttcaaagagccattatataactacactaaaatttaaatatgaaaacttgatgcaattcaattggctattgttatctaaaggtgtttctgtcttagaaaacaaaatatactgcaagttataatttcacttaaaagatgctttaagttattcttataagtacaatgatttgaaacacttaaacacrtaaataataaaatattcaaactccatttgcactgtcatatatactgatcctaattacaggctacagattttcatctaattgcgaacagtaagtcagctcttgaataattaggaagaggatgggatgcaac

SEQ ID NO: 597055 - DNA, 533 bp, Homo sapiens
tactttatgttatgggttatatgtataaaaaaattttaaagtaaaaaaaagaaaagcttccattacaaatgttttctcttgagaggagtctggtaaggaaattccattccaatmttgcagcctgaatttaacataggaataaagttatcttcacttgtggacgtgcatctagcatttgttttgttgttatttttctttggcctgaattataaaactaaaggcctaaaattgttcggtggccagatgctttgtctagaatcagcagattaatttaaggggagtggtgaacactaagatttggtataaacttgtgtgtgtgtgcacacacgtatgtgtatgtgtgtatgtgtgtctgtgtgcattgctctgagaagaggatccattgctcccatccaattttcaaaggatctgctgtggaacaaagtaatccaaaatctagtagaataaaacaacaagcatttaattaggctcacaacactgagtctggaattcaagcagggcacagagggaatgacttgtgtctgcccagtgat

SEQ ID NO: 597056 - DNA, 555 bp, Homo sapiens
tgcaatctccctccagtgtcctccattgacaaagacgaacatcatgccaggtggcaaaaaatatttacagggcccagatataaaaatcacagggtgatgaagagcacacttcaagttgagaagcatcaaattgataactgacacactatctaacacaagagtaaatgggtttatggaattaaatgaggaattcctaaattttggatgagttggagttttctaggtggataatttgaagagggacatttatgccgcatgtaaaaacaagttgtagagttgcgagaacrttacattgaagggattataaataattctgaaagattgtagttatctatgaccattagaagccccaagtatgagccccaccatgtgcaattataaatgacattttacttttacctagctagcaatttcttagaaaaggaaaagaaataaaagacattaagagaagaaaaatcttatttttcaaaacaacacaatacctacctgaaagtggaaattaaaatagctttttctagacttatccaattataaagttatggatagattcatttc

SEQ ID NO: 597057 - DNA, 475 bp, Homo sapiens
agaaatttcagactttagtatgccattttaaggatataggctttggagtcragtaaaataaagtacattggatgaaaagttttgggaaaaattttcacagatacacccccacactcattaacaaaaaggagaaaaataaaacctggaaaaaagcaaagaaattcccccaaatgtctgagactgtctatcttttttctgttctttcttttagagaaattcaaatgttggatggtaatggagccaatcacaaatgggagacattttttgtagctattcacctgctttccaaaatgtgcttaaaatttaaagactttttcagatctacttttcaatacatgcttttaataacttaatttttagttctttactgtacacttacctgcaagatagattacttagtgttgctatgtgtattcgttcatttttacactgctgataaagacatacctgagactggaaaaaaagaaggtttaat

SEQ ID NO: 597058 - DNA, 470 bp, Homo sapiens
aaatatccaagttctcacattgggactgactaggcaaacaactcaaaccacagagaacgaagaaaagcagggtggggcgacggcccacccaggagcagcacagaggcaaaggaacctccatcccaagccaagggaagcagtgagtgattgtgcaaccccacccaggaaaccatgcttctcccatggatctttgcaacctgtggatcaggagatcccctcrtgagaccatgtcaccagggccttgggtctgatacacagagttgtgtggatgctcagcaaagcagctgcacaagcacacacagagatccaggagctttatatactccagccccaggaatcctggcaaggtgggagatctgtccagacattcccctaggaagggggctgaatccagggagccaagcagtgtcattctgcaggccctacttccagggcacctcacaagttaaaacccactggcttggaattcc

SEQ ID NO: 597059 - DNA, 583 bp, Homo sapiens
cattctgcaggccctacttccagggcacctcacaagttaaaacccactggcttggaattccagccagccagtggcaacaggccagagactacctaagatgggaccaagttcctgtggggaggggcagccgccatatctgtggtttggtcaactcagccattacatcctgctggctctggagagtctaggccgtcaagatgaggaaaagtgctgcccaaccccaatgcagcacacctgctctaccaaaaagcagccagactgcttctttaagcaggtctctgatcccattcctcctgactgggttagacctctcaatagggttctccagacacctcatacaagagcatttgggccagcaacatgtcataccctctgtgacagagctttcwtagaaaggtgcaggttgccatttttgctattttgcagccttcactggtgatagctccaagtacaagaaaggtctggagcaaacccccagaaaaccacagcagccctaaggaagagtgaccttcctgttaaaagaaaaacaacaaacagaaaacaacaactactacaatatcaacaaaaggatcctacaaaaacc

SEQ ID NO: 597060 - DNA, 583 bp, Homo sapiens
cattctgcaggccctacttccagggcacctcacaagttaaaacccactggcttggaattccagccagccagtggcaacaggccagagactacctaagatgggaccaagttcctgtggggaggggcagccgccatatctgtggtttggtcaactcagccattacatcctgctggctctggagagtctaggccgtcaagatgaggaaaagtgctgcccaaccccaatgcagcacacctgctctaccaaaaagcagccagactgcttctttaagcaggtctctgatcccattcctcctgactgggttagacctctcaatagggttctccagacacctcatacaagagcatttgggccagcaacatgtcataccctctgtgacagagctttcatagaaagrtgcaggttgccatttttgctattttgcagccttcactggtgatagctccaagtacaagaaaggtctggagcaaacccccagaaaaccacagcagccctaaggaagagtgaccttcctgttaaaagaaaaacaacaaacagaaaacaacaactactacaatatcaacaaaaggatcctacaaaaacc

SEQ ID NO: 597061 - DNA, 394 bp, Homo sapiens
cttgagtcctgccaacctcatcagcacctgctcttgcttctgtcaccttccccactggatgcttcagacatggttgccaacttcagatatggtgtctgtccctcaagtttgttcctaccttagatacctgcattagctttctcacctgcaatgcatgccaccaaagacaaaggatttcttttaattgtctgagttccacgtaaacatcatstctttacacccaatctaagggtcctcccacaattctatcacatctccctgttatgctttccacatattatgtaaaaggcaatctaaaagtcttcaagcatttctgtgcatgtatagaaatggccagtgatgaaaggttcgttgtcctatttccttttagactggaacccagggaaggatttgg

SEQ ID NO: 597062 - DNA, 394 bp, Homo sapiens
cttgagtcctgccaacctcatcagcacctgctcttgcttctgtcaccttccccactggatgcttcagacatggttgccaacttcagatatggtgtctgtccctcaagtttgttcctaccttagatacctgcattagctttctcacctgcaatgcatgccaccaaagacaaaggatttcttttaattgtctgagttccacgtaaacatcatctctttacacccaatctaagggtcctcccacaattctatcacatctccctgttatgctttccayatattatgtaaaaggcaatctaaaagtcttcaagcatttctgtgcatgtatagaaatggccagtgatgaaaggttcgttgtcctatttccttttagactggaacccagggaaggatttgg

SEQ ID NO: 597063 - DNA, 608 bp, Homo sapiens
gatcctttgatttgtgtgacattggttttaatgtctcctttctcatctctgatttttttgttttttttttcttaactagcctgactaaagatttgccaatgttgtctacattccaaaaaaaagctttcctgttacgttgatctttgtatcattttgattcaattctattcatttctgttctgatctttattatttctttccttctaccgattattggtttggtatgctcttgctttcctagttctttaggatgctttgttaggttgtttacttgaagtttttcttctttttttgatgtaggcacttatagctataaarttccctcttggtactgtttttgctgtatcccataggttttggtatgttgtgtttccattatcatttgttttaatacatttttcaattcccttcttaatttcttcattgacctactagtcattcaggagcatattatttaatttccatgcatttgtgtagtttccaaaattcttctcgttattgatttctagttttattacactgtcatcagataatatgcttgatattatttcagtttttgaatgttttaacacttttttatgatataatatgtggtctatttttgagaa

SEQ ID NO: 597064 - DNA, 608 bp, Homo sapiens
gatcctttgatttgtgtgacattggttttaatgtctcctttctcatctctgatttttttgttttttttttcttaactagcctgactaaagatttgccaatgttgtctacattccaaaaaaaagctttcctgttacgttgatctttgtatcattttgattcaattctattcatttctgttctgatctttattatttctttccttctaccgattattggtttggtatgctcttgctttcctagttctttaggatgctttgttaggttgtttacttgaagtttttcttctttttttgatgtaggcacttatagctataaagttccctcttggtactgtttttgctgtatcccataggttttggtatgttgtgtttccattatcatttgttttaatacatttttcaattcccttcttaatttcttcattgacctactagtcattcaggagcatattatttaatttccatgcatttgtgtagtttccaaaattcttctcrttattgatttctagttttattacactgtcatcagataatatgcttgatattatttcagtttttgaatgttttaacacttttttatgatataatatgtggtctatttttgagaa

SEQ ID NO: 597065 - DNA, 609 bp, Homo sapiens
  misc_feature 37: n = A,T,C or G
agaacttttcatgagcatacagtcaggaaaaatccanactctgagacatggcatagtgaggatgtaattagcgaaatccaaaatataggaaaaacaacctggtttctttcattaaacaaattggaaggggagaaaaagaagaagatgaagggagaagcctgtaaatcaaaaaaagttcaaagacaagcaatcataaagtgggattttatttggatcctgattcaagcaagcaaaaatatataaaattaatggatatttagagataacaggatccaataacaggatatttgatattaaagaatagttatgctgagtggttggcttaatgatggtattatgattatgtttttttttttagtttttttttccctgggtgtggtgcctcatgcctgaaattccagcactttgggaggccaagttgcggsgggaggattgcttgaggccaggagtttgagaccagcctgagcacaacagcaagaccccatctttacaaaaataaaaataaaaagttagtcaggtgtggtgtagtcctagctagtcgggaggctgagaaaggagaactgcttgaccctggcaggagattgatgctgcagtgacctatgatcacgc

SEQ ID NO: 597066 - DNA, 342 bp, Homo sapiens
ttacgtgtgtgccctcctcatttccctagggataaggtgtgggttttcagtctttggatgtttcttactagactgagctagagtgagctgtgcccattgggaagacagggtgggattcttgcctgggctttcagtgtgagggatcacagcccaggtctgttcaactcygcttccctcctcccaggtattgtgggccttgtgtcagatgttgtcaggattcctgtgccaggaggcagtccaggagctctacctacagctgctgctggctgtgctgtgtcatcactgctgggcgatttagcaaaatgctccccagaagatggtagaacacagcaaggaggggcc

SEQ ID NO: 597067 - DNA, 586 bp, Homo sapiens
ttttgtttgcaacaaccatcttgctttagtatgcagcataagtggtttatgtgcacatctcacttcactacataaaattctaagaaggaatttactcaaaaagtgaagtttcaataaaatcaatacttattactgcttcatcaagacttcaagtacctgactctgaagaaatacaatgagtgccagtgccttgatttgggcaaaaggcagttttacccaccattgcttctgcacaaccactgcaaatgttaacacggwgaaaaaataacatcttaatattacaataaaaatagttttgaccctatggacccattgaaaggatcttggagacctccaggattccgatggactacactttgagaaccgatgctctattttgagaaagaaaaaaactcattcactaactgaaattcacacagaggaccgaatattgccaatgccagtttccaatccacactagacaaactccaaggacatcagcagctagggactccacccactgccattcataaattaaaaggaattttcttcctcggcatgtgattcatctggaaaaagcttttagtgcaaagttctgaaagaagcc

SEQ ID NO: 597068 - DNA, 576 bp, Homo sapiens
atcagctcataattaattgaatgccctgtggaggcaagccaatgtagtataaaggttttttgacatttctataaagatgttcatttgatctgctgtttcacaacattctgctattctactgggttatgtgcaagtagaattcatctttcctgcataacctttcaaagtcatcagaattaaatagggaatgacttcggagggacagaaagcagcatataaagtcccattttaaaacacttactattcaaattcaaaaccttattcctttctttctgagtactaatgtatgctcagttcattcatgtatgtaaacacgtaagagatatctagaggaactgyatctgaatctgaataataggttgcttgtgaagggaaacaagttctattctgaccttttagccttgcccaataccaaaatcttcatgtggagagctacctagattcaggatcccacagcctgactgacttgccaagtattggcccaaaagaaagagaaaaactgtacagtgtggtctggtttgcctaacactgctccagggacacccctagccctgcaagcctgggagaatagctgcc

SEQ ID NO: 597069 - DNA, 600 bp, Homo sapiens
agttatttttacatgtacaatttaattattattgactatagtcaccctgtggtgctatcaaatactaggtcttattcattctttctaatttttttggacctattaatcatctctacttctttcccaacctcccactacccttcccagtacctggtaatcatctttctattcgctatctccataagttcaattgttttgatatttagctcccacaaataagtgaaagcatacaaagtttgccctgctgtgcctggcttatttcacttaatataatgaccttcagttccaaccatgttgttgcaaatgaccgaatctcattcttttttatggctgagtagtactccattgtgtatatgtaccacttttttytttttatccattcatctgttgagggacactaaaattgcttccaaatcttggccattctaaataatgcttcaataaacgtggaagtgcagatatctcttcgatacactgatttcctttattttgggtatatacctagcagtggcattgatggattatatggtagctctatttttagttttttgaggaacctccaaactgttgtacatagcagttgtgttaatttacagtccc

SEQ ID NO: 597070 - DNA, 618 bp, Homo sapiens
tttaaatctaattaattttttatctctctctctctcttttaacttgtggagtcttttaaatggtaaataaagttttcagaagaggaagaagaagatctctgctccaagattgctttcctcaacttctcaggggaacttttaaatcattccctgtgtttctaactgctgccaattcctagaaattcccaggttttagaaataaatccaagaaaccaatctggagaggagaaagaaaggggcctgtgctgagtgcacttgaacataatagcataatagcagtcatttagagaatgcaaatgtggaggttgatgctttacctgtcctgattcatatgaccctgcaaccactctgccaaggggccacctctattttcagaggaaaaaactggcattcagtttggaatatgcctaagggcacacagctagtatgtggctaaggagttgaatctgsatctgtctgatcctaaagccccaacttcacaacatgatgctttcacagttttttagtttgaccttcacactcagtgtccacaatataagcagaggagaataggtgaggttcttgttccattccctaaatagagactctctgaaaaaagcaaagaagtgagcccctcat

SEQ ID NO: 597071 - DNA, 586 bp, Homo sapiens
  misc_feature 392: n = A,T,C or G
gataatgggtcagggaaatctggaatccagaaagattccctcctcaatcctttcccagtggtgtgtagacagaatttatcaatcactcaggaagaaaatraagtattataaatgaggagtaaatagtgtgctctggagcccactttaataactgatgtctcatctgtggagagaattgatacactggctgctcgccaatgttggatgccaacgtttaaatttaagctaaagtgtacatgtcattaaaagaaaatgcaaaaatctaaagacctctctttcctttgttatcctctttttaaagagctattgtaaagagatgaaggggagagacactcaaacacaccaacaggatccagaatgacccattgccctggtttactggcagccctggnggtcccatacaccttaggaatatgaaccaaccctgcttatttgacccctctaactccaagcctccatgggccaagtccagggatgtaaactttcattctcccttcagatgtaggtctattataggggaagtttagaagtgtctggttcaggataaccgtgctcaccaggaaaacccaatgaccctaaactatca

SEQ ID NO: 597072 - DNA, 586 bp, Homo sapiens
  misc_feature 392: n = A,T,C or G
gataatgggtcagggaaatctggaatccagaaagattccctcctcaatcctttcccagtggtgtgtagacagaatttatcaatcactcaggaagaaaataaagtattataaatgaggagtaaatagtgtgctctggagcccactttaataactgatgtctcatctgtggagagaattgatacactggctgctcgccaatgttggatgccaacgtttaaatttaagctaaagygtacatgtcattaaaagaaaatgcaaaaatctaaagacctctctttcctttgttatcctctttttaaagagctattgtaaagagatgaaggggagagacactcaaacacaccaacaggatccagaatgacccattgccctggtttactggcagccctggnggtcccatacaccttaggaatatgaaccaaccctgcttatttgacccctctaactccaagcctccatgggccaagtccagggatgtaaactttcattctcccttcagatgtaggtctattataggggaagtttagaagtgtctggttcaggataaccgtgctcaccaggaaaacccaatgaccctaaactatca

SEQ ID NO: 597073 - DNA, 599 bp, Homo sapiens
atcaagacatagtattgctaatgtgccagacagagtcatcagataattaaaatgatkgatgaattttggtgagaacaacggataccacaaatgtttttcagaatacatcctagtcacccaaattgatagatatctttaatattcactctttcagtggttctgtaattgaataatttccatatctctgaaaccaaagaggaattaccaatggtttggtcaatacctagagccttagaaataggtggtgggcagtgctgggagcagcagtgagggtagtgcctttagtagtgaccactgagctggatctgtgagccaggttgacacagaaggagtggacttaggatctagggtttcttctagcagaggatttggagaaaaggtaactactcacatcattgtgaactaagactttcttctcctcaatagctatggcaaaagggaaataatgatagtgttggtgcttccagagatgctctacctgcttacctttccatagataacacctggactctaccatgaaaacaagcattagctctagccactcagttagaacactcatacacacagaggagcaataaggaggtctaagccaccttgaa

SEQ ID NO: 597074 - DNA, 599 bp, Homo sapiens
atcaagacatagtattgctaatgtgccagacagagtcatcagataattaaaatgatggatgaattttggtgagaacaacggataccacaaatgtttttcagaatacatcctagtcacccaaattgatagatatctttaatattcactctttcagtggttctgtaattgaataatttccatatctctgaaaccaaagaggaattaccaatggtttggtcaatacctagagccttagaaataggtggtgggcagtgctgggagcagcagtgagggtagtgcctttagtagtgaccactgagctggatctgtgagccaggttgacacagaaggagtggacttaggatctagggtttcttctagcagaggatttggagaaaaggtaactactcacatcattgtgaactaagactttcttctcctcaatagctatggcaaaagggaaataatgatagtgttggtgcttccagagatgctctacctgcttacctttccatagataacacctggactctaccatgaaracaagcattagctctagccactcagttagaacactcatacacacagaggagcaataaggaggtctaagccaccttgaa

SEQ ID NO: 597075 - DNA, 496 bp, Homo sapiens
ttacttccccttccccagtaagatggcctgactgtaactgaaattataaatgatcatcatagagaatatccaagcagaaatttgatgtctaccttacagatatatgaagtggaaaattgggcaccatggttatttaaaacttacattctcaagatagcttctatcattactctttgcctctctcaaataagacaaaaagcatggcatttagcaaaacaaacaaacaaacaaacaaaaaccaccaccagaaataatcaaagaaagaagggaagcaatattttaggaaacagcaaaggtcctaaacttcccttcctacccctgccactaatttgaagaaaactaaacagagggcctagtataattatcctgaaggaaaccacgtggaaatagtagcacacctctgtgccccaccatgtacacacaacacctccttggagcaggaaaacctcctggagcktaacactatatatacatatttttttttggcaagaaagaa

SEQ ID NO: 597076 - DNA, 589 bp, Homo sapiens
tgggcagttgctgaagccctggctgtgttcaggatcagttgcagggggttatgggagtaagaagccaagagaatcgagatttgaaccctggggaactcttgaatccacctaaggttaggtagtagttgatgctgcaaaggagaccaagagaaggcagttggagatatagaagatggtcgtttcttgtcagtctcgttagttttagttactaaaacatttgtgatcatgtattaaattatgcgaaacacaaaaattgcttgaagtaaatttctgaggcttggttttactttgctgtgtttttagaaatctctaaagccccaaggttaattttgtcctaatgaagagctttatgctttttatagcatgtatacaggtaatgtgaatttttctgctgaaatatcaccactccactctraagaaaatgattctataggagagagatattttgattcaggcccctttattgtctggtgtttgaaagaccacagtggacaggagagggtgcagagagcgaggctggggaagagaagcattgttcaagcctgtacctcttttatatatgcccaagacttgcctgattcatttttat

SEQ ID NO: 597077 - DNA, 589 bp, Homo sapiens
tgggcagttgctgaagccctggctgtgttcaggatcagttgcagggggttatgggagtaagaagccaagagaatcgagatttgaaccctggggaactcttgaatccacctaaggttaggtagtagttgatgctgcaaaggagaccaagagaaggcagttggagatatagaagatggtcgtttcttgtcagtctcgttagttttagttactaaaacatttgtgatcatgtattaaattatgcgaaacacaaaaattgcttgaagtaaatttctgaggcttggttttactttgctgtgtttttagaaatctctaaagccccaaggttaattttgtcctaatgaagagctttatgctttttatagcatgtatacaggtaatgtgaatttttctgctgaaatatcaccactccactctaaagaaaatgattctataggagagagatattttgattcaggcccctttattgtctrgtgtttgaaagaccacagtggacaggagagggtgcagagagcgaggctggggaagagaagcattgttcaagcctgtacctcttttatatatgcccaagacttgcctgattcatttttat

SEQ ID NO: 597078 - DNA, 634 bp, Homo sapiens
acacaagcttcattcccatctataattttatctggtaccattattcaatttagatatattgcataggatgtgccaacaatcacttttataaccattccatgaytttgcttgggtaatcccttttaatggtgaacttcaggtcacaacagtaactatcagttcaactacaccaaggtttccgaagacaatggcttctccacccaagcaggttgtatataaattccaaatagaacctggcatcaccctgaaggaattctaacttcacactgtggggaaatttaccaagatggcttaagagtagactaactttacacagcacattaaaaaaaagacatttattcagcgtcacgatcagactgttacatttagcaatcaacagcatggggtgcaaaaaaaaaaatctacattaaaaccctttgttggaatgctttacactttccacagaacagaaactaaaataacctgttatacaattagtcacaaatacagtcctcgagttttttgcccatacacatgagtatttgtctaaaacatgtcttctttgtagcagctaggccctgccaccactgtgcttggctgagttcacaaatctgttgtaacctgtagcttccctgtcacttctctggctctcctc

SEQ ID NO: 597079 - DNA, 634 bp, Homo sapiens
acacaagcttcattcccatctataattttatctggtaccattattcaatttagatatattgcataggatgtgccaacaatcacttttataaccattccatgattttgyttgggtaatcccttttaatggtgaacttcaggtcacaacagtaactatcagttcaactacaccaaggtttccgaagacaatggcttctccacccaagcaggttgtatataaattccaaatagaacctggcatcaccctgaaggaattctaacttcacactgtggggaaatttaccaagatggcttaagagtagactaactttacacagcacattaaaaaaaagacatttattcagcgtcacgatcagactgttacatttagcaatcaacagcatggggtgcaaaaaaaaaaatctacattaaaaccctttgttggaatgctttacactttccacagaacagaaactaaaataacctgttatacaattagtcacaaatacagtcctcgagttttttgcccatacacatgagtatttgtctaaaacatgtcttctttgtagcagctaggccctgccaccactgtgcttggctgagttcacaaatctgttgtaacctgtagcttccctgtcacttctctggctctcctc

SEQ ID NO: 597080 - DNA, 630 bp, Homo sapiens
ccatctataattttatctggtaccattattcaatttagatatattgcataggatgtgccaacaatcacttttataaccattccatgattttgcttgggtaatcccttttaatggtgaacttcaggtcacaacagtaactatcagttcaactacaccaaggtttccgaagacaatrgcttctccacccaagcaggttgtatataaattccaaatagaacctggcatcaccctgaaggaattctaacttcacactgtggggaaatttaccaagatggcttaagagtagactaactttacacagcacattaaaaaaaagacatttattcagcgtcacgatcagactgttacatttagcaatcaacagcatggggtgcaaaaaaaaaaatctacattaaaaccctttgttggaatgctttacactttccacagaacagaaactaaaataacctgttatacaattagtcacaaatacagtcctcgagttttttgcccatacacatgagtatttgtctaaaacatgtcttctttgtagcagctaggccctgccaccactgtgcttggctgagttcacaaatctgttgtaacctgtagcttccctgtcacttctctggctctcctctcctgctaagc

SEQ ID NO: 597081 - DNA, 630 bp, Homo sapiens
ccatctataattttatctggtaccattattcaatttagatatattgcataggatgtgccaacaatcacttttataaccattccatgattttgcttgggtaatcccttttaatggtgaacttcaggtcacaacagtaactatcagttcaactacaccaaggtttccgaagacaatggcttctccacccaagcaggttgtatataaattccaaatagaacctggcatcaccctgaaggaattctaacttcacactgtggggaaatttaccaagatggcttaagagtagactaactttacacagcacattaaaaaaaagacatttattcagcgtcacgatcagactrttacatttagcaatcaacagcatggggtgcaaaaaaaaaaatctacattaaaaccctttgttggaatgctttacactttccacagaacagaaactaaaataacctgttatacaattagtcacaaatacagtcctcgagttttttgcccatacacatgagtatttgtctaaaacatgtcttctttgtagcagctaggccctgccaccactgtgcttggctgagttcacaaatctgttgtaacctgtagcttccctgtcacttctctggctctcctctcctgctaagc

SEQ ID NO: 597082 - DNA, 620 bp, Homo sapiens
agtactctgatattcttttgtctgcagtatactatttcattgtcttaagaaagcagtcaatttccattgaactgatttcacagctgtttatagacccagggttttgggggaaaaagactgctgatctgaagaataggtcaccaaatcatgccaactttgattrctttctgagtcagttccttccatctccagccccagccacttgtacagatggtcccttgcttgtgatatttcgacttaagatttttcacctttacaacggtgtggaaagcaatttgcattcagtagaaaccatatttcaagtatccacataaccattctgtttttcactttcggtacagtaatcaaccaattacatgagatattcaacactttattataaaacaggctttgtgttaggtgattttgtccaacagtaggctaatgtaagtattctgaacacatttaaggtaggctaggctaagctatgatgttcagtagattaggtgtaggaaatgaattttcaatttttcatattttcaacctatgatgggtttatcaggacataaccccatcaaggagtatctatgtaaacagattaagcagtgacccattatttggtgtttttactcatgtgtttt

SEQ ID NO: 597083 - DNA, 620 bp, Homo sapiens
agtactctgatattcttttgtctgcagtatactatttcattgtcttaagaaagcagtcaatttccattgaactgatttcacagctgtttatagacccagggttttgggggaaaaagactgctgatctgaagaataggtcaccaaatcatgccaactttgattgctttctgagtcagttccttccatctccagccccagccacttgtacagatggtcccttgcttgtgatatttcgacttaagatttttcacctttacaacggtgtggaaagcaatttgcattcagtagaaaccatatttcaagtatccacataaccattctgtttttcactttcggtacagtaatcaaccaattacatgagatattcaacactttattataaaacaggctttgtgttaggtgattttgtccaacagtaggctaatgtaagtattctgaacacatttaaggtaggctaggctaagctatgatgttcagtagattaggtgtaggaaatgaattttcartttttcatattttcaacctatgatgggtttatcaggacataaccccatcaaggagtatctatgtaaacagattaagcagtgacccattatttggtgtttttactcatgtgtttt

SEQ ID NO: 597084 - DNA, 603 bp, Homo sapiens
accaccagtagtaactgagggcttttatgtaacacaaagatgtgtacttttattttgagttatttattttcatttttatttaaaggaaaaaatggcttatcagaccagtagttttggggataatatgctgagaacaaagctaraacaggtatttgggttttaaaaagtgtgtcaatttaaaaaacgattgaagaagtaataaatagtgcaaggataataaaagaatcttgaaggctgtgctcaagtaactgcagtttaagaaacactgccaagtccaggagagcatcaccgcatatcaatagccctggatttactcctgttgtgcaaaggacgtactatatgaccctggacaagttggaacctctctgaacctcagttgactgaagtagaacggtgacattgaaggagattgccaagatcgcctcccatggtagcatgtggtgatgctattgatattacaggttaccttctgtgtctagtgaggtggaaatggggaaatgatgtcaatcgtgatactatgtctggagacatcatgtacataagcatcgagttgactcctcctcaccctgaagcagtgaggtatagagaaaagtctgccactta

SEQ ID NO: 597085 - DNA, 603 bp, Homo sapiens
accaccagtagtaactgagggcttttatgtaacacaaagatgtgtacttttattttgagttatttattttcatttttatttaaaggaaaaaatggcttatcagaccagtagttttggggataatatgctgagaacaaagctagaacaggtatttgggttttaaaaagtgtgtcaatttaaaaaacgattgaagaagtaataaatagtgcaaggataataaaagaatcttgaaggctgtgctcaagtaactgcagtttaagaaacactgccaagtccaggagagcatcaccgcatatcaatagccctggatttactcctgttgtgcaaaggacgtactatatgaccctggacaagttggaacctctctgaacctcagttgactgaagtagaacggtgacattgaaggagattgccaagatcgcctcccatggtagcatgtggtgatgctattgatattacaggttaccttctgtgtctagtgaggtggaaatggggaaatgatgtcaatcgtgatactatgtctggagacatcatgtacataagcatcragttgactcctcctcaccctgaagcagtgaggtatagagaaaagtctgccactta

SEQ ID NO: 597086 - DNA, 538 bp, Homo sapiens
gtatcagatgtccttgaggtagttctctgcctcctctacaatgactttcacatactcaatcatcactgcctgtgaatagagtttttgtatgccatttatttacatactatccagcccaaagactgaaaagtcactaagatattgtgattattagaaggctcagatctcttcatattcagaagagatctgaatgcagggctgagatattctaaatacatttacacactcttctgggaggattaagtaacttatgcagtatgccctggtgtgaactgcaggagcacatgagtcatatttatgatctaaagatgagagacatctgatcactaaaatgtggaaaaatctggaccatttcagagtggctataatttgcaatcctaatacagggcatttttactcctcctgaaaattgaagaagcataagtacccatygggatgtgctgggacagtcctgtcaaatcattatgaaatgattgctgtcttaggaaatacacttcttatatctgctggagatgaagttaaggtagaggagaagatt

SEQ ID NO: 597087 - DNA, 341 bp, Homo sapiens
tgttggctttcttcctctttatgatttctattcagttttccgagcaggaacttagtgactttttatttgttccagtggggctgttacttgaaccttaattgtggtactttgaaaaatttcctactggttgtctaaatggggacgtaaaactttgtaatttatttcgtgtgtattcatgtgtgtttgctttaagctaaattttgcaaagtaaacttagtctgtggaatacagtattgtataactattggatagatataatatgcttctctttagtttttaaaatacattcttarcaattgtattttaccacattcatgaaacaatcatgtgcatttgtatat

SEQ ID NO: 597088 - DNA, 457 bp, Homo sapiens
caaggtgctcatggtatcacaggaagagagggatagaaatacatgcaattcaagataacacagcacatgcgactaagcactaggctgaatgaagtggtatggcaacacagagaaggaacccactcactctccctgcagaggtcagtgaaggccttgtgaagaagtcacatttgaaacagaccttggcaaatgagtgaacttttgccaagtggagaaagggaacaatgacattctaaaaagtgcacacagtgtgagcaagggtgtagagaggtgaaagccccactgtgtgtctggaaaaggatgagcagtctaggrttctgatgaatggggtacacattacggaggagcaagaaatgcatgccctcgggcctaaaaaatgtcttctatttttggctgacaattacattggtggtttgctctgggttaagctttgccaacgcacttctaaaaggcagta

SEQ ID NO: 597089 - DNA, 587 bp, Homo sapiens
tgaggagtactaatcacactgggataataaagacttcctacactaatgaagcaaaagctttactggtggaaacagcctgatgcctttaatgtgtgtattcacatattaaatttttactattttattcttaaaatatcctcatttatttctaagctccccccgggtggggggataatttattatttactctagggtgttttctataggattacttccaaagattgacattattagaagtaaaatgaacacctcccaaggcaatacttgtggagaagacagattttggagtcgatttggaggcagacctgtattctaatctgcttttacccacttactggacacatggtaatgagcaaattacatgcactctctaaacttcagtatcttcatctataaaaatggagcactaagagttccctcacaggattgtggagatcagaggtatgtgtaaaatgctaggtacaaagaaggtaatcaacyagtaagtggtagttacaacagtgcagtttattttggtttgctgaactgccaaagttctcttgtgatcttaatttgttgattactttgtacatctggataccttgcat

SEQ ID NO: 597090 - DNA, 487 bp, Homo sapiens
agaatggagacctcagtctagtaaacgtcccagcattatctgccattttgaagacattcagagaggagtcacagggacaaaagaattgccacaatgaacaagaccctcgggctcttccactcatgtgccactggccacagtaaccctggatgccctgagagtacctgcttctcctccaggagttcagacacagtatcagaggaccaccaagcatctatctgtacamaaaaagtctcaggctatacagctgtagaatgcaggctatgtcagaatgcagttcagaaaggcatgtaaaataaaggactcacataccagtgacaaaactccacctgcaaatcacataaatgtctttgcatcagctctgtctatgttgagcagcaccctttcgggaagaaaatggagacctgattctatgagcttgtgggaagattggtcctcgctgaaatcactaccaattcctttcactttcagcatctcatccaaaatt

SEQ ID NO: 597091 - DNA, 646 bp, Homo sapiens
ctaaaattatgatacagaagagattttatttattgtatagatattcaaaagacataataatgattattctaattacccaatccatcttcaatatttaactcctcagagataagcactttcaacaatttagcatgtatctagctgttttctatccatagaggaacataaaatatatttgaaatacatgtttattttacaaaattaastcacataacctactctgcagcttacttcttacacataatgcatcaagggcatctttcctcatcaatacatatagatccattttgttcttttcaataactacatggtattttgtgtatggatataccataacttcaagtcttattgatatatacttagagtgttttcaatattttgatatcttaaatatgctaccataacatctttgtgcatttttgcacacttgcataaatatattggtaagaaaaaggtatctttttaaatacattggtctccttttagcaaattgatgtcaggtattcatctgtgtctattttttagaaattaatgcatatatttataattactctatataatttactcatgcgtcatcataccaatataatatgttggtattagaattatatatttcatgcattcttgattagatgcactccccaca

SEQ ID NO: 597092 - DNA, 573 bp, Homo sapiens
tatatcacaaacattatggagattacatttcacatgaactcacagcttccaaaaggaaatgttccttccttttccactgtttccctccttccatggaaaagtataaaaagacagttttataaaaaaaattactgagttcaaatcacccctgtgatagttccatccaagcttataaagtctttgagaagtaaagtgagctaaaccctaatattgtttgtcagctcactgagttacttcacacaatgtcacctaacctcyaggaatctcactctcttcactcacagtgaggtagaagagaggatattacagatgcctcctagatcctaaattacatgatgctcttagtctttgcattttgatgccaaatgatgctgattaaaggaggacttagctaacaaaatctaaatcttacttggtcccaagaactagattataatctcttgtaattttcatatgcattcattaatttgatcatttataaatacttcttgagtacctactatatacctacttttttggaagatgtcctacattcctttgtgtgatttaagttttaagccatttaatctctac

SEQ ID NO: 597093 - DNA, 421 bp, Homo sapiens
gattaacaactggtccttttaacagagatagcagaaataatattataccctctctgtaagtttttctttgataacaagattttcttttgcaatttgagcactactaacggctagctggtttcctttagacaggtgttaacactgcgatcttctcgcgatcacctagcctggctggaggccttctgcctatgctaagggtactttaagtagaaatgattccataaaccctgaatttatcttatggtggaagggcttgtagctcagcytaggcctcctcctgcttcaattgtgatagggtatggtggatctcattagtatgggaaaccagtaacagccattagtgtcatataagagttgcctttgctaactatttctgtgcacagtcacacaacatgctctgagttttctcaataaaacagct

SEQ ID NO: 597094 - DNA, 300 bp, Homo sapiens
catgtcagctcaaacttccacctttttgtgcctctcagtgtgctcatttagagccagcttattctgccttgtgagagctaatcatgtgtatctcttcacaactacttgtttggtgacatcacatcagtagtttgcaactggccataatgggagcatttacaccgcaaaagtcagcaaacactgcaagtcagagtctccctgctccccaacycccaatcagtacggtactgggtacgagttgcttcaaggatgaaatgaaattgagagattagtagtcaatttgtcaataaaaggcagttt

SEQ ID NO: 597095 - DNA, 586 bp, Homo sapiens
aacagatggtcaacattttccagaaagagttctagcttggaaaaacaagtttagtaaaaggtaaagacaaaggcatcccctaaacataaaagaattgttcatgcatcttaaattaaaaaaaaaaaaaaactatttctactatatacttcagataactctattaaaacttcaaatttctttataagtttcaacttgcttcttatacacaaaaaagtctaaatatttcacatgcaaagtaagcaagtgtttataaaaacattaactgaccttggggagagtatctttgtattgacactgtttgaaagcatcaccaaaataatctgcagcctgattagccaatttagctatgatggcatctttcattttatctggaatacaatatgaccattataattaaaataaatatgagctaatctgacatgtctcagtataaacactgaggtcacaagtttgtacacgcatctgaaaacatctttcttgatgaaatcacattttctgcacaaaatttagaacagacaaaatagattagtggttgccagcagygggggaaaggggagtgaggagtgactgctaatgggtacatggc

SEQ ID NO: 597096 - DNA, 589 bp, Homo sapiens
  misc_feature 48: n = A,T,C or G
taaacacagccaagttcttagccagataaacataaacccttatcctanagatctgtttacctcaggtccttttagccaatatatcaaatctgcctttcaacagtaaattacaaggcacattaaaaggcaagaaaaacacttctgaaaagataagcaaacaacagaacaagacttacatatggaaaagattttgatactatttgactgggaattttaaataactatacttaatatgctaagggttccaatgtaaaagtggacagcatgcaagaacagatgagtaatgaaagcagacagctcraaactctaagaaagaaatgaaagaaaatactagaaatcaaaagccctataatataaatgaagaatgcctttgatgggctcactggtaaactagatacagatgagaaaatattcagtgagcttgaagatatgtcaagagaaacttcccaaactgaaatgctaagaatgaaaaattggaacagaatagccaacaactgtgggacaataacataacatgtaatatattcacaaagagaacaccagaagctgaagaaagaaaggagaagaataaatatttgaagtaataatg

SEQ ID NO: 597097 - DNA, 529 bp, Homo sapiens
atgaccatgttatttaaaacgacaaccttcttacctctcctcatatattcactttattcctcttgtctctttattctccatggcacttaccactgtcttctatataatatttttgcttttttgtcttcccctctaaaagcttcacaagagcacagatttttagatgtttmctgctaaattcttaatgtcctaaaactggtgcatagtaagctcttagtatatatttgttgaatgaatgaatgaggaaaactttctttgataacaatgtcagcctagacaatagtgagaaatggtggtaaaaagagtgaaggccctgagcaaggagagcctataatttagtgactcgaatgtatagtgaatatcctgagatgaggctggagagttggatgatagccatatcctgtaagaccttcaacatttttggatgtaattttaagtgtaatgggaatccaccaaagggtttcagtacttaatacttcagagtttatttcctgagtacaaagatattctcctgtataaccatagtaca

SEQ ID NO: 597098 - DNA, 314 bp, Homo sapiens
cctctctccctgtgtgtgcatgtggtgtcttccatctacctgtggtccattctgaaggcaccagaagtgtaagaaaatgactatcagtgtagctggctgaataagaatctaccctacctaccccagctctgtattaaacaggtcccaagatttagacccaacaaaaaggtggtgaaaggtgaggtgacacatgcctatagtcccagttactcargctgaggcgggaactgcacttgagtccaggagttcaagtccctagagagctacgatagtgccactgcactgtagtctgggtgacagagcaagaccctgtc

SEQ ID NO: 597099 - DNA, 446 bp, Homo sapiens
accttcttttgatggtctacttgctgttgaagtgaataaataaagaagaatgaagagccaaaagaggaattcaaaaagaaagaaaatgattctgttgattctggggtaagattaatctgacttgagccttggttctggaaataagtaacattgtgtccctggacaacttgctcaatcccttgttatttatttgtctgtctgtctgtttagagacagggcttcactctgtcacccasactggagtgcggcggcgccatcatggctcactgtagccttgagttcttgggctcaagcgatcctcccacctcagcctcccaagtcactgggactataggcacattccaccatgcctggctgattttcactttattttattttttgtagagatggagtcccattctgttagccaggctgtaagttttttaaatttgtgaaatggagacatc

SEQ ID NO: 597100 - DNA, 446 bp, Homo sapiens
accttcttttgatggtctacttgctgttgaagtgaataaataaagaagaatgaagagccaaaagaggaattcaaaaagaaagaaaatgattctgttgattctggggtaagattaatctgacttgagccttggttctggaaataagtaacattgtgtccctggacaacttgctcaatcccttgttatttatttgtctgtctgtctgtttagagacagggcttcactctgtcacccacrctggagtgcggcggcgccatcatggctcactgtagccttgagttcttgggctcaagcgatcctcccacctcagcctcccaagtcactgggactataggcacattccaccatgcctggctgattttcactttattttattttttgtagagatggagtcccattctgttagccaggctgtaagttttttaaatttgtgaaatggagacatc

SEQ ID NO: 597101 - DNA, 551 bp, Homo sapiens
cggtgaaatggtctatttgggtccctaaacagcgtccagcacatcatgaaggttcatcgattgctgctgtgttgcatatttgtaaactcacagtcgtctgactcaccacctgggattctacctgggaggctggcaaggcagatgttaccaccaccattgttctctctaagattaaaaccattttattttgtctctaatacatttctccccaagttgatagatgcagtagtaaccaatagtaaaacagtcatgcatacaattcatcttctcacagagaatcatgactttacaagcacagacttacaatctatcgggaaagaagaaggctgtttttagagagcaagccccttgtaaacctcactttgttataaagtactgttctttgtwtatgatgttaaatttgatgtgcttaaattttattaaacatttttatatctggaaaaaaaaaacccttgtaaaatgataaggacagggccacaaatgatattaagaatgccaagagggtaacaaatgagtggaatgaagattaataggggctataacaaaattta

SEQ ID NO: 597102 - DNA, 630 bp, Homo sapiens
actgccccccattccaagtgagatttcctactgttcctttcactgacttgccctttcactagatatgctatcttttctcagaaacactaaaaaggatttttgtgtttgcaaagagtaggaatgaaatggggtttttctaccccttctgataactgggtacttttaatggcaaggctattcttggtttcattccttggccaattttgagataattttttaagcacattggagcccacgtgctcagtggtggttcttcagcagaaaattcaaagatcagctactgagaattttagatttcctgttgtaagaggtcaaacaaatggtacaagttacataagcgtttcttcgatgataaaggagctgttttctctagataggtgtacccttttcagctagctaatatgaatctgtgtcaacacaggttttaattttttaatttttatgtattcattttttgagatagggtctcactctgtttcccaggttagagtgcaatgstgtgatcatggctcactgcagccttaacttcttggggccaagcaatcctcccacgtcagtcccccagttagccaggaccacaggtgcaccaccacacctgactaatttttaaaaatttttttgtagcaatac

SEQ ID NO: 597103 - DNA, 546 bp, Homo sapiens
gattgagaccaggatagaatgatggaaattttgatgtcaatgtgaaagtgaggcattctcaggggactaaatcagagagaaacgagaattaagtacaagttgttcctaacacatttatactcatcaggcttataaatgagaaaggaaatcagttattgaatgggaaatatgtatatatatatatacacacacacrgagtatatgtacataaggtgagtatatgtgtgtgtatgtatttaattctcctatgatgcattgtggtactctgaagatactgttgggtgtttgagatactaattattcttttggagccacatgtaaaaataagaataagatcgccctgtacaaatagtactgaggataggaaatagtatggaaaagctccttatatttagtaaaagccatacatgttgtctaattattgtaactttaagctcaaaaatcacatggccaagaaaggtggcaaggatagcttcctttactcctttaaggttttgaaagggctgtatttgaattagataccacaggtggactggggagcggtga

SEQ ID NO: 597104 - DNA, 546 bp, Homo sapiens
gattgagaccaggatagaatgatggaaattttgatgtcaatgtgaaagtgaggcattctcaggggactaaatcagagagaaacgagaattaagtacaagttgttcctaacacatttatactcatcaggcttataaatgagaaaggaaatcagttattgaatgggaaatatgtatatatatatatacacacacacagagtatatgtacataaggtgagtatatgtgtgtgtatgtatttaattctcctatgatgcattgtggtactctgaaratactgttgggtgtttgagatactaattattcttttggagccacatgtaaaaataagaataagatcgccctgtacaaatagtactgaggataggaaatagtatggaaaagctccttatatttagtaaaagccatacatgttgtctaattattgtaactttaagctcaaaaatcacatggccaagaaaggtggcaaggatagcttcctttactcctttaaggttttgaaagggctgtatttgaattagataccacaggtggactggggagcggtga

SEQ ID NO: 597105 - DNA, 564 bp, Homo sapiens
gtagccatagttaaagcactaaacttgttatttcaggaaatactatgctctggctccaagtcttacatcctttttgaccctttagccacatgtccttcacgagaaattttaagctattttaatactcccatatatcacacttactctacctttatttgggttttacatacaagcaatctgcactttgattttaaaaaagttctaaaattttttaaaggatggggtcttgctatattgcccaggctggagtgcagtggctattcgcaggtgcaatcatcatggcacattacagcctcgagctcctggtctcaagcstcttgcctcagcctccctagtagctgagactataaatagtatatacagtgccactgtaccctctatcctacatttttaaaagctcaccattaaatagtactaattattatagaaaatagtcacagacaattataaacacactactgtttcatcttacctctttgtctggtccactcccccatcaatactcagtcttccaacacatatatcaattagaatattttgcatctgcataatttactgcaagaa

SEQ ID NO: 597106 - DNA, 463 bp, Homo sapiens
catctgggacccttcttctttaaacattgccagtggctttagtgataaatagaagccctgtgttcaaaaccactccaactctgaggctaatgaaaggactgtggttaagaaggaaaagtcagcactgaagaaaacccaatgaaataattttttttttaaaaaaagcttagtcattttggagatgtttcataccttccctatgtcactatrtagattcttcttacatattcctccacagtaattctttaatatgccaagagaaagggtggtaggtaggtttcaaagacagagaaaaacacagtatttaaaaaactgatttggaaatccgcacagtaggaaacacaatttagtcagtgctcatttaaagatgaagcaggtacaatctcatctttattggaatacctgacaggtggcagaagaatgtacttttctctttagcagccccctaggagaatattttatt

SEQ ID NO: 597107 - DNA, 500 bp, Homo sapiens
ctccctgtctaactagctaaaggaaaacaactggtgagaaaggaatgacagatgtrgtcactgctgtgttccttttgtggttttcaccatttaacgttttgcctttcattctcctattcatgtattcacttattgatttactgaattatttatttatttatttatttatttattcattcattcattcattcattcataaatacatatgagccagggagtatgcaggatgagtaatacctagttcttgtcttaagaagctcaaaatataaagttctatctcaaagttattttgccattcaaaaaaggtcaatctctccactttgattaagtggagataatatatatagagagagagaaagagagagaggtgggagagagcaaaacacatttaaatgtaaaaaatacttttttttagtgatggagtattctactagatagtattggatgtatatgtgtgtatgagagagagagtgtgtgtatggttatgtacatatatgtat

SEQ ID NO: 597108 - DNA, 457 bp, Homo sapiens
aatactaactagctcttagagtagtgtatatcaaaatgaattgttaccttaaagaaacttcaagaatgaaaaatactccttgagaaatatctgttattatttctgataataaaatcatcacttatatgaattaaataagccaaaaatattgccactttattctaattgaataaaagtgtgtgtgtgtgtctgtgtgcactcacacatttatattttgatgttttgggggaatgctgtgaagatactttaaaactgtggtttaaaaatttcatgcaatatcttgttaaaattattttatagttttttgaaaggatcaacaaaattgatagaccgctagcaagmctaataaagaaaaaaagagagaggaatcaaaaagacgcattattttttgataaaggggatatcaccaccgatcccacagaaatacaaactaccatcagagaatactacaaacacc

SEQ ID NO: 597109 - DNA, 534 bp, Homo sapiens
gttatagtaagtcagtataataattagcttaaatatataatctatggatcggtagaacagaatagagtccagaaacagacaatacatatagtgtcaactaatcttcagacaaggcattgagttcacttattgaaggaaaggaaagcctttttaataaatggtgctggaacaactcaacccttatatttkgattttaaaaattagatgaatcttagacttaaatataaaacctagcaccacgatgcatagaggaaaaataagaataatatctttgtaaatttgggggcatgaaaagagttttcaaaagggtacggaatcagtaatcctaaaagaaagaaatatgaaattcatcaaaattaaaatgtgctgctcactaaaagaaacattttcaagaaaatcaataggcaaaaaacattaggagaaagttttcatagcacatatatttgaaaagaaattatatccagaatatatagagaattactacaaatcagtaataaaaattcaacctgattacaaaatgggtaaaacaattag

SEQ ID NO: 597110 - DNA, 435 bp, Homo sapiens
  misc_feature 10: n = A,T,C or G
actatagctntggtacagagcttcagctctaaaaactgggaccctctcttttactccttaactaggttacccatcttggtaatgtgctcaggtctaagtccctaattcctgaggactcaagttcaagtcagctcttgtcccaaggactctgttcctttcctgaactcctggggcttgtaactgagtcttcaccatcagctgataacctccgtgtcacccctgcctgcctccctatgggactacctaggrggtgctggcctgttatttctccttattctgctttgtccttctcttgataagaccttgttggatatctctgcctccacctctcactctcactgctcagaaaacctcaagagatcttgtcctgcgtgccacaccagaaaccactagacacctgcaaaagggctttttgcacactgtcttcaccactca

SEQ ID NO: 597111 - DNA, 634 bp, Homo sapiens
tgtgaaaatcttgtaccgtgtttttcactgtatcagttcagttgggttcttttttatactggctattttgtctgtcagctcctttatcattttattatgatttttatttttctttgattgggtttggctatcttccttaatcttgatgatctttgttcctatccacattctgaattgtatttctgtcacttctgccaactcagcctggttaaaaacccttgttggagaaggagtgcagtcatttagaggacataagacattttggccatttgagttgctagtcttcttgtgctggttctttctcttctcttcatttacatgttcctttgattgctgggctgcctctgattsaagtggcaagctggaggcagagtggttgtgctggagtctcaggtcaggcagccctgcccagtgaggagaagtgaggatgcgacctgtgtgtagaacagtctggccacttctctgtgaggtgggtgctgtgcgttgagggtctcaaccagcctctggtcctcatggacacttcagagcctagagatagtaatgagatgacaaagatgacaaactgcacttcccgttgggagctctgtctcagggagttacagaggaactactggcttgatagccccagcagggg

SEQ ID NO: 597112 - DNA, 634 bp, Homo sapiens
tgtgaaaatcttgtaccgtgtttttcactgtatcagttcagttgggttcttttttatactggctattttgtctgtcagctcctttatcattttattatgatttttatttttctttgattgggtttggctatcttccttaatcttgatgatctttgttcctatccacattctgaattgtatttctgtcacttctgccaactcagcctggttaaaaacccttgttggagaaggagtgcagtcatttagaggacataagacattttggccatttgagttgctagtcttcttgtgctggttctttctcttctcttcatttacatgttcctttgattgctgggctgcctctgattcaagtggcaagctggaggcagagtggttgtgctggagtctcaggtcaggcagccctgcccagtgaggagaagtgaggatgcgacctgtgtgtagaacagtctggccacttctctgtgaggtgggtgctgtgcgttgagggtctcaaccagcctctggtcctcatggacacttcagagcctagagatagtaatgagaygacaaagatgacaaactgcacttcccgttgggagctctgtctcagggagttacagaggaactactggcttgatagccccagcagggg

SEQ ID NO: 597113 - DNA, 634 bp, Homo sapiens
tgtgaaaatcttgtaccgtgtttttcactgtatcagttcagttgggttcttttttatactggctattttgtctgtcagctcctttatcattttattatgatttttatttttctttgattgggtttggctatcttccttaatcttgatgatctttgttcctatccacattctgaattgtatttctgtcacttctgccaactcagcctggttaaaaacccttgttggagaaggagtgcagtcatttagaggacataagacattttggccatttgagttgctagtcttcttgtgctggttctttctcttctcttcatttacatgttcctttgattgctgggctgcctctgattcaagtggcaagctggaggcagagtggttgtgctggagtctcaggtcaggcagccctgcccagtgaggagaagtgaggatgcgacctgtgtgtagaacagtctggccacttctctgtgaggtgggtgctgtgcgttgagggtctcaaccagcctctggtcctcatggacacttcagagcctagagatagtaatgagatgacaaagatgacaaactgcacttcccrttgggagctctgtctcagggagttacagaggaactactggcttgatagccccagcagggg

SEQ ID NO: 597114 - DNA, 533 bp, Homo sapiens
tacaaaacagcaaagatggggacctgccttccctctgggaactctttctcaggaggtatgaacctgttactggcctgaacacaccagcaggatgtggctggagacccctgttggaagatcttgcccactgaggatgaatgggatcagggacccatgtaaaacagcagtctgactgcttttatgtagggcagctgtgctttcctgggggtctgctccagcccctggttgccttggactctctaaagcctgaaggtaacaagagctaatgcggctagataacaaagatkgcagctcacacctccctttgggagctctgtcccaggaaggtttgaaactgctgctggccagaaaacactggtgggggtgactggacaccccagttgggtggttccacccagtgaggaagaatggcattggggacccatgtaaaaaagctgtctggtcactttttttgtggagcagtttgtgctaggggtccactccagcccccagtcgatttgtactctccaaatcccaaaggcaacaatgccaaa

SEQ ID NO: 597115 - DNA, 491 bp, Homo sapiens
ttactgtgttatacagaacaatttaactgcccttaaaatctgctggtctttgcctattcatctgttcctctccacagctcctcataatcactgattttttkattgtctcaatagttttacctttttcaggatgttatatagttggaattattcagtatgtacccttttcagattggcttcttttactttacattttcatagagatgcggtctcattatgttgcccaggttggtcttgagctcctaacctcaagcaattctcttgttttgatcttccagttaggattatagacataagccaccacacccagcctcaacctctgcctttattcataaaatttacttctcataaatgacatagggttttttctctttttttacatattcttttggtctctgacctttacatgaagtgtttagtttattaacatttaatagaattattgacatagtctgatttgaatctcctgtttttatatttgctttctactt

SEQ ID NO: 597116 - DNA, 510 bp, Homo sapiens
attcagtatgtacccttttcagattggcttcttttactttacattttcatagagatgcggtctcattatgttgcccaggttggtcttgagctcctaacctcaagcaattctcttgttttgatcttccagttaggattatagacataagccaccacacccagyctcaacctctgcctttattcataaaatttacttctcataaatgacatagggttttttctctttttttacatattcttttggtctctgacctttacatgaagtgtttagtttattaacatttaatagaattattgacatagtctgatttgaatctcctgtttttatatttgctttctacttatcccatttgttatgtttctctgtttgcatttacggttcatccatgtccttttatggcttgatagcccatttctctttaatgctaaataatattacgttgtctggatgtacaacagtttaattatcaattaacctactgaaggatatcttggttgcttacaggttttg

SEQ ID NO: 597117 - DNA, 510 bp, Homo sapiens
attcagtatgtacccttttcagattggcttcttttactttacattttcatagagatgcggtctcattatgttgcccaggttggtcttgagctcctaacctcaagcaattctcttgttttgatcttccagttaggattatagacataagccaccacacccagcctcaacctctgcctttattcataaaatttacttctcataaatgacatagggttttttctctttttttacatattcttttggtctctgacctttayatgaagtgtttagtttattaacatttaatagaattattgacatagtctgatttgaatctcctgtttttatatttgctttctacttatcccatttgttatgtttctctgtttgcatttacggttcatccatgtccttttatggcttgatagcccatttctctttaatgctaaataatattacgttgtctggatgtacaacagtttaattatcaattaacctactgaaggatatcttggttgcttacaggttttg

SEQ ID NO: 597118 - DNA, 654 bp, Homo sapiens
ttccatcccgttggtatctacgtttttccctttttaaatgtttcccatagttctttctttcagtattttacagtagtgtctagagcagtcttcttttagtttatctatgtattttattcaatatccattcttagtcaattctgagagtattagttcactctcaaaagacaggaggagtcattattagcattactaatattatcatcttttacactgacaatatttagaaayattcaccttttatagattttacacattaattatatagttataaacagatacatccttataaagtacctaaagggggaatatgaaaactacggccttaaaatgagaaatgacttgcccaatggtacacacatatttagaatcacaagcagttttggcgtcctgtttccagtttctattctttccacttaaacactctaaatgaagacaaggtttcatttagagtggggtggggtggaggcagttaaattttcacctgtataggaaataagtctgtctgctttccctcaacattacaaatgacttgattccttattaaatcaatcaagcacacacttacaaattactcattcaccttgccaacctcaccgccaacctgctggagcaagaccagaggaccacgagttctcccataaacctttctcc

SEQ ID NO: 597119 - DNA, 654 bp, Homo sapiens
ttccatcccgttggtatctacgtttttccctttttaaatgtttcccatagttctttctttcagtattttacagtagtgtctagagcagtcttcttttagtttatctatgtattttattcaatatccattcttagtcaattctgagagtattagttcactctcaaaagacaggaggagtcattattagcattactaatattatcatcttttacactgacaatatttagaaatattcaccttttatagattttacacattaattatatagttataaacagatacatccttataaagtacctaaagggggaatatgaaaactacrgccttaaaatgagaaatgacttgcccaatggtacacacatatttagaatcacaagcagttttggcgtcctgtttccagtttctattctttccacttaaacactctaaatgaagacaaggtttcatttagagtggggtggggtggaggcagttaaattttcacctgtataggaaataagtctgtctgctttccctcaacattacaaatgacttgattccttattaaatcaatcaagcacacacttacaaattactcattcaccttgccaacctcaccgccaacctgctggagcaagaccagaggaccacgagttctcccataaacctttctcc

SEQ ID NO: 597120 - DNA, 541 bp, Homo sapiens
tttagctttccttatttagaccttgtacatattttattagattaatgtccaagtatttaatttttaggttgctaatgtaaatagtaatgagtttttaatttcaaattccacatgaactttgttggtatacaggaaagagattgacttttgaacattaacattctatcctgccacwgtactataatcatgtattagtttgtggaggttttttgttgttgttattgttgactcttttgattttctacatagaaaatcatgtcatctcaggacaaaaatagttttatttattcctttccaatctatagatattttatttccttttttttaaaagtctcattgtattagctaggacttccagtacagtattgaatagttgtgaaagggacatctttgccttgttcctgatgtttatgaggaagcttatagtttattacaattaagtatgatattagtggtagaatttttgtggaaagtataattttcttctcttcctgtgctttgtgcaccttatttctcatacctttattctacatatgctaag

SEQ ID NO: 597121 - DNA, 657 bp, Homo sapiens
acatctttgccttgttcctgatgtttatgaggaagcttatagtttattacaattaagtatgatattagtggtagaatttttgtggaaagtataattttcttctcttcctgtgctttgtgcaccttatttctcatacctttattctacatatgctaagagcctcttaatacrttcagtgtgtatatacatatatatcttctgtagtcttttaaaagtatagaaatgtacatataaatataaatatagattggagatcttttgtatttacccattttcatgtctttcctttatttatgcagacctggaatttcatttggtataatttcttttagccttaagagtttattttaccatgtcttgtagtgcaaagccacgagaagcaaattccctcagtttatatcatctgaaaattaccttatttaccttcctttttaaaggcaactgatagatagataaatagataaacagatatatagatagttcatacttaggttgatgtttttttcttttagcattttaaatatattattactttgtccaataatatgttgtcaattatttttatttgtatttatttttgctttttaaataatttcaacttttatttcatattcaaggggcacatgtacaggtttgttacctgtgtatgttgtgtga

SEQ ID NO: 597122 - DNA, 657 bp, Homo sapiens
acatctttgccttgttcctgatgtttatgaggaagcttatagtttattacaattaagtatgatattagtggtagaatttttgtggaaagtataattttcttctcttcctgtgctttgtgcaccttatttctcatacctttattctacatatgctaagagcctcttaatacattcagtgtgtatatacatatatatcttctgtagtcttttaaaagtatagaaatgtacatataaatataaatatagattggagatcttttgtatttacccattttcatgtctttcctttatttatgcagacctggaatttcatttggtataatttcttttagccttaagagtttattttaccatgtcttgtagtgcaaagccacgagaagcaaattccctcagtttatatcatctgaaaattaccttatttaccttcctttttaaaggcaactgatagatagataaatagataaacagatatatagatagttcatacttaggttgatgtttttttcttttagcattttaaatatattattactttgtccaataayatgttgtcaattatttttatttgtatttatttttgctttttaaataatttcaacttttatttcatattcaaggggcacatgtacaggtttgttacctgtgtatgttgtgtga

SEQ ID NO: 597123 - DNA, 470 bp, Homo sapiens
tatcgttgatgcagtaacaagctcgtgaagcttgwtgttgaaattttttttatctcaaaaggaattttaaatattctgaatttttagaagtctattaatataaatgtttcaagtttctataacacccacttttgttggttttcagatcagatgctactcactaaggatagtaaatgagacatttggctgaaatctcacttggcatgcctgatgatgttggaaagtcagcttattttatggttaatatctgaaggggcaaaggatgagtaagaggaagtgatgttctaatatttttagctccttcttatccaagcaactgaagacctcacatctaaccatttctctttcatttttttctgtctttccatcctttcattgttgttcttctattgtgcatccttacgtgtgtgtgtgtgtgtgtgtgtgtgtgtgtgtgtgtgttgtgtggagagatggagagattaagaaga

SEQ ID NO: 597124 - DNA, 328 bp, Homo sapiens
ctcttgttgcccaggctggaatgcaatgccatgatctcagcccactgcaacctccaccttccaggtacaagtgattctcctgtttcagccccccaagtagctgggattacaggcatgcccaccacacccggctaatttttttgtrtttagtagagacggggtttcgccatgttagtcaggctgttcacgaactcctgacctcaggtgatccacccgccttggcctcctaaagtgctgggattacaggtgtatgccactgctcccggctcacagcctaatatgtgtcaggtattaagttacattctgagaataggtgtcaaagatgaat

SEQ ID NO: 597125 - DNA, 492 bp, Homo sapiens
tcctctgggttcttatagcacctgtyttcggtaccattcccaaagcatttatcccacaatatctttcattgtgggtgactcatgtgtgctttaatgaatgatcagatagtgcccccactggatggaaagcttctgaagggggagaaataaaggcccacttttttagaaatctcagcatgtctcccagcaaatagcacagtgcttctcacagcaggtgctcaataagtgtctgttaaaggaatgaatgaagacataaatgtacgagaaacagtatatttaaattcttgcaacagaattcctcttttcacccatggttacctatgtattttgatacttgaacacattcttatacacacatcctatataaatatacaaaccgagggctcccttgggctatctcctcagacgtgtgagtctgtgagtgtggcctgcacatcagcatgcccaggcagaaggaaaaacaagcaggcactcccaactggggaagtcatt

SEQ ID NO: 597126 - DNA, 613 bp, Homo sapiens
tcttgcatgcacttctgcataaaacctttcagggtcctagagttacttgtttcttaacatatagcagttgcaatactttgtatcatgccyttccacagaacatctagctaggcatatttctttttgttctacatctagctaggcatgcttctttttgttctatgttcagacagtcttctagtgaagtaggttgagattatgcatcatgcctaagtgggatgcttaatctcatttaataagtgggaaaactgaggttgcgtttcttatggctgcttattacgcctatgtgtgccaccataatcacctgggccaacttcgtcaatagggtgatcattgtccctgaactgatggtggtgggaatgagcatatcgtcatcacccttccttaggaagtgccagaaggaagacaggcgataagatgccacataaaactcagtaaccttactggaaagagtgccttctctgtgctagtctaaatgccacactctgtgtctttttcaggtgctgaaagtatctggaagattccattattatcaggatgactcacaaaatttaataattacttgtttttgctttgttttgtgtgcccatgttttacatgatgtgaccttctg

SEQ ID NO: 597127 - DNA, 613 bp, Homo sapiens
tcttgcatgcacttctgcataaaacctttcagggtcctagagttacttgtttcttaacatatagcagttgcaatactttgtatcatgcccttccacagaacatctagctrggcatatttctttttgttctacatctagctaggcatgcttctttttgttctatgttcagacagtcttctagtgaagtaggttgagattatgcatcatgcctaagtgggatgcttaatctcatttaataagtgggaaaactgaggttgcgtttcttatggctgcttattacgcctatgtgtgccaccataatcacctgggccaacttcgtcaatagggtgatcattgtccctgaactgatggtggtgggaatgagcatatcgtcatcacccttccttaggaagtgccagaaggaagacaggcgataagatgccacataaaactcagtaaccttactggaaagagtgccttctctgtgctagtctaaatgccacactctgtgtctttttcaggtgctgaaagtatctggaagattccattattatcaggatgactcacaaaatttaataattacttgtttttgctttgttttgtgtgcccatgttttacatgatgtgaccttctg

SEQ ID NO: 597128 - DNA, 613 bp, Homo sapiens
tcttgcatgcacttctgcataaaacctttcagggtcctagagttacttgtttcttaacatatagcagttgcaatactttgtatcatgcccttccacagaacatctagctaggcatatttctttttgttctacatctagctaggcatgcttctttttgttctatgttcagacagtcttctagtgaagtaggttgagattatgcatcatgcctaagtgggatgcttaatctcatttaataagtgggaaaactgaggttgcgtttcttatggctgcttattacgcctatgtgtgccaccataatcacctgggccaacttcgtcaatagggtgatcattgtccytgaactgatggtggtgggaatgagcatatcgtcatcacccttccttaggaagtgccagaaggaagacaggcgataagatgccacataaaactcagtaaccttactggaaagagtgccttctctgtgctagtctaaatgccacactctgtgtctttttcaggtgctgaaagtatctggaagattccattattatcaggatgactcacaaaatttaataattacttgtttttgctttgttttgtgtgcccatgttttacatgatgtgaccttctg

SEQ ID NO: 597129 - DNA, 606 bp, Homo sapiens
ccacatatagagcacagatgaagtagtttagcataattcttaagggccctaggattttcaaaatggtaaataagcactgacttcaacttaaagtcaccaactgcattagcccctaggaagagattactcaaagcctgtcctttgaagttgaagccaagtattgacttctcctctttagctatgaaagtcctagatggcatcwtctttcaatataaggctgttttgtctatgctgataatctattgtttaatgtagccaccctcgtcaatgatcttagctggatcttctgactaacttgctgcagcttctacattattagcacttgccacttccccttgcacttgtatgttatggagatggcttctttccttaaacctcctgagccaacctctgccaacctcaggcttttcttctgcagcttcctcacctctctcagccttcatagaattgaagagagttagagcctttctctgaatagtttttagctgaagggtatgttgtggctggtttgatcttctatccaaacactcaaatttctgtatatgagcaataaggctgttttactctcttatcattcatgaattccctggagttgcactttttatt

SEQ ID NO: 597130 - DNA, 631 bp, Homo sapiens
aaatgtcttacacaattatgagtctggggttggaagaaaggaaatttggtgggactgcagcctgaagtatccatccaaaggatagaaatctcaccagtaaccacgtgccttgtacaatagcactgtttgcaaacccttgccacagacagcatcttgtaaacctcgagacctcaggaaaccttcgtaccccccatacctctagcccctcttgagattccaaggcccaggggtgcctccagcctcatttatccctgggacttcagcaaactacactacccaactatgtcaccagatgagagcagaaaagtctgaacctccttccctagacttgtgcagagagggagagcctgccagaaaaagggwcacagaagagccatctcagccatattgctttgagatgtcagtaggatatatgtgtatccccttccttctcccacagtaaggagtctcacagagccagaaggtggagatggggggaaggcagtctgaaggggtggatactaaagaatttggaagtcatctgcagagagacaattttttgaagatatccaaaaaagagaaaagatagtgaagtttgggggcttcagagagaaacttcatattcagatttacaagtggctaaaagaggcac

SEQ ID NO: 597131 - DNA, 375 bp, Homo sapiens
agaaattctttgaactcaatgataatagtgacacaacctatgaaaacctcygggatacagcaaaggtggtactaagaggaaagtttatagcattaaatgcctacatcaaaaagtctgaaggagcacaaatagacaatctaaggtcacatctcaaggagttagagaaacaagagcaaaccaaacccaaacccagcagaagaaaagaaataaccaataacaaagcagaactaaatgaaattgaaacaaacaaacaaacaaaacaatatgaaagataaatgaatcaaaaagctggttcttttaaaagataaataaggtttattatttatttattatttattagcgagattaaccaagaaaagaagagagaagatctaa

SEQ ID NO: 597132 - DNA, 593 bp, Homo sapiens
aagttatgcaggttacccaaggccatacagcaggctagaaactgagcgggaattctatttagcacctgaactcccagccttgtgtgcagaccacattgtctgtaaacaaactagctccagctaaactagataaatatgcctgaaaatagttacttgtggatgccaaacttggccttttatgcatagtcaataagcaaaagaatccaaaagtaagtagggccctttgcacacacatgatcatgagaacctagctctgagagaccacgccccaaggagtggaggaccggccatcttsggtggtgatcatagtaattatccattacatttggatggcctccctcagattttgaaacactttcatgtgatttatctcagaagttcttgccagacatcctaggaggctgatattttttgttttggttggtgctccaaggagaccagcaactcagcactgggagcctaacctgccctaatgagcataaggaaatgggcgcaaaccctggtttttagataaacacaagaagtgatctctggggtcagatttaagtgggcgagatagacagcattaccttgacaaggggcaaggtagaaac

SEQ ID NO: 597133 - DNA, 560 bp, Homo sapiens
tgttatgtttgactagttggattataaattctttaagaatacggcttgtggccaggcgtgatggctcacgcctgtaatcccagcactttgggagactgaggcagrcagatcacctgaggtcaggagttccagacccacctggccagcacggtaaaaccctgtctctactaaaagtacaaaaattagccagacatggtggtgggcgcctgtaatcccagctacgcaggaggctaaggcaggagaattgcttgaacctgggatgtggaggttgcagtgagctgagatcgtgccactgcactccagcctgggtgacagagtgagactccagcaaaaaaaaaaaaaagaataggggttgtatttagtagagagcctagcatagatccaggtacatcatgggagatcaataagtagcttttcactgatcaaatgtaaacacattactggagaagctacttcattgctcggaaacttcctgaaacatatgtagtgttaggtatacaatatccttgcccatgctgaggtgttaaaaaaaagttcttctcaaagccaaatgaatcata

SEQ ID NO: 597134 - DNA, 560 bp, Homo sapiens
tgttatgtttgactagttggattataaattctttaagaatacggcttgtggccaggcgtgatggctcacgcctgtaatcccagcactttgggagactgaggcaggcagatcacctgaggtcaggagttccagacccacctggccagcayggtaaaaccctgtctctactaaaagtacaaaaattagccagacatggtggtgggcgcctgtaatcccagctacgcaggaggctaaggcaggagaattgcttgaacctgggatgtggaggttgcagtgagctgagatcgtgccactgcactccagcctgggtgacagagtgagactccagcaaaaaaaaaaaaaagaataggggttgtatttagtagagagcctagcatagatccaggtacatcatgggagatcaataagtagcttttcactgatcaaatgtaaacacattactggagaagctacttcattgctcggaaacttcctgaaacatatgtagtgttaggtatacaatatccttgcccatgctgaggtgttaaaaaaaagttcttctcaaagccaaatgaatcata

SEQ ID NO: 597135 - DNA, 530 bp, Homo sapiens
  misc_feature 47: n = A,T,C or G
ttgtgaaagagagctgcgcttcagccaggagcacctcccttgagcanttatatgagaaacaaacttctattgtgttcaaaccattatacatttggcatgtatttatgacagcaattcagcctaccctaactagtacatccattaagtgaatgaacaaaggtacaactgttactccacccttacttgactccagagaagcatataattgagaaggaaagaatatttgcctaataacaaaagggaagaaagccataggtgaatgtgagttatatttgcataaaataagattgagaaactttgtgcratgaaggttcttacagcaaagacctgggtttttcattgtgaactgtctcattggaactattaattatccaatggataaaacagaattccttggggacatgttccttgttgatttgtgggccttaaacatattaggtactcaataaatacttgttaactaaaattaaatcaagggggtaagaatcccaactccagcctatttctagaaatggagcatagccaattct

SEQ ID NO: 597136 - DNA, 595 bp, Homo sapiens
aatcccctgcaaggaagaggcccccatccccawtaaggcagctggtttccattagatgttccaagccctataaatattctcttttctcacttatctcttattatttttcctttccctttctcatgttcccgcctctggattccctcctgggaggaggcctaaattaaaacgggaaggcttgccaagctttgcattaaccatcctgttatgccccaggcccctggctgagcacagcccagaaaagagcttcttgtttgtccagtttgctgctccccacacggaaggctgacatgctcccaggaaggaggaagggttgagctgagcctgagctggagggtgtggccagaaccatctcacctgcgtgctgtgggttgtgttcctggctaagcctgttgggtcctctgtcaagcttgtcttgtccatagcagtggatactgtacagtgtcttgggcacagctttggagggcaacactctggggttcagatcccaggtcctttgttcacagagaatctgacttcaggcaagttacacaacctttctcatttgtacaattgtgctgataacacccacctcaaaggacggttaagaggatga

SEQ ID NO: 597137 - DNA, 512 bp, Homo sapiens
gttctgacttttatgtcttttattattggcctcacctttctgaatttattcttcatttcaaaaataatatttgcataagtcttcaacttctcacacccacaaaaactttcaaaattaattttgacctttcgatattatggaaaaattttctgtgcatttttcttacaagactacttttccctaaaattatacgtcaactcaaatcttgcatcaccttctgcagagatgaattgtccayattcagtagtacagactccttttctctccaggttgctgttgtgttatccagcttattttacgaaaaatttgcctctgaacccctggggactatctctaggaaattagatcagcaaacttcctgtattttgagaaaaataactttggagaattgaaatgtgtctttttaagggattgcaatatgatgtgaaggctcctcctcattccaaggtaaccatgagggactgaggacataggctgccctcagaaatacaatctattagactcagagatgt

SEQ ID NO: 597138 - DNA, 595 bp, Homo sapiens
ctttttgcctcactggaaagtaaactccatgaaagtaggctctatgaatggttttgctgattgtggtatccataggacctagcagtacttggcacatgacagctgttcaatagaggtctgtttagtttgtttacttgttcagtcatttgttattttattcatgtaacatgtattgaatgctggtctaggcactgaagaagttaaatgaagtgttaaaatatgtatatgtgtatgtttgtgtgtataagttttctacagctccagatctacgcgtttctgataaattagtagcattgattctgaaggcaatagtataggaatatttgctagtttaagttactgayggagctgcgataactattactatgtgggtgaggaaacctcttttctgatgtcagagggaagaatctttctattagaagttaaatgtattcctagaatataattttaaaatgtaaattagtctttcgttagaaataacatttaaaaattgcacttataaattttaagtctaatagtagcaacataagtatattagtctgttctcatgttgctataaggaaatacccacgactgggtaatttataaagaaaac

SEQ ID NO: 597139 - DNA, 447 bp, Homo sapiens
gtttctgataaattagtagcattgattctgaaggcaatagtataggaatatttgctagtttaagttactgacggagctgcgataactattactatgtgggtgaggaaacctcttttctgatgtcagagggaagaatctttctattagaagttaaatgtattcctagaatataattttaaaatgtaaattagtctttcgttagaaataacatttaaaaattgcacttataaattttaagtctaatagtagcaacataagtatattagtctgttctcatgttgctataaggaaatacccacgactgggtaatttataaagaaaacaggtttgattgactcacagttccacatggcyggggaggcctcaggaaacttacaatcatggccgaaggcacctctttacagggcggcaggagagagagagtgccagcaggggaaatgccagatg

SEQ ID NO: 597140 - DNA, 462 bp, Homo sapiens
atattcaataaattatcgataaagatagccccctattgtgctactgactagatcttatttctactaactgtatttttgtacccattaaccaacccctctttatcaccctctccccattatccttcctagcctctggtaaccatcattctactcwctaattctatgagatcaatgtttttagctcccacatatgacaacatgcaatatttgtctttctgtgcctggcttatgtatttgatgttattgtaattgcaattgttttcttaatttcattttcagattattttctgctagtgtttagaaatgtaatttatttttatgtcttgaccttgaaccatgtaacattgctgaatggctgttttttaagctccaataaactttgtgtttatatggattcctaaagaatgttctacatacaagatcctgtcatctgcaaatagcaattgttttacttccttcttc

SEQ ID NO: 597141 - DNA, 579 bp, Homo sapiens
attcaataaattatcgataaagatagccccctattgtgctactgactagatcttatttctactaactgtatttttgtacccattaaccaacccctctttatcaccctctccccattatccttcctagcctctggtaaccatcattctactctctaattctatgagatcaatgtttttagctcccacatatgacaacatgcaatatttgtctttctgtgcctggcttatgtatttgatgttattgtaattgcaattgttttcttaatttcattttcagattattttctgctagtgtttagaaatgtaatttatttttatgtcttgaccttgaaccatktaacattgctgaatggctgttttttaagctccaataaactttgtgtttatatggattcctaaagaatgttctacatacaagatcctgtcatctgcaaatagcaattgttttacttccttcttcccagtcgagatgactttgattttattttcttgcctaattgccctggctagaatctccggtaaaatgtttaatagagtagttagaatgacatccctgtctatttactgatcttaagaaga

SEQ ID NO: 597142 - DNA, 548 bp, Homo sapiens
atgatttaccagtgctttctatcattaataaacatgctgtctacactagatcactaatagaattatttagtttccactgtcccaatttactgtattcttttgctaaatggtgtcacagaaaggagttcattgaaaactatatttcctgtgtcttacatccagtcttgccattatgtattctagaacgttgaataggatcaatgttaaaaatctattggattctaaaccatagatacaaccaagaattacccatgggataaaattggggaacacaayagagggaggtggaaacttataaactagaagatacatgtccctaaaagtactcagattcaataacctcttctgtactagtcaacagattcttaacagctttatgtgtctgtcctataagccaccagtttgtgacttcttgttaaaagggctatttgccatcaatatctttttcaaaatcagacagacattatcatcctcagttctcactgatttctcagaagccacatacaaggattcagcaagctcctttgttctttgaaaataggctgagt

SEQ ID NO: 597143 - DNA, 567 bp, Homo sapiens
ataaatggctttaaattccctaatgaatgagtcaagttactgacaagagcaatcaaaatatattccatatgtgattaacaacacttaaatttgacattgacaaatattatttaatttatacaacagtagaatcacaagtgtatgtagtctctaagtctccaggttacaataaattatggaaagaatgagaatttcagtcagcatgcttactttatttttgtccttgaccttttgcctagaatgtatttgttaattcgggtgtaggtcagaaaaactgrtgccccccgccccctgagtctctctctcacatacacacacgcgtgtgcacacacacataattagaaatgacacttcttcacagaattctcccttcggcattgaagaaacatataaagctacactctatcaatttgtaactatgtaactactgatcccatcttcccattaagtttattaagtacctattagatgccagacactatgctaaacattgagaatcaatagaaatgagatatacatgggtctgcctcacagagcttacagtctaacagattcagtggaatgaat

SEQ ID NO: 597144 - DNA, 553 bp, Homo sapiens
gtaagcccaataaatacacaaggaaagcttcatcttttctcaagtccatcccccccccgctacacatagtagctactcaagtagaacaaaaacctagacattatggccaaaattttgacatctaagccctaaaaggaataagtcactattgaaattccaaaaataatttggagaactaaaattgactttgtatactagaatatattgatatataatataatgtcttagttatgaaataaacatctcttcaaactgtaggatgtaaaccaaacttgtattaatatgtgaaaaacaatttctaatttaygtattggaggaaaaatatgttctctaaatggaaggttaaaaaactaagcaaaacacttacaaattctgtgctcctatgaaagagcctatgagaaaaatgtttggagtcagtgaccaggtttgagctgcttgccacagggagaaacctgtcaaaggggtaagagttgaaggcttcccaccttttcgaatgtgcagaataaaatttagtgataaaaatgctttctaaagccatgcaactcaaaccata

SEQ ID NO: 597145 - DNA, 553 bp, Homo sapiens
gtaagcccaataaatacacaaggaaagcttcatcttttctcaagtccatcccccccccgctacacatagtagctactcaagtagaacaaaaacctagacattatggccaaaattttgacatctaagccctaaaaggaataagtcactattgaaattccaaaaataatttggagaactaaaattgactttgtatactagaatatattgatatataatataatgtcttagttatgaaataaacatctcttcaaactgtaggatgtaaaccaaacttgtattaatatgtgaaaaacaatttctaatttacgtattggaggaaaaatatgttctctaaatggaaggttaaaaaactaagcaaaacacttacaaattctgtgctcctatgaaagagcctatgagaaaaatgtytggagtcagtgaccaggtttgagctgcttgccacagggagaaacctgtcaaaggggtaagagttgaaggcttcccaccttttcgaatgtgcagaataaaatttagtgataaaaatgctttctaaagccatgcaactcaaaccata

SEQ ID NO: 597146 - DNA, 553 bp, Homo sapiens
gtaagcccaataaatacacaaggaaagcttcatcttttctcaagtccatcccccccccgctacacatagtagctactcaagtagaacaaaaacctagacattatggccaaaattttgacatctaagccctaaaaggaataagtcactattgaaattccaaaaataatttggagaactaaaattgactttgtatactagaatatattgatatataatataatgtcttagttatgaaataaacatctcttcaaactgtaggatgtaaaccaaacttgtattaatatgtgaaaaacaatttctaatttacgtattggaggaaaaatatgttctctaaatggaaggttaaaaaactaagcaaaacacttacaaattctgtgctcctatgaaagagcctatgagaaaaatgtttggagtcagtgaccaggtttgagctgcttgccacagggagaaacctgtcaaaggggtaagagttgaaggcttcccaccttttcraatgtgcagaataaaatttagtgataaaaatgctttctaaagccatgcaactcaaaccata

SEQ ID NO: 597147 - DNA, 479 bp, Homo sapiens
attataagattaaatctgattcaattttatgtcccaaggtctatagcctttagtcatcaccataatcatcattatcatcatcttcatcatctccatctcaatcttacaaagctgaagaacccaaatagcaagctaatgaattttaaccactcaacaaatgacggaaggagcaaacatatcttcaactagaaaagtataaattttgacccaattctgaatgtatattgataagcacaccaatcatcagtctaaaaggggtttrcaataatgcttaaatgcatacatatcttagcaggaaacaactgtcatataacagattacttatctattggaaagtatatatgaggtatttaaatgccagaaactatctgctagattttccttgacttcctaactaaaagggaagctccttaaggttaaatatgtcacgctatattattgcacttccatgccatgatacttagtgggtctgaacacac

SEQ ID NO: 597148 - DNA, 597 bp, Homo sapiens
gaagatacatatcttacccttcctgtataaggtaatccataacttgcaattagtgataaatcatccttaaatgtgtattttaacacaaaaatacatttaaaaatgatcatcaaaatactacattgaagacactggatccaggactactaacattttctgataaaatataaaataatttttaaatttttctaccaccctctaaattttatcattttataaatttttaaataggaaaactggccatatctaaaaacatatttttacagccatgtcatcacattttataacttggtggttagtaaataccatattgccatctctaagcaatatgtaatctatttttacataaatccataggcaactcaatgaatcttcattctccaatttgtcattgttaaaatagctaatatttttctaatgcaatatcacatatacttagaagccttaattcccctttagcagaacctgtagcattatataggcatttgctttaatgtcaaaaattctgggttcatctttaagagacacatatcrtagcactctacataaatatgaattcaagcatcctaaagtactaaattttttaaaggcaagaaa

SEQ ID NO: 597149 - DNA, 604 bp, Homo sapiens
tgacatcaacctcacggacttttagtatctataaataatacaatccaacttttttattgaaaattaggaaaatgaaaatatttataagctccagtgtggtaactgatggcctttaagtggctactggtggctttaaaaattaagattctaaaaagaaaggtcaactcaaacaattgactcaggatgagatycaaaacaaaataaagtaaggaaagagacaaacatgtctgatcttttatttgaaatataggatgttaggtgccaattttgatattgcaaatgattaatcagtctgagagtacaaatgcaaacatggaaaggctggggtaagtacaaataatcttaatcttctgatttttaaagctttagaagtgtttttaatctcctttcctggttattttggtttagcactttacacaaaaatcttaaattaattgttcatttgtcttaacttatatgcctaataaagcagtttaggagtgttaattgacaactctgaatgttgatgtttaaaacaatctagttgagaagacaagaatcagataattatcattcagtcaatagtaactgaaattcatcctgtcctgtgtgaaggaccctgcta

SEQ ID NO: 597150 - DNA, 604 bp, Homo sapiens
tgacatcaacctcacggacttttagtatctataaataatacaatccaacttttttattgaaaattaggaaaatgaaaatatttataagctccagtgtggtaactgatggcctttaagtggctactggtggctttaaaaattaagattctaaaaagaaaggtcaactcaaacaattgactcaggatgagattcaaaacaaaataaagtaaggaaagagacaaacatgtctgatcttttatttgaaatataggatgttaggtgccaattttgatattgcaaatgattaatcagtctgagagtacaaatgcaaacatggaaaggctggggtaagtacaaataatcttaatcttctgatttttaaagctttagaagtgtttttaatctcctttcctggttattttggtttagcactttacacaaaaatcttaaattaattgttcatttgtcttaacttatatgcctaataaagcagtttaggagtgttaattgacaactctgaatgttgatgtttaaaacaatctagttgagaagacaagaatcagataattatcattcagtcaatagtaaytgaaattcatcctgtcctgtgtgaaggaccctgcta

SEQ ID NO: 597151 - DNA, 472 bp, Homo sapiens
tagggaagcctcgcgtccacccaaaggctctacgagcgtctatggttcttccttttcagacaggataactcaacctgcagttctgagagaaatagggcgacggatctcaaactttcctttgcaaagccagtttctgaaaataacacgttcccccattgataagtgaagatcagtagcctcaagaaaacaatacttggtaggcacctggcctttcagaattgaagggggaaggaatggcaaagcagwtagcagaaaacccgggtactagtagcaagatccgggagacatctaaccggaaagaaataaaaaaccattagtttcccgaagccattcttattctgaacgctgttcgttaagagaatcatttactaaagctctcttgtagtagcctttacaaaagctttatttcattcagtaagaaagcgccccgtcccaaatctaaataaaccttacatagatgaggctccggaaa

SEQ ID NO: 597152 - DNA, 472 bp, Homo sapiens
tagggaagcctcgcgtccacccaaaggctctacgagcgtctatggttcttccttttcagacaggataactcaacctgcagttctgagagaaatagggcgacggatctcaaactttcctttgcaaagccagtttctgaaaataacacgttcccccattgataagtgaagatcagtagcctcaagaaaacaatacttggtaggcacctggcctttcagaattgaagggggaaggaatggcaaagcagttagcagaaaacccgggtactagtagcaagatccgggagacatctaaccggaaagaaataaaaaaccattagtttcccgaagccattcttattctgaacgctsttcgttaagagaatcatttactaaagctctcttgtagtagcctttacaaaagctttatttcattcagtaagaaagcgccccgtcccaaatctaaataaaccttacatagatgaggctccggaaa

SEQ ID NO: 597153 - DNA, 653 bp, Homo sapiens
tatatccaggaaagcaacgtttacattttaaaacacctggcactgttgcactgcaaatcttacagtatttttttgtctgctgtgttcaatagtgtgatgaaattcaagcaggaatgacattggaaacttggactctgtactagaaagaagtcacttacaaaatcactttagaacattggctttcttttcacacacacacacacacacacacacatacaaaaaaacataaagcatacattataatctttctaccttctaattcattaactttttgtggttgtaatctatagttttgtcatcttgttaaaattttatttgtattgtttaagtgtgggacattttcagccttatttttctaactaaacccactgtgtttttacaatatatgaaaaagtaaagagaacagatatataaattaattacaaaatagaacaaaatttcttatccaatgtcatatgatgctgaaattctatcataacctctgtgctttttgtaaataattcccaataatttttagatcaagatattcctatttccagcatctcctagacaaaayaaaatcttttgcattctcttcaaaggaaacaaagtagtaaagattctcctaatttaacagaaattttttgttgatacttcttaccttctacaggcat

SEQ ID NO: 597154 - DNA, 622 bp, Homo sapiens
gatcagggtagtggttgctgaaggttggaattgctgtggcgatttcttaaaataagacaataatgaggtttgctktgtcaattgactcttcctttcacaaaagatttctctgtaacatgcaatgctgcttgatagcattttatccacagtagaacttctttcaaaattggagttagtcctctcaactctgccactgctttatcagtcaggtttataaaatattcaaaatcctttgttgtcatttcaacaatattcacagcatcttcaccatgagtaaattccatctcaaaaaaaactactttgctcatccacagaagcaactcttctagcatctagaatggtgaatgatctccagaagcttttcaatttactttgcccagatccatcagaggaatcattatctatgacagatgtagcctagcaaaatatatttcttaaataagaagacttgaaaggcaaaattactccttgacctatgggctgcagaacagatgttgtgttagcaggcatgaaaacaacatgaaccttcttgtacatcttcatcagagctgttggatgaccaaatgtattgtcaataagcagtagtattttgaaaggaatctttttgtgaagccagtagctc

SEQ ID NO: 597155 - DNA, 622 bp, Homo sapiens
gatcagggtagtggttgctgaaggttggaattgctgtggcgatttcttaaaataagacaataatgaggtttgctgtgtcaattgactcttcctttcacaaaagatttctctgtaacaygcaatgctgcttgatagcattttatccacagtagaacttctttcaaaattggagttagtcctctcaactctgccactgctttatcagtcaggtttataaaatattcaaaatcctttgttgtcatttcaacaatattcacagcatcttcaccatgagtaaattccatctcaaaaaaaactactttgctcatccacagaagcaactcttctagcatctagaatggtgaatgatctccagaagcttttcaatttactttgcccagatccatcagaggaatcattatctatgacagatgtagcctagcaaaatatatttcttaaataagaagacttgaaaggcaaaattactccttgacctatgggctgcagaacagatgttgtgttagcaggcatgaaaacaacatgaaccttcttgtacatcttcatcagagctgttggatgaccaaatgtattgtcaataagcagtagtattttgaaaggaatctttttgtgaagccagtagctc

SEQ ID NO: 597156 - DNA, 510 bp, Homo sapiens
ctacctagaaatgaaatggctggatcatatggtagggtatgtttaacttaaaaacaagaagtattttctaaagtgtctgtgccattttgtattcccatctgctgtggtggagagcttttggagcacttctagctttctacaaaaggctttgtattatatccaaactccttacctcaaatccccacaacatctcataaagcagacgatataaacccayttatcacatgaaaaaaaaaatgagacaatctacctgttattatatattggagctgagattcaaaccagatctatctaaagtcagagccagtcattgattttttgtttggcttggttttgttcttgtttttgttttcccagcctcctctctttctgcctccaacccctgtatcacagggagatcaaactcatttggatctggatatggaaaaggctttagccagagaacctgggttcattagtaagaataaagagaagagattagtaagagagatagaataaggagaaaaatta

SEQ ID NO: 597157 - DNA, 605 bp, Homo sapiens
caattaaattaaaacttacgagtcccagttcatagttcttagcttgtaggattgctacctacaagccattcatccccacttgtctcctcttattttatttgatgttaaccaagttatttctaacttatgcaataatgtgtctctcacttatcttttaaatgttttttaaaaacatttacagaatattttcatgtaatcaagtgaatggaaggaagcacagaattcattccacacaacccaaggttacatgcatgttattaacttatgctatccccatcccctagcatggtaccttacacacaataaatactctataaatactttgtggtcaaaactcaggaaaccaaacaggccaactgaatagacacatgccatggagataagtcaagaagaccatttcacaaagtgatgtgagaaacaactgaggcaggaaaactgtcctacatgtagtaggcaaatataacaaaccaccccaaaacttagttacttaaagaagaaacatttatttagttcacatttctgtggattggcaatttgtttttggctyattcttcccgactcggttgggcttactcatgtgtctgaaatcaactggcagtgcattg

SEQ ID NO: 597158 - DNA, 565 bp, Homo sapiens
cttgctaggcaaaattttaaacttagccagtgcttaggtctccttaaaaacaaagaagtttggaaaggcaggtatggaggggttgtatagcatagtgatatccgtagaatcctggatttgaactttgggtaagcccttattcacagtatagctttgagtacattccttgacctctctgtgcttcacttttttcctctggaaaatgaaaacaatagtagtacttatataatagcgttctcataaggattaaagatgttaatctgcaccaggtggttaaaacattgcccrgcaaatagttacaatccagtaaatattaaacattaaagaaattatctgtgacacactgctttgacaaaaggtggatctttttcattggagtttttcaagaagccaccaagatttaaagaggattctcataatttaattaaagacttttataccctcttccagcaaataccatgggaaactttgcttgagataaagcagaggcatttaatagaaagatctgacttgggtagaacttttctcctactctctcctctaagtgtggtgtagctgctctgca

SEQ ID NO: 597159 - DNA, 555 bp, Homo sapiens
agctgaataacactgagatgttatctttcacgtgttatgtgctacccaaatattatcaattctcataagactgcctgaatattgtgagccacacatagctacctccaggccaatgcagtgattgctcattttacctaacattagtctcccttggttttaattcacgttcagatcttggcttttccagtggataaaatttcaacatgattttaaagtagtctccagcctctagtccagcagagttaaactcttggggactttcttcaagaatttcaattaatggactgaattgaaaaagcttktcctataaacaagtgatgagctatataggaaatttgactctgaacaaaatgccttggcagtcatttacacatccataatctaatagatgattttcaaactggaccacatatcaaaattatactgtaaaattaaagaaaaatgtttctactttagaaaaataggagcattttttactgtatgaagaatggtgaagtttctaaacagaacagttggcatcactttgagtagtctgctgatttggaaagagaaaga

SEQ ID NO: 597160 - DNA, 472 bp, Homo sapiens
ggctttgtagtgtatatatttactttgtatatacacatacacatgtatatatacacgtgtgtacatacacacacacttatctctgaaataattkttttaatttttaatttttttatcgttgcccaagtagtaaacttagcacctgataggtagtttttcaaccctttccctcttcctccctccccacacttggaatccttcgtgtttattgtttccatctatgtgtccatgtgtacggaatgtttagctcccacttataagtcagaacatgcagtatttggctttggcttgggttgatttcatgtctttgctattgtgaatagtgctgtgataaatatatgagtgcaggtgtctttttggtagaatgacttattttcctgtgggtatatacctagtaatggaattgctggatcaaatggtatttcaatttccagttctttgagaaatctccaaactgctttccacagaggct

SEQ ID NO: 597161 - DNA, 616 bp, Homo sapiens
ggatattaaatctgactacataattaatatgcctggcaatggtaattggaggtcttttagcaacatgacccatgatataaacattgttcttagttaaataaaatatcatcaattattgagacattataatttttgcattcttaaacaattttgttacacattataaatcattgatatatgacaaaagttttatgaggggacctgggcaagatggcygaataggaacagctcctatttgcagctcccagtgagatcaatgcagaaggtaggtgatttctacatttctaactgaggtacccagctcatctcattgggactggttagacagtgggtgcagcccacggaggacgagccaaagcagggtggggcatcaccttacctgggaagcacaaggggtcagggaactccctcccctagccaagggaagccatgagagactgtgtcttgaggaatggtgcattctggcccagatactacgcttttcccatggtcttcacaacttgcagaccaggagattcccttgggtacctacactaccagggccctgggtttcaagcacaaaattgggtggctgtttgggcagacaccgagctgctgcaggaggttttttttcaca

SEQ ID NO: 597162 - DNA, 373 bp, Homo sapiens
gaaaacatttttcaaagataattagtggaacactactcaggtaacatgcctgaagccctgtaattccaggactttttaaatgttttaacaaaataattgattatacatagcaacccgcygccccggcatccagcccttaatagggaggagctaactatttgctgttgggtaaggttaagtgcgtagagaaattgcaaatgttacttcttttttctttctctgtgtgtggatgccacccagagtccctacagtttaaggggttgtaggtgatctatttattttataattacttagcagaggatgggctctgacattttgcttttgtgccctcaatttctagctactccagtgaactgccatgtatgtttttgca

SEQ ID NO: 597163 - DNA, 596 bp, Homo sapiens
tgttattatttggttttgaactaccctgtggtaggaggtattccttacaactttcgctttgcawacatctatttcttgatttaattcaccaccactacaaatgccatcactcactgattcatcaaaaatcagataaataccaaagaaaaagaaatcaatatatcaaaaagatactcacactcatttttatcacatcactattcacatcgcaaagatatggaatcaacctaagtgtccatcagtggataactgcataaagaaaatatggtgtctatatataatggaatactattcagccataaaaagaacaaagtcatgtgttttgcagcaacatggatggaactgaagatcattatcttgagtgaaacaagccagacaaagtcaaatatcacatgttctcacccataagtgggagctaaacaatgtgtacacatggacatagagagtggaatgatagaggatggagactcagaatggtgagagggcaggagggggtgatgctgagagatgacttaatgggtgcagtgtaggttattcaggtgatggatgccctgaaagccctgacttggccactacacaatctacacttgtaacaa

SEQ ID NO: 597164 - DNA, 596 bp, Homo sapiens
tgttattatttggttttgaactaccctgtggtaggaggtattccttacaactttcgctttgcaaacatctatttcttgatttaattcaccaccactacaaatgccatcactcactgattcatcaaaaatcagataaataccaaagaaaaagaaatcaatatatcaaaaagatactcrcactcatttttatcacatcactattcacatcgcaaagatatggaatcaacctaagtgtccatcagtggataactgcataaagaaaatatggtgtctatatataatggaatactattcagccataaaaagaacaaagtcatgtgttttgcagcaacatggatggaactgaagatcattatcttgagtgaaacaagccagacaaagtcaaatatcacatgttctcacccataagtgggagctaaacaatgtgtacacatggacatagagagtggaatgatagaggatggagactcagaatggtgagagggcaggagggggtgatgctgagagatgacttaatgggtgcagtgtaggttattcaggtgatggatgccctgaaagccctgacttggccactacacaatctacacttgtaacaa

SEQ ID NO: 597165 - DNA, 506 bp, Homo sapiens
taactgcataaagaaaatatggtgtctatatataatggaatactattcagccataaaaagaacaaagtcatgtgttttgcagcaacatggatggaactgaagatcattatcttgagtgaaacaagccagacaaagtcaaatatcacatgttctcacccataagtgggagctaaacaatgtgtacacatggacatagagagtggaatgatagaggatggagactcagaatggtgagagggcaggagggggtgatgctgagagatgacttaatgggtgcagtgtaggttattcaggtgatggatgccctgaaagccctgacttggccactacacaatctacacttgtaacaaaattgtacttgtacccataaatttatacaaatttctaaaagggtaaaatwaaaaaagacaaatgtaaacactcttttgttctttattttaaaattgtgtaaataattatcttgtgtgattttattaatctttcttaaatgtctatataccacacat

SEQ ID NO: 597166 - DNA, 578 bp, Homo sapiens
acttaatgggtgcagtgtaggttattcaggtgatggatgccctgaaagccctgacttggccactacacaatctacacttgtaacaaaattgtacttgtacccataaatttatacaaatttctaaaagggtaaaataaaaaaagacaaatgtaaacactcttttgttctttattttaaaattgtgtaaataattatcttgtgtgattttattaatctttcttaaatgtctatataccacacatgtatttcaatgtttaatattataagtgtttggggtctttatttagaaatttgatgatgtttttatgaccagaaatatgtcataggagttaactcttgtctaaatcaattagcctatggtaaaattgatttcattatacatcatttcacttaagtcacagtttctaagaacctataaatgctattaagtgaagacttgctgaaatgtgttaagttctttctctgtctctttgaaawgtatgtaaatccttctaaatgctaaataagacttttgctagttttaagactcaggaatgtctttctcaaggacccaggagccatctcttggaaatctaaac

SEQ ID NO: 597167 - DNA, 572 bp, Homo sapiens
tgggtgccctctcaaacttccttccagaactttgattctgtgaaaagctgacaaagattacatgcagtgggaacatctcattggaaaattaggaaacctgggtcccagacacaggtctgtcactatttctgtgctcttcaataagcctggctacttctctgggccttgggaccacatttataaagtgaaccttttgtatctacacactccaaggtctttttctagtttaatatataagactataaaaaatgtaaatattataatatactgtgtaaagaaagatacctgaaatgcctagtcattgctctgattatattatcatttcttcaaacttcacatttctcttttttttgaagctattgtatagctataataagctccttttataccatattttcactttgccacatcttcaatcatctgaaatacaactgccctatcatctctaacaaagtagttcttcaaattgaattacattgttgttttctatgacactgaatctattctttcamaaggggcctttctcttagcctcagctaggaagttttattgctagttataattctaaagca

SEQ ID NO: 597168 - DNA, 598 bp, Homo sapiens
tgatttatttgaaaaataataaaagtttaaagcatgagactgaaattaattttatgtgtctgcagtaacctctttcacacatggattcagatttaatgtatsgtatttacaactatacagacttacacaatagaaactgcctgttatgtgaccctgatcttatccacggaagtacgttttcaattatgaggtgattaaggagcttatcatcaggaagtggctttatgcaacaatgattcctttttaactaagcacatattaaacacctaatatgtgccatgctattctgggaacaaggggcataaacatgaattatgaatagtccttgccatcctgcacagctatggaaagagatgtcagggacagggaagggagagcggggagagggcagtactgagaatggtgagcggaacaggagtggtggggagatatacgtggtaaaaggctaaataagcatgaaagcaatttacacctgtgctggcctcttgttctttacctggatttgtttttagccctttctgttagaaactcttaagtctcagctatgttgaataattagctttgggaaaggcagggtaaacacaagcttaatttatgt

SEQ ID NO: 597169 - DNA, 598 bp, Homo sapiens
tgatttatttgaaaaataataaaagtttaaagcatgagactgaaattaattttatgtgtctgcagtaacctctttcacacatggattcagatttaatgtatcgtatttacaactatacagacttacayaatagaaactgcctgttatgtgaccctgatcttatccacggaagtacgttttcaattatgaggtgattaaggagcttatcatcaggaagtggctttatgcaacaatgattcctttttaactaagcacatattaaacacctaatatgtgccatgctattctgggaacaaggggcataaacatgaattatgaatagtccttgccatcctgcacagctatggaaagagatgtcagggacagggaagggagagcggggagagggcagtactgagaatggtgagcggaacaggagtggtggggagatatacgtggtaaaaggctaaataagcatgaaagcaatttacacctgtgctggcctcttgttctttacctggatttgtttttagccctttctgttagaaactcttaagtctcagctatgttgaataattagctttgggaaaggcagggtaaacacaagcttaatttatgt

SEQ ID NO: 597170 - DNA, 598 bp, Homo sapiens
tgatttatttgaaaaataataaaagtttaaagcatgagactgaaattaattttatgtgtctgcagtaacctctttcacacatggattcagatttaatgtatcgtatttacaactatacagacttacacaatagaaactgcctgttatgtgaccctgatcttatccacggaagtacgttttcaattatgaggtgattaaggagcttatcatcaggaagtggctttatgcaacaatgattcctttttaactaagcacatattaaacacctaayatgtgccatgctattctgggaacaaggggcataaacatgaattatgaatagtccttgccatcctgcacagctatggaaagagatgtcagggacagggaagggagagcggggagagggcagtactgagaatggtgagcggaacaggagtggtggggagatatacgtggtaaaaggctaaataagcatgaaagcaatttacacctgtgctggcctcttgttctttacctggatttgtttttagccctttctgttagaaactcttaagtctcagctatgttgaataattagctttgggaaaggcagggtaaacacaagcttaatttatgt

SEQ ID NO: 597171 - DNA, 598 bp, Homo sapiens
tgatttatttgaaaaataataaaagtttaaagcatgagactgaaattaattttatgtgtctgcagtaacctctttcacacatggattcagatttaatgtatcgtatttacaactatacagacttacacaatagaaactgcctgttatgtgaccctgatcttatccacggaagtacgttttcaattatgaggtgattaaggagcttatcatcaggaagtggctttatgcaacaatgattcctttttaactaagcacatattaaacacctaatatgtgccatgctattctgggaacaaggggcataaacatgaattatgaatagtccttgccatcctgcacagctatggaaagagatgtcagggacagggaagggagagcggggagagggcagtactgagaatggtgagcggaacaggagtggtgggragatatacgtggtaaaaggctaaataagcatgaaagcaatttacacctgtgctggcctcttgttctttacctggatttgtttttagccctttctgttagaaactcttaagtctcagctatgttgaataattagctttgggaaaggcagggtaaacacaagcttaatttatgt

SEQ ID NO: 597172 - DNA, 479 bp, Homo sapiens
gattaaaggttaaaggtaagtcctcaaactataaaagttccagaagaaaaccaaatacatatatatatatgtatatatgtatgtgtatatatatgtgtgtgtgtatatatatgtatgtatatatgtatgcatgtgtgtgtgtgtgtatgtatgtatatatatatatatatatatatatatatatatatatatatatagcaaatgcaacaaaaacaaaaattgacacctgagacctaatttaaccaaagagcttctgcacaacagaagaaactatcggccgggyatggtggctcacgcctgtaatcccagcactttggaggctgaggcgggcagatcacaaggtcaggagatcaagaccatcctggctaacacagtgaacccttgtctctactaaaaaatacaaaaaattagccaggcacggtggcgggggcctgtagtcccagctacttgggaggctgaggcaggagaatggggtgaac

SEQ ID NO: 597173 - DNA, 479 bp, Homo sapiens
gattaaaggttaaaggtaagtcctcaaactataaaagttccagaagaaaaccaaatacatatatatatatgtatatatgtatgtgtatatatatgtgtgtgtgtatatatatgtatgtatatatgtatgcatgtgtgtgtgtgtgtatgtatgtatatatatatatatatatatatatatatatatatatatatatagcaaatgcaacaaaaacaaaaattgacacctgagacctaatttaaccaaagagcttctgcacaacagaagaaactatcggccgggcatggtggctcacgcctgtaatcccagcactttggaggctgaggcgggcagatcacaaggtcaggagatcaagaccatcctggctaacacagtgaacccttgtctctactaaaaaatacaaaaaattagccaggcacggtggcrggggcctgtagtcccagctacttgggaggctgaggcaggagaatggggtgaac

SEQ ID NO: 597174 - DNA, 588 bp, Homo sapiens
tcagtacacacagacataaagttgggaacaataaacactagagattccaaaagaggggaaggaggaaggagggcaagagttgaaaaactacctatcagrtactatgttcactacttgggcaacaggaacattagaagcccaaaccccagcatcactcaatatacccatataacatacctgcacatgtaccctctggatctaaaattaaataaatcaataagtaaaatatgaccactaagaaatgtagagacaaagggttttgtctcactaatcttgagtaaccttaaagagatttttctgagtaaccggtatactcaattggaattcagtccttctaatgccaatatgaccctgtctccaattaaaaaataatacatatgtcttaatgtatatgcaggtctccccttgttgaggtattcatggatttttgagacattccaatctaattgcctttcaagtttttctttgatcccattacctagcattataatcttaggttcacctggaattcttttctaggccttgcctaaccagtacctcagctagaatggaccacaccctcagcctgatccagagctaggccttagc

SEQ ID NO: 597175 - DNA, 588 bp, Homo sapiens
tcagtacacacagacataaagttgggaacaataaacactagagattccaaaagaggggaaggaggaaggagggcaagagttgaaaaactacctatcagatactatgttcactacttgggcaacaggaacattagaagcccaaaccccagcatcactcaatatacccatataacatacctgcacatgtaccctctggatctaaaattaaataaatcaataagtaaaatatgamcactaagaaatgtagagacaaagggttttgtctcactaatcttgagtaaccttaaagagatttttctgagtaaccggtatactcaattggaattcagtccttctaatgccaatatgaccctgtctccaattaaaaaataatacatatgtcttaatgtatatgcaggtctccccttgttgaggtattcatggatttttgagacattccaatctaattgcctttcaagtttttctttgatcccattacctagcattataatcttaggttcacctggaattcttttctaggccttgcctaaccagtacctcagctagaatggaccacaccctcagcctgatccagagctaggccttagc

SEQ ID NO: 597176 - DNA, 603 bp, Homo sapiens
tgaccctgtctccaattaaaaaataatacatatgtcttaatgtatatgcaggtctccccttgttgaggtattcatggatttttgagacattccaatctaattgcctttcaagtttttctttgatcccattacctagcattataatcttaggttcacctggaattcttttctaggccttgcctaaccagtacctcagctagaatggaccacaccctcagcctgatccagagctaggccttagcacagacttacagcatttattaaygtatcatttgctttcagttccaagacaaaaagattcatgaacccactatgtattcttgatatgaactctagtaatattccttcaggttctttcttgtaattacttaagaatcaatatggataggaattggctctcgagaattaaaatccaggtcctgttcaatggtgtagaataaaggataagacatagatctaggcaatgctaaagcccttaaaaagagttttaaaatctgtgctctgcagagcctggggttcctcagaggtatcataggagctttcacagaggggggaaattcagaagtgaggctctccttgctctctctcccacattctgaaccg

SEQ ID NO: 597177 - DNA, 629 bp, Homo sapiens
ttgtgaaattgctgttgaagataccatccatctcccttttataaagatcgasgcaattactctccttaaagctaagggacagaaaactcttctctttcctatttttgaaattccaagaaacctgtaatcccttaggtttgcctttagcctccagtaaactgaaagttaaatttagtgtttaagcagcaggggatggggcaggggtacattcagatgctgtgttttttgacccaattaccacccagttcttttctaattcagccaacatgaattgagtatttaggtgctaagcactgtgatagacgccaagggcacaaagattattaaaacaagatgctttccctaaaagagatcttggatgagtacctcttgttctttcattttattttcatgatctttctgtatatggacctttatttgtagcctatctcattcctatttttgaaaacagatatggtattagatacaagtaaataaaataaattagcatattctagaaaaagaaggcattgacttaaattcatctagaggcgtagataactaatactatattcttctctcttagcctcctaaatcatctcaaagactgagcccctcttccaacccatcctacacacaatcatctgatt

SEQ ID NO: 597178 - DNA, 629 bp, Homo sapiens
ttgtgaaattgctgttgaagataccatccatctcccttttataaagatcgacgcaattactctccttaaagctaagggacagaaaactcttctctttcctatttttgaaattccaagaaacctgtaatcccttaggtttgcctttagcctccagtaaactgaaagttaaatttagtgtttaagcagcaggggatggggcaggggtacattcagatgctgtgttttttgacccaattaccacccagttcttttctaattcagccaacatgaattgagtatttaggtgctaagcactgtgatagacgccaagggcacaaagattattaaaacaagatgctttccctaaaagagatcttggatgagtacctcttgttctttcattttattttcatgatctttctgtatatggacctttatttgtagcctatctcattcctatttttgaaaacagatatggtattakatacaagtaaataaaataaattagcatattctagaaaaagaaggcattgacttaaattcatctagaggcgtagataactaatactatattcttctctcttagcctcctaaatcatctcaaagactgagcccctcttccaacccatcctacacacaatcatctgatt

SEQ ID NO: 597179 - DNA, 622 bp, Homo sapiens
tgtaaaagtatgaattttatggaatgataagttacaatctcaaagttgttataataaaattttataaatcaaatatttaaaattacgattgaatatcatatgacataaagggattattgttaattcttggtatgataataatatcgtggttatgttttttaaacatgtcttatggagataatcactaaattattatamatttttaattaatggcaagtttatattgccaagggggtactctattgctggactcccatcacatggacatggtggccatggactctaaatcccagattcatgctttgatcttgagaaaatttctttgatactgcaaaactcagtgttctcttccagaaagcagaaattgttataaggattgaaaactcttagggcagttatgaaagccagtagctcatcaacaaatggtcattgttgttgggggtgggaggtgaaggtagttcttaactttattacgttgattccaagacacattttttttttcattttaacaattctgaagctaaggtgcatctactaatcagcggcattttgtagttttattaaaatattcttgcttttttaaaaaaatgtagatttagaggacacaagtgcagatttctta

SEQ ID NO: 597180 - DNA, 555 bp, Homo sapiens
aaatgacctattttccctaataaataatttgtatcattcttaagcccattttaactcctacaagaggccacttcataggatttagcacccttgagactttgggctaataatcctctcccttccccaaataacacaatttacagcccaatttctattccccagtagaacaaaatgcacagaggcaacttcactagaaagtttgtttttcaaacgctgttaaacgatttctttgcaatagtttcagcactgcagtaaaggaatcaccaggtcacagatgcctggtttctaytgattctcctagttaataaagagttaaacagtgaagtgtggtcttttatttttattttattttattttttaaaaaggcattttgaaggtgctggagagggaaggcctggtcctaagtggtcatgtggctcccgccattcatcttggtagtgactatctgtcaaaagtggcaagagtccctgttaacagccctgacctgagcggtaatgaagggagagtgcacggcaaagtgtccattatcagcaggtcgggagcagtaaattggag

SEQ ID NO: 597181 - DNA, 603 bp, Homo sapiens
taagctgtttcaagtatttggggggagtaagaaagaggtttagataaaatgacttttaagatggggaacacaaaaccccaataaaaacttaaatttaccgagatatttactggcagagctggaactgggattacagtttcccaaattttagttcatgatatttcctctcttctacatgaaatgaatggtgaggttttccttcttaatcattttatgtctgtttttaaaaatatggcagttccacaaacatcrtggctggatgttgtttgctggaacctgtgccccagcttttgaaggccacccctccctgccttatttgttgttttcaaaggcagtttttctataatgcagtgctgggtgcctggggtttgccagcaaacagaatgaaaagataaaggtcgtatatttcctgctacactaaacggtccctcaaaaatgcagaccaccactgttctgtcagcctttctgcaaagggatggcaaatatctaccttgaataaaagcatgttaaaaaaaaataaaacactttggcaagcagagaggtgagtcatatttcaacaaaggattaatgcaagtcctgttttgtttgttttgagaactcagt

SEQ ID NO: 597182 - DNA, 608 bp, Homo sapiens
tgagtgggaattcctaaactcactgggaataagtttcctacctaaaggatgaaggcttaaaatatagatcaagttatatttccctgagcttatgaaatcagattcagagtcacacaagtaactctggaagtagtaaagtttcaaaaacctctatttcttttttttgagatggagtttcactcttgttgcccaggctggagtgcagtagcgtgatcttggctcactrcaacctttgcctccctggttgaagcgattctcctgccttagcctcccaaatagctgggattacagatgcctaccaccacacctggctaatttttgtattttttttttttttagtagatacagggtttcactatgttgcccaggctggtcttgaactcctgacctgaagtgatccacccgtcttggcctcccaaagtgttgggattacagatgttagctactgcacccagcctcctgaaacctctttagaaggagctgggaaactccaggagaacacagaagcaagccaaattttaagggcctaatgggctgtaaattactccatcttggctaaagtaagctagggcagtgctagaggtcttaaaacttgcctccataaccat

SEQ ID NO: 597183 - DNA, 577 bp, Homo sapiens
ggagaacatgtgttctcattgttcaatgcccacttatgagtgagaacatgtaatatttggttttctgttcctgtgttagtttgtcaaagataatggcctccagctccatccatttcctcaggcgtgagccaccacacccggccgatctttttcttttttatgggtgcatagtattccatggtatacatgtactactttttctttatccagtctatcactgatgggcatttgggttgattctatctctttggtattgtgaatagtgctgcaatgaacatacatgtgcatgtgtttttgtaatagaatgatttctatttctttgggtatattacccagtaatggggttgctgagttgaatggtrtttctgtttttaggtctttgaagaattgccacactgtcttccataatggctgaactaattcacactcccaccaacagtgtacaagcatttctttttctccacaaccttgtcagcatctgctgtcttttgacgttttagtaatagccattctgactagtgttagatggtatctgactatataagtttatataatatacaaatatataatacaaatc

SEQ ID NO: 597184 - DNA, 577 bp, Homo sapiens
ggagaacatgtgttctcattgttcaatgcccacttatgagtgagaacatgtaatatttggttttctgttcctgtgttagtttgtcaaagataatggcctccagctccatccatttcctcaggcgtgagccaccacacccggccgatctttttcttttttatgggtgcatagtattccatggtatacatgtactactttttctttatccagtctatcactgatgggcatttgggttgattctatctctttggtattgtgaatagtgctgcaatgaacatacatgtgcatgtgtttttgtaatagaatgatttctatttctttgggtatattacccagtaatggggttgctgagttgaatggtatttctgtttttaggtctttgaagaattgccacactgtcttccataatggctgaactaattcacactcccaccaacagtgtacaagcatttctttttctccacaaccttgtcagcatctgctgtcttttgacgttttagtaatagccattctgactagtgttagatggtatctgactatataartttatataatatacaaatatataatacaaatc

SEQ ID NO: 597185 - DNA, 553 bp, Homo sapiens
attctccaaacacttttttcctggctttcccattattttaacaagatatgtgagtggaagaatagaacaaatcacatcctttctttacaaaggaatttagagaacaaaacccatcattaatatttccctctttcatcatcaactttcctgtaattcagataagcaaaaactcagccacctagatttttatagccgcattggcaagagtgtgaaggattccagcagcraacatacacgcaaggtcaggaagtgccaaagccaccaagagtacatgtgacttcgggggttgggggcgggtgcgcctgcccacccaccacaaatcttagccatctgggctgtggagaaaaaaagggaggggagacattttgtggcattgctttgcacttcctcagctgtccctaacggcagctccagattaaaaaaaaaaaaaaaaaaaaaaaaaaaaaggctagactggcatatctgattttaaaaatatgtccacaaatgaatatataataagtttaaaatatggggggactggaaggaaatacatcaaaagattaataaaagt

SEQ ID NO: 597186 - DNA, 553 bp, Homo sapiens
attctccaaacacttttttcctggctttcccattattttaacaagatatgtgagtggaagaatagaacaaatcacatcctttctttacaaaggaatttagagaacaaaacccatcattaatatttccctctttcatcatcaactttcctgtaattcagataagcaaaaactcagccacctagatttttatagccgcattggcaagagtgtgaaggattccagcagcaaacatacaygcaaggtcaggaagtgccaaagccaccaagagtacatgtgacttcgggggttgggggcgggtgcgcctgcccacccaccacaaatcttagccatctgggctgtggagaaaaaaagggaggggagacattttgtggcattgctttgcacttcctcagctgtccctaacggcagctccagattaaaaaaaaaaaaaaaaaaaaaaaaaaaaaggctagactggcatatctgattttaaaaatatgtccacaaatgaatatataataagtttaaaatatggggggactggaaggaaatacatcaaaagattaataaaagt

SEQ ID NO: 597187 - DNA, 553 bp, Homo sapiens
attctccaaacacttttttcctggctttcccattattttaacaagatatgtgagtggaagaatagaacaaatcacatcctttctttacaaaggaatttagagaacaaaacccatcattaatatttccctctttcatcatcaactttcctgtaattcagataagcaaaaactcagccacctagatttttatagccgcattggcaagagtgtgaaggattccagcagcaaacatacacgcaaggtcaggaagtgccaaagccaccaagagtacatgtgacttcgggggttgggggcgggtgcgcctgcccacccaccacaaatyttagccatctgggctgtggagaaaaaaagggaggggagacattttgtggcattgctttgcacttcctcagctgtccctaacggcagctccagattaaaaaaaaaaaaaaaaaaaaaaaaaaaaaggctagactggcatatctgattttaaaaatatgtccacaaatgaatatataataagtttaaaatatggggggactggaaggaaatacatcaaaagattaataaaagt

SEQ ID NO: 597188 - DNA, 553 bp, Homo sapiens
attctccaaacacttttttcctggctttcccattattttaacaagatatgtgagtggaagaatagaacaaatcacatcctttctttacaaaggaatttagagaacaaaacccatcattaatatttccctctttcatcatcaactttcctgtaattcagataagcaaaaactcagccacctagatttttatagccgcattggcaagagtgtgaaggattccagcagcaaacatacacgcaaggtcaggaagtgccaaagccaccaagagtacatgtgacttcgggggttgggggcgggtgcgcctgcccacccaccacaaatcttagccatytgggctgtggagaaaaaaagggaggggagacattttgtggcattgctttgcacttcctcagctgtccctaacggcagctccagattaaaaaaaaaaaaaaaaaaaaaaaaaaaaaggctagactggcatatctgattttaaaaatatgtccacaaatgaatatataataagtttaaaatatggggggactggaaggaaatacatcaaaagattaataaaagt

SEQ ID NO: 597189 - DNA, 583 bp, Homo sapiens
agttgatctttataagtttcttttttttttttttaccataaactgtgccaatccctttgatgacagaatctattattctactagcgcttacaacagatcactgtcatttgaagtgactttcagagtcttcagagatacaaataaacaatgcacccttccttccccaactgccaaaaaaaaaaaaaaaaaattgtctcctcctgaaaaccmatcactagcaaccttctattagcttggagaatctttttaatgcaaaagggtctggaactaaaagtgatcagggcaaggatctcattttattcatatttctatccccagggataagcacagtgcctggtagactgtttgcgtgcaagaaaattttgttgaaaggctggacaaataaaagaaaatgcataggttgtttattaatttagtaatgcaatttccaaattttgttttttcttgttgaggtataatctatgttaaaattcacccatcttaaatgtacagtttgatgaattttaacaaatgtatacagtcacataaccaccacaattaatcctaaaaagttctctcatgcccctttgtagtcacatcacct

SEQ ID NO: 597190 - DNA, 622 bp, Homo sapiens
tcaacattccataagcagaaaaaaattgcaaaaccatgtacaatatccatgacaaatcacctttgattcagacataacaagggatataaagagaatgaagaaaagaaaaaaagtacaggaaaatgtaatatccgaaaaatacctggcttctctcccattctcagtggaaagtgaccgtctatttcttatgacaaaactgcagtgaaggccaggtgctgtggctcatgcttgtaatcccagcactttgggaggctgaggcaggtgtatcacctgagatcaggagttcgagactagcccagccaacatggtgaaaccccatctctactaaaaatacaaaatatcagctgggcatggtggtgggtgcctgtaatcccagctacttgggtggctgaggcaggagaattgcttgaacctgggaggtggaggttgcagtgagtygagatctcgccattgcactccagcctgggtgacaagagcaaagctctgtctcaaaaacaacaacaacaagaactgcagtgacgtgatcacagagccattttgcagctgatcatgctgagtgattactgttcttgcaccataaggtcaaacttagaatttgaccattagcaaaactataataata

SEQ ID NO: 597191 - DNA, 419 bp, Homo sapiens
gaattctgaaaaaatagaattactcaaagagtatacatgtttttaaattttgatagatttgcccaacttactgtaacattaccttmtatcttttctttttatgtctttctctcatagaagtgattctccacttttagtgcagagttcattctaggggagcaaaaaagttggccaaagtgacttgacagtccctgcatctccaggcccttctcatgggagaagagtcccttcttcctcccatggccctggttccccaggaacctggtcagatgttcctttagagccacactacacctggttttgttttgttgtttgggttttttgttgttgttttgttttttcagacagagtctcactctgtcccacaggctggagtgcagtggtgcaatcttggctcactgcaaccaccgcctccctgg

SEQ ID NO: 597192 - DNA, 651 bp, Homo sapiens
  misc_feature 160: n = A,T,C or G
gccattgtatattttttcttaatttttactgacagtttttttctcaggtcaaatttatacttttacattttatcagggtatattttccttctttgaatttttactcaataacaagtatacaggccaggcatggtggctcacgcctgtaatcccagcactntgagaggacaaggcaggtggatcacctgaggtcaggagttcgagaccagcctggccaacatggtgaaaccctgtctctactaaaagtacamaaattagctgggcatggtggcaggtgcctgtaatcccagctactcgagaggctgaggcaggaggatcacttgaacccgggagatggaggttgcagtgagctgagattgcgccattgcactccagcctgggcaagagagcagactccatctcaaaaaaacaaaaacaacaacagcaacaaaaaacaagtattactatatgtggttttagcaattgtcacttttatattttttctaatagaaacattaaaaatttgttaatcactagcttatatacattttaaaaataattaatggcatttattttttcatacagtaaactataaagagtatacccatggcctacatttcccctacctagattttttaaaatgtaataaatctaaaataataaaatataata

SEQ ID NO: 597193 - DNA, 555 bp, Homo sapiens
ctgatccccagcattgctgccytggcccgtcctctagatgtaaggtggggtccagaggaggatgtgccttagcagatattaggaaacagggcacacaacaaggtttcatttctttcaacaacaccttatggctcctgtatgaaatatttaattgagagcactaaatgctataggatttccctttcagcagtggaaatcctgcataagtcaatcatgaaggtcattacggccgcctttccctttttcttggctttttctcagaggcgagattgcagcagcaattcatgggtcccttcaaactaattttgttactggattccactacagcatttggaattcttgattctgagaaacattttctctagtgtgtgccttaggaatacaaaggaggatggctgttgggcataataagcctttagaaaaatctcttattatgaataattccagacatataccaaaggagacagaatggaacaataaccctgaatgtacaaattatgtagctacaacaatcagaaaattgtgcccactcttgtttcacctataccttctaag

SEQ ID NO: 597194 - DNA, 555 bp, Homo sapiens
ctgatccccagcattgctgccttggcccgtcctctagatgtaaggtggggtccagaggaggatgtgccttagcagatattaggaaacagggcacacaacaaggtttcatttctttcaacaacaccttatggctcctgtatgaaatatttaattgagagcactaaatgctataggatttccctttcagcagtggaaatcctgcataagtcaatcatgaaggtcattacggccgcctttccctttttcttggctttttctcagaggcgagattgcagcagcaattcatgggtcccttcaaactaattttgttactggattccactacagcatttggaattcttgattctgagaaacattttctctagtgtgtgcyttaggaatacaaaggaggatggctgttgggcataataagcctttagaaaaatctcttattatgaataattccagacatataccaaaggagacagaatggaacaataaccctgaatgtacaaattatgtagctacaacaatcagaaaattgtgcccactcttgtttcacctataccttctaag

SEQ ID NO: 597195 - DNA, 547 bp, Homo sapiens
acttactccgtgtggccatttgcagctccttgatggtgatttcaacgctttcccttcttcacctgtttggtttgaggaggcaagtatctctgcttcytccctagcagttgcatccaccaaagatatgcgtgcccttcaagtaagcaagcatctcaaaagccgggctgacaggtttacttctcacccaggaatgcagctctgtcttcatgctgagaagcccaggtcaggtcatgatagaaaagccactgcgttcctcaggctcctgaagcagtgtctgggcacctggcggcaggaacagtggttagttaagctttgtccctagtaaatggctctgcctctgagttgaggtttttataaaagagcaattcagagttatgcagtcttttcacttgtctgattgtggtcattatgcatctttaatacatccatcattaacagcaaattcttttttatgcttatcacacagctaagcctctcagttcagaaatggaatggagatccagtatggagaaaaatgagcatttcctgcagaagctggccaaaaagg

SEQ ID NO: 597196 - DNA, 535 bp, Homo sapiens
agagctcatggtgctcagcattttatggtcattagaaagcattatttaaaattaaatgatttttaaaagcactttaccacgtggaaaattttttaagtattatttttgttactcagagcctgtggctttctaaattttagcaatttttttaaagggaatattaatgaaagtgagaccattttaaattaaggcagttaaggaaaatgacaatgaaaaccwctctgttgactgtctttcttaccttaccatttccaaattgttgttcatttgtataatctatatgagaaagagctgattcaatggaattgctttttataacaacagtatacttcattgaaagattatatgcaattgattataaactgtttgttatttctatgtcaattatttccctaagcaaacactttcattcacgtaaggcttatgtaaaatacagccttctgttaattgttagaagcattacaaaacacatataacaatatcagaataatttatttaatgctactatatttttaaaaagtgaaccacaatctca

SEQ ID NO: 597197 - DNA, 272 bp, Homo sapiens
cccaaggccattgctggtggcttattgtcacctgttcctctcttccggtggagcttcttccaattagtcccaaaatagccagagacctgtgggccctcccactcctccgcactgtgatccctctcatttagtgggtaatcacctccagaactgactgrtttgtttgcaaccggaggctggctgaggtgcccaagcaggagctgcctgcccccggctgcgttaggaactacccctttagatgttgcactgcggggagaggttgtccaggagca

SEQ ID NO: 597198 - DNA, 595 bp, Homo sapiens
gagaaattttttaaaatacaaaaataacacacacacacacacacacacacacactaggctttggaacaaactattctgggttcaaattcaggctctgcttcttcctaattaatcgtgtctctaagtttccaaatctatgaaatggtttgtgactcgtttagacaaaatgwcctgtacttgctggcacctaagaggcagtccctccctgtctcccatccacaattctgctctgccccacccaaaattagggttgccagagaaaatacatgcaacagttgaggcatacaataaaagaattccttgtcgatttaaaatttaaatttaactgggcaccctgttgttgtttttcctaaatctggcaactctacccaaaattaaatgccttgtgtccaatgtgccataaaaacggaaggcgagagtgaaaggttaaatggtggatgctgctgcctcctactggtgaaatgtggtaacaccaagcatcccaacaaggacgcgtatcctacgtgtggttttcttagaccaaacaggaagccacaagactgctgtggattacaggtgtagtttttattatcctgctaatcatttggtctaaatt

SEQ ID NO: 597199 - DNA, 595 bp, Homo sapiens
gagaaattttttaaaatacaaaaataacacacacacacacacacacacacacactaggctttggaacaaactattctgggttcaaattcaggctctgcttcttcctaattaatcgtgtctctaagtttccaaatctatgaaatggtttgtgactcgtttagacaaaatgtcctgtacttgctggcacctaagaggcagtccctccctgtctcccatccacaattctgctctgccccacccaaaattagggttgccagagaaaatacatgcaacagttgaggcatacaataaaasaattccttgtcgatttaaaatttaaatttaactgggcaccctgttgttgtttttcctaaatctggcaactctacccaaaattaaatgccttgtgtccaatgtgccataaaaacggaaggcgagagtgaaaggttaaatggtggatgctgctgcctcctactggtgaaatgtggtaacaccaagcatcccaacaaggacgcgtatcctacgtgtggttttcttagaccaaacaggaagccacaagactgctgtggattacaggtgtagtttttattatcctgctaatcatttggtctaaatt

SEQ ID NO: 597200 - DNA, 438 bp, Homo sapiens
ggtgcagatggttctggcttaggtccaggaagcgcaagttgaccaggcacctgaaggagccccgcagcctgtgcaggccggtgtttcccaggtagagcaggtgcagcgaggtccacctgcaaatgaggcgtggcaccttctccaggcggttcccgctcagcccgatttccgtcatcttcctgagctcggcgaagctcttcgggatggagtggaggaggttgtgggataaatcgagcaccgacagttggctacactggcacarggacgcgggcagaacgggaaggttgttagaagccatatagaacttctgcagccccgtcaggtgtccgatctcttctgggatggcacctattttgttctcgtccaggtcaatgatttccagggtgtagagaacacagagctcctgggggaaaacttcaaactggtttcgcttcaggt

SEQ ID NO: 597201 - DNA, 579 bp, Homo sapiens
aaaatgccactttgaaagagtactgttctgacattctctttttaaaaattccttctcataattcctacctagaataatgtgagtacttaatagagatttagtaagtttttggtgactttatattctgacgcgctttagtttacaccataaagcactgaacagttatttccaaagaagtgtaatattgtagcatgctgtcagtatttttaaggattttctaatttgccaggtacctgagagcagaaaccatgattattacacttattttctcccagctgtatctcttagccagtgtctggcatataactgacactcactaaatgtttcatagaaatacaagagtaggcttttgtttgttttagtttgcagatacatttctgttyatgaaaatgctcaagttttcttgagatacagattttttgtataaaggagtgtctaggttgtatagaatctttcatttcactatattataaccaggtgattaaagtgacaatttgaaaccaaatttaaacactataataatttttgccttgtgttcataaacattgatatttttgtcttagctagcagcttttaaaa

SEQ ID NO: 597202 - DNA, 580 bp, Homo sapiens
tgatatttgcaccactcatccccatgccacttttcccacrtattaatttatttcactgcctgatctttggatatgaaattatgagttccacaaagtcaatttttatagtgccaatcaaacagcatggtgatattctttttctttttttttccccccacaaggctgttgttcagtgtgagatgacatcatttcttatttctgccatgctgtggcttttttgtgttctgcttttaaactacacctgtagtacagttaatatgttttttattggtattgatttctttaattcattaattttctctatttgggacccaagtcataagaaccaattagaggacataataaaaacacttaatgcttgtagtctgtagagatcttcaccatttcacagcacacacattattttcataataaattgccactggtgggacatgggactgacttatttgaatagagtttgaaataccacctttgtatgatgcaaacaatatttgattattttatctaagaaatctatgcatgtgtatcaagttaaaatagtgggtttaaatacaatttacaaagcattagaatgttacct

SEQ ID NO: 597203 - DNA, 580 bp, Homo sapiens
tgatatttgcaccactcatccccatgccacttttcccacatattaatttatttcactgcctgatctttggatatgaaattatgagttccacaaagtcaatttttatagtgccaatcaaacagcatggtgatattctttttctttttttttccccccacaaggctgttgttcagtgtgagatgacatcatttcttatttctgccatgctgtggcttttttgtgttctgcttttaaactacacctgtagtacagttaatatgttttttattggtattgatttctttaattcattaattttctctatttgggacccaagtcataagaaccaattagaggacataataaaaacacttaatgcttgtagtctgtagagatcttcaccatttcacagcacacacattattttcataataaattgccactggtgggacatgggactgacttatttgaatagagtttgaaataccacctttgtatgatgcaaacaatatttgattattttatctaagaaatctatgcatgtgtatyaagttaaaatagtgggtttaaatacaatttacaaagcattagaatgttacct

SEQ ID NO: 597204 - DNA, 580 bp, Homo sapiens
tgatatttgcaccactcatccccatgccacttttcccacatattaatttatttcactgcctgatctttggatatgaaattatgagttccacaaagtcaatttttatagtgccaatcaaacagcatggtgatattctttttctttttttttccccccacaaggctgttgttcagtgtgagatgacatcatttcttatttctgccatgctgtggcttttttgtgttctgcttttaaactacacctgtagtacagttaatatgttttttattggtattgatttctttaattcattaattttctctatttgggacccaagtcataagaaccaattagaggacataataaaaacacttaatgcttgtagtctgtagagatcttcaccatttcacagcacacacattattttcataataaattgccactggtgggacatgggactgacttatttgaatagagtttgaaataccacctttgtatgatgcaaacaatatttgattattttatctaagaaatctatgcatgtgtatcaagttaaaatagtgggtttaaatacaatttayaaagcattagaatgttacct

SEQ ID NO: 597205 - DNA, 584 bp, Homo sapiens
tgttttgtgaaatgtttgtctacagtgagatactgttaactctttttctttttattattattattttttagttcagtttacgggacttatggaaaaactatatagagtagttactaagaatatagcttctgaagccagaaagtacaaattcaaatcctggcttttctattttctggttgtgtgacctaggacaagttgcctyccttctctgtgcctcagttgttttatctgtaaaatgaagataatcataataatacattttcagaggatttttgtgagcattagagtgcatggcaccttgtaaatactcaataaacatgaatttcatcattatacccaagagacggccaagcctcaagttacttatgaagcaagttgtgttcctcaagtcacccatttttgtcttttgcataacctgataaaaagtttttggcctactcttccctgttcaatggttataaccttatttttaaaaattagtcattagtcatgggtaagccactttttaaatgtatctataccacttcaagtgccatgtcaaccatgggttcaattaagttgctaacttctgataacaaccggaa

SEQ ID NO: 597206 - DNA, 555 bp, Homo sapiens
aaataaatacaatacatatagatcttatctacaacatattttagtcaaaatgtctaaagtcaaagacaaataatgctataaatagtaagcgaaagcatccactcacctatgcaaaacaaaaacaaaaacaaaaactctcatcaaactaatagcagatttctcagtagagagtttataggccagtaggccaggagaaaatggaataatacaatcaaattgcygaaagaaaaaagtgctgcaaggatattatattctgcaaaactatccttcataaatgaaaaagaaataaagtctttcgcagaccagtaaatactgaaaaaaatttttagcactgcctggctctacaagaaatgctcaagtgtgtcctaaacctagaagtggaagaattgcatctactatcatgaaaatacatgaatgtataaaacttaggcataaaatgaacacacaaatgaggaagaggatacaaattgtaccgctatagaaaaccaccaaagtacaatgatgaaaattaagggtaaaataaaggaacaaaagtattgaagacaattaaaaata

SEQ ID NO: 597207 - DNA, 390 bp, Homo sapiens
aaaaaaataacaaaatgaaaagttagtttattgaaaagattttaaaaattgataaaccactagtgggattaactaagaaaagaagagaggaggcctgaataaacaaaattagaaattaaaaaggaaacaatcaaaatataacagatgccgaagaggctgcagagaaaagagaatgcttatatactgttggtgggattgtaaattagttgatccattgtggaaagcagtttgaggatatctcaaggaattcatttttttatttttatttatttatttatttatttatttgagacrgagttttgctcttgtttttgagacagagtttcgctctcggctggagtgcgatggtgcaatcaactcactgcaacctctgcctcccaggttcaagca

SEQ ID NO: 597208 - DNA, 538 bp, Homo sapiens
ccaggcagacatgagcaaggcaggagagtgcccccgccaaggaatatcagacgaccatcaggtgatggtcaggaaattgttaaactgtctctctaaactaataaatagacacagctggtgccaggaaaagrcacattcccagcagacagaaaacacctgaagctggtgatcagccggttcctaaagagatcacaggagttgggtgactgggctcaagcatgtggactgagaggcaaaatggcagtttaactggtaaattatcttcctctaggaacacttgactggtaagtgaaaaaaatgcctctaataagcatgcacacaacttcagtaaacacactgcttatgcactactgcacatgagaacagcctgccccaaggtaaaattaagggaagagagaaccatgccaatgtataaaaccccaagttgaaggccggcagtacatttggatccctcaagtcacctgtttagccctcttccaagtgtactttacttccttttgtttctgttctaaaacattttaataagcgattattcctg

SEQ ID NO: 597209 - DNA, 596 bp, Homo sapiens
agtcaattctcctaccatattggaaattgtgttcattccctgtgattatgtgcaaatcacatactgatctaacatgcaaagtcaacctgtatgttataaatgtataaagctcaaatcatatatatgagatacaaatgtatatatcagattgtcttccaagtatctttcttttggagcttgcttgtattgtttttggggagtggacaccccccagttggagagttctgcttttgtatttgttacataggttttcacaagatttaactaaaattcacattaactttcaaatttgaaaatatctgcatgagtttaattgcacagacttgatttttcagtttctcacaggaagcatttgtttttctctctagaacctttagcagaaatgagctttatttttccctgatctataattgaagactttttttttttttttttttgaggcagagtctcactctctcacccaggctggagtgcgatggcaagatctcggctcactgcaacctccgcctcctgggttcaagcaattcttccgcctcaccctcccgaatagctgggattacaggcacacrccaccaggcctggctaatttttgtatt

SEQ ID NO: 597210 - DNA, 518 bp, Homo sapiens
atttaaactttactcttcaaattcactaggatattgattggaactagagtaggacatatcctacatgctgtctatgttgtattgtgatggcaccatctcaaaatccatggagaattagacaaaatttcaaatayaaagcctcttactcctatattttaagcaaataattttaaatctcagctttagagtgaagataatctgatacaatcggttattgtgccttaataaaaataaatacaaataatgttaactgatgaaaattattaagatgtgatgttgaaacgggaaagttcccttatcctccttgaaggacttgcaacaggggtgtggcttgctcctttggtctacctgctgctcaatcccgtagggggagaatgcagagaggcaggtgcagaggccctggggagcacttttgggctccggctgccccacggcagcatctaggggtgaatcgagtcacacatgggctcttgggatgagtgcaagtttttattgagtggtggaggtgtctcagtgag

SEQ ID NO: 597211 - DNA, 518 bp, Homo sapiens
atttaaactttactcttcaaattcactaggatattgattggaactagagtaggacatatcctacatgctgtctatgttgtattgtgatggcaccatctcaaaatccatggagaattagacaaaatttcaaatataaagcctcttactcctatattttaagcaaataattttaaatctcagctttagagtgaagataatctgatacaatcggttattgtgccttaataaaaataaatacaaataatgttaactgatgaaaattattaagatgtgatgttgaaacgggaaagttcccttatcctccttgaaggacttgcaacaggggtgtggcttgctcctttggtctacctgctgctcaatcccgtagggggagaatgcagagaggcaggtgcagaggccctgrggagcacttttgggctccggctgccccacggcagcatctaggggtgaatcgagtcacacatgggctcttgggatgagtgcaagtttttattgagtggtggaggtgtctcagtgag

SEQ ID NO: 597212 - DNA, 590 bp, Homo sapiens
gtgatgacaacttgactgaggacaatacaagcaatactgaaatataaatattgttctatataggcataccttggagacattgctaggtcagtttcagaccaccacagtaaagcaaatgttgcaacaaagtgagtcacacaaatattttggtttctcagtgcatgtggaagttatgtttatacaactgtggtctattaagtgtgcaatagcattatgtctaacaatgcaatgcwcctattttaactaaaaatattttattaattaaaattactaataatcatctcagcctttagtgagccataatcttcttgctgttggagagttgcttacacattgatggctactgatcactgaggtggctagggaagtttcttaagaataagacagcaatcaagtttgctatatcaactgacttttcctcttacaaaacaatttttcttttgtggcatgtgatgctgttcgatagcattttactcagagtagaacttctttcaaaattagaatcagtcctctctaacccagcagctgtttatcaattatgtttatggaatactctaaatcttttgttgtcatttcagcaatgttcacaa

SEQ ID NO: 597213 - DNA, 375 bp, Homo sapiens
cctgccgctccccgaacgggcagcggctccttctcagaacggatgggcagcacggggggctckgggccggcgccgcgggccggccgggagccgagcagcagcagcccgaggagcagcagcggggccggcggggccgggaggctcggcatgacgcgaacgggacagctggggaggagggagggaggagggcgcgggagcgggcggagggagggaggcgggagtgcggagggcggagggccgggccgggggcggtcggcgggagggggccggggccggggccggggccggggcagtgccgcgaggggctcgtcgggcggccgcagagtcggcgccggcccgggcggggcgggagcatcgtccgggaggagcgcgggc

SEQ ID NO: 597214 - DNA, 599 bp, Homo sapiens
catttcatctgtgcttcctgtggggcggtgtcaggtgctttacatagattaaatcttcattttgtcctcttaacaaatgtcaacacaggcttgtctgactttaaagtccaggctgtaagcagttaggtgtactgtctcccagttggaagaaactccaacccagcccccttcattttacaggagaggaaactgaggctcaggaaaggggaccatgacttgcctagaaagtggggcaggaacccaggaaccctgacttccaaggcttttcccccctaacccatcctccccttcagaaagcactgatccccttccttctgtaccagagggaactccaatttagtgattctctagcaagcaataacattccaggtcctggagtaacctgagaaatgtggtattggttaattcaaagccattgtcaacttcacaaggtgttggcctaattgatgccaagtatggctactttgagtttcccaagtgttgagactcataagtttggcactggagggaattatttactcacttattgtgcatttcagcytagcagaaattcataattagtagttaatagtgtgggaacttctcactgttcctggaac

SEQ ID NO: 597215 - DNA, 341 bp, Homo sapiens
tttttaagtgttggaaatgatgaattcatttttgtraatcctgcaaaggccaaacaaaacacgctagtgggtctaactttgcctgcaagccatccgttctgccatgaatgttgtaaatttcactcttggattgaatcgacccctcaaaatctgggtaagagtaataacagagcgcacttattgagtgtggcccacattccagacattgggtaagcatgggttatgtcatttaatccttgcaagagtccaatgggtgcccatttgaaagaggaagaaactgaggcatagagaggggagatgccttgcccaaggtcaagcaattagtaagtgacaatgttggg

SEQ ID NO: 597216 - DNA, 508 bp, Homo sapiens
gaattctttcctgggtgaagccaagaagcctcctgggctaagcctgaattttgtctcttgtctaccctgcactacaatcagtctccagtattcatcctgcaaaactgaaactctgtgcccattaagcaacttcttctcattcctctcgcctctagccactggcaatcactattcttattttctgtctttatgaatttgagtattataggatccttatgtaagtggaatcatgtagtgtttgtctttttatgaactaccttaatatacttagcataacgtcctcacagtcatctatgttgtagcatgtgtcagaatttccttgctttttaaggttaatgtttcactgtatatatagaccatgttttgtttatctgttgayggacactttggttgctcccgactttcggctattgtgaatagtgctgctgtgaacacgggtgtacaagtatctcttttgagatcctgctttgttttggtccactaacagtttatcttttatatgcgatac

SEQ ID NO: 597217 - DNA, 438 bp, Homo sapiens
agaagatgtctgctaagtcaacagtgtctttctatgctgtaagccttatctaaaattaatacttcgtttactttagataaaatgctctgaaatacatttttggaagcaaagctttttgtttggagacaaaacacaaaccttacagccatttattttattacaagaagtaaatatatttagtttatgtagtacacaaaggaggtgatagtttttacactaataatgtgattgatcatgtacttcttgagtttcttgttaatgatggaagatccacctttattggtcaccttctggaagtggtgttaaarttactggtatataaccaggttctctcaagcattttcaaagtaacaatccactggtgagtttttccttcccagtgtgatttatttgttcagtaattcagtgtctactgcattttattttcaaatatgttta

SEQ ID NO: 597218 - DNA, 598 bp, Homo sapiens
aagctttggaaagttgagggacctagtgaaggaatttgagtggggctgcagtgtaatcagataaccctggcagcaccttggagaatgcattgggattcaggaggctattgtcatgatagaggtgagaagtgaaagtcttaactaggaacagtggaacagtggaatagtggttctcagatttgtgtgcatcagaatcacctggagggcttgttaaaacacagactgctcaaccctgccccccartttctgattcagcaggtcctaggctaggacctgagaatgtgcattttcagcagtttcccaggtgatgctgatactgctgatcaataaggagtattttagagccactgggtgggataaagggagtgaattagggggaaggattttaaagtaagtggtcattgtggaactcttcatctcctgatctttttgttggcagtgctccttaacttttgtcttcatctcatttacatcttttaaagctgctgactgttttgaccagtgaagaaagagtgagggattagtttttggaaacagttatatgggtatgggtgcagtttgtcttgtgtattacctttggaaaagttgtaccactcca

SEQ ID NO: 597219 - DNA, 598 bp, Homo sapiens
aagctttggaaagttgagggacctagtgaaggaatttgagtggggctgcagtgtaatcagataaccctggcagcaccttggagaatgcattgggattcaggaggctattgtcatgatagaggtgagaagtgaaagtcttaactaggaacagtggaacagtggaatagtggttctcagatttgtgtgcatcagaatcacctggagggcttgttaaaacacagactgctcaaccctgccccccaatttctgattyagcaggtcctaggctaggacctgagaatgtgcattttcagcagtttcccaggtgatgctgatactgctgatcaataaggagtattttagagccactgggtgggataaagggagtgaattagggggaaggattttaaagtaagtggtcattgtggaactcttcatctcctgatctttttgttggcagtgctccttaacttttgtcttcatctcatttacatcttttaaagctgctgactgttttgaccagtgaagaaagagtgagggattagtttttggaaacagttatatgggtatgggtgcagtttgtcttgtgtattacctttggaaaagttgtaccactcca

SEQ ID NO: 597220 - DNA, 618 bp, Homo sapiens
acattttgtcttgtgtcgcacacatgtgtcttgtatcttttaattgagaggaggggaaatagaagtcttttgctaactcctataagaaatctgcagagaaacctgtgaacagcagcaatctttaagtggtccattcaaaaacagacaaaaagaaaatcttgattagtatattgtaatartttttttaaaaatgtacagtaacttcaagagagaactcatatcatactaaaaacagtatttaccttcctaatcataaagtacatacattaacaaaagtttaaaattcaagccttaaaaagttatataacatcttcatattaattgatttacatcactcattgagcatacctacaccaacatcactgataagaagctttcatttggagccaattatttccaaccaaagagattcagactatgctcaaatctttaacagagaaaacccctacaattgggcaaacaagataaatattttaaacatggaagaggctaagctcaaaaaggttttcctatttaaaagattattccaaaaatctcacttcaaagaaaaaagatacctaattttctcatgcttccaattctgctttaatattttactttgaagtttcagagcattat

SEQ ID NO: 597221 - DNA, 620 bp, Homo sapiens
aaaagagaacttaaggggtagcatgtaaactagctaaaagaaacacatgggaaagcaaggagtcaaggactggcacaggggttatctaagatrataggcaaaacagtcagagaaacaggaaaacaaattagactataacaaatggaaaattatgctgttaagcatttaccaaatttccaaaacggaaacacaacaaacctaggtgtgtttgtgtacatttgtgtatctaagattaactggctttgttttagtacttgatataaatttttttacatttctagagaatgttttagatctttattttttttttttttgagacagagtttcactctgtcacccaggctcgagtgcagtggcgtgttctcggctcactacaacctccgtcctctgggctcaagcagtcctcgcatctcagcctcccaaggagctgggacctcaggtatgcactaccatgcttggctaacttttgtatttttagtagcgatgtggtgtcaccatgttggccaggctggtctcgaactcctgacctcaggtgatccaccctcctcagtctcccaaagtgtgtggattacaggtgtgaaccaccacgcctgggctagaatgttttagctctttataaa

SEQ ID NO: 597222 - DNA, 366 bp, Homo sapiens
agaaaaatgctataatgccatcttcatcttcatggagttatttctgttttttttatgttttttttttttttggkgggggttgttgttgttgttagctttcaaacccaatcttcttctcaacattcacagcatattttctttgtattctgtgccttgcgtaacccctttggcacaacaacccatcctgttcaatgcctctaattgtctgtcatgtctctgtgtgctatttataacacaacactcccctcttccaaaaaggattgtatagaatcaatgtggtcacatgtaaacacaggagcttgagaatttttcttgtaaatgttcagtgagatcatatgacttctgtagcaagatgataatgtttta

SEQ ID NO: 597223 - DNA, 366 bp, Homo sapiens
agaaaaatgctataatgccatcttcatcttcatggagttatttctgttttttttatgttttttttttttttgggggkggttgttgttgttgttagctttcaaacccaatcttcttctcaacattcacagcatattttctttgtattctgtgccttgcgtaacccctttggcacaacaacccatcctgttcaatgcctctaattgtctgtcatgtctctgtgtgctatttataacacaacactcccctcttccaaaaaggattgtatagaatcaatgtggtcacatgtaaacacaggagcttgagaatttttcttgtaaatgttcagtgagatcatatgacttctgtagcaagatgataatgtttta

SEQ ID NO: 597224 - DNA, 562 bp, Homo sapiens
ttttccctgtctgtggcttcacttttatagtgtttttgtttgctagtttttgtgttttttgaaaaagtagtaccttctaaaaaatagaaaaattcaattttgatgaagtacaatttataattttttaatggttagtgctttttttttttttttttgacagagtctcgctctttgcccaggctggagtgcagtggcctgatctyggctcactgcaagctctgcctccgggttcacgccattctcctgcctcagcctcctaagtagctgggactacaggtgcccaccaccacgcttggctaattttttatatttttagtagagatggggtttcactgtgttagccaagatggtctggatctcctgacctcgtgatccacccgccttggcctctcaaagtgctaggattacaggtatgagccaccttgcccagctggttagtgctttttgtgtattatgtgagaaaatattcaaggttctttttccgcagttgtttggagatgtggatattcagttctttcagcaattttgttgaaaagacaaactgacctttctcttttgaatt

SEQ ID NO: 597225 - DNA, 539 bp, Homo sapiens
tgaccatgtctttcttttttttttttttttttttcttttttcttcttctttttttttagacagagtttctctcttgttgcccaggctggagtgcaatggcacaatctgagctcactacaacctccacctcctgggatcaagggattctcctgcctcagcctcccgaatagttgggattacaggtgtgtgccatcacgccccgctaatttttgtatttttagtagagatggggtttcgccatgttggccaggctggtctcgaactcctgacmtcaggtgatacacccgcctcggcctcccaaagtgctggaattataggcatgagccaccactcctggccagccatatcttatacacagtgatcttaaccaaagcctcatactcaaatttagtttgcaagacgttgctgaagatagaacgcactgctgatatggctattgagaggaacacagccaaagacagctaatttgtcttttcttgctgctcgaggaagactttaaaatttgaacctggcagcataggttgataaaactgaactgc

SEQ ID NO: 597226 - DNA, 558 bp, Homo sapiens
gtcattcagtgaggtcatgttttcctgaatggtgttgatgatagcagatgttcttcactgtctgggcattgaagacttaggtatttattgtagtcttcactgtctgggcttatttatagctgtccttcttgggaaggctttgcagagatttgaaaggacttaggtgttgtaacctaagttgtatctactttgtatccccaagccaagtaacactgtggttcttgcagactcatagagatactgccttgatcgtcttggacaagatctgtgaraattctctggattaccaagaagggactcttgtttcttcccttactttttgccaaacaaacatattctctctgtctctctgttgtgaaccacctaaagcaggggatagagttacatgagcatccctgtggccaccaccactctgactgcactgggtcgacctgaagccagtacagcactgagtctcacccaaggcctactgtgaccactctctggcctatgttctctcacggcctgtggagctctacaattggcatgtggcaaagccagccaggcctgtgttcctcc

SEQ ID NO: 597227 - DNA, 522 bp, Homo sapiens
ttttaactttttcacttacctttataatataaacatctttctaagccaagaaatatgggcctacattatgttaatatgtatgtagcatttcattttatgttcctaatttttaagcagttccctgttaatgaacattgagactgattttaactttttcattattatgaccaatatgaayctcttcctaaatatatgaatacatgtttatgttatctagcagaatgctcagcacataaaaggtccttggtaatttttagtgaatattcccatttttcttttaatggggtctatgtggggttttagtagggatagatgataaaacttcctgaatgctatcagccaaagttacaaaatgcagagggaatgcagaggagagatggagagaagggggcactctgtgaaaggtggcagggctgtttagtattaaagcttcatggcctctaagaaagagataacttgaactaaagtctcttctgatattacagttattgaacgactgctccgagatgaagaccctatgat

SEQ ID NO: 597228 - DNA, 518 bp, Homo sapiens
catcaaaaccactaagacaattgaaaataacataagcaaagtgtttgatgagaagctctgggaacttgattcagtccggaagctctactgagcaccttctaagtgccagatactgtgttaggcagtggggacatttggatgatatagacaaggttcctgatctcaggatgggcacagtctagtgacacatagtgtggtcatttctatcatgctgggagaaagactgcctagggcagtgttaacaaaaaagatatggaacttgaagaagggaaaggggagaaggaaatgtgttctgggtacaggtattgagcaataagagtgtargggaaagtggaggagtttgtgggtacaactatgaggaagaaagaagaatgaaaagagctgatacccaagggaagattactttatgctaatggatttgagctttttaaaagaaagattggatagtccatcacagtcagtactcgcattgccatcagaattataaaacctcatcaatgatctttctcgacttaagg

SEQ ID NO: 597229 - DNA, 526 bp, Homo sapiens
tcatgaagtgctttttccagcttgtttcctttcgtcccatctccttcaggtattccagtctatcactggttccatcttttcacaaagtccccagtttcctggaggctttgtttgttccttttcattcttttttctctaatcttgcctggatgccttatttcaataaagtggtcttcaaactctgatattctttcttccacttggttgattcagttattgatatttgtgtatgcctcatgaagttcttgtgctgtgtttttcagctccattaggtcatttctgttcctctctaaactggttattctagttagcakctcctctaaccttttatcaaggtttttagcttctttgcattgggttagaacataatcctttaatcagtgtagttttttattacccgtcttctgaagcctacttctgtcaattcatccatctcatcctccgtccagtgctgtgcccttgctggagagacattgcaaacatttggagaagaggcactctggatttttgggttttcagcattttg

SEQ ID NO: 597230 - DNA, 630 bp, Homo sapiens
tatgcatggaatgaaatgccaattaaaatatccttaggattttcttcaacattgcttgctgattctaaaattaaagtagaaaagttagcatgcaagaataatggaaactctaactgaaaagaataatgacagaggactagccctatcatacatcaatatagctttagtaattaaaatcacatggaatgaatagacagataaataggacataataccatccagaaataaccccctaaacatgcaatattttagaaagtgaatcattgaccttaactaacagtgatgaaaatatggaatgtttgttaaatgacattgggacacctgctgagccatctggaatttttagaataattttactcccatttyatttcttacacgaaacaaaatccagatggtcacaagttcaaatgttaaaaaaggaaactataataataaataaaatcaaattaaataatttggaaaaattggctgagttggggaagatcttgctaagtaagagtcaaaagaagccataaagaaaagattgataactatgtaaaaatgaaacggtattgcaaagcaaaactactataaacaaagtaaaaagccaaatttggatgaaatatttacatttatcatgaattctcactg

SEQ ID NO: 597231 - DNA, 646 bp, Homo sapiens
atacaaaatcaaacagaaagaaaagcacactaataaaggacgtcccacaaaacaagtttttttaaaagcattattcttaaattgctaagcccatgctccacctgccaataagagtatcttgagctttactgccagttgattgtattatgaaaatgatcatgtgatttttgtggtcactatttttactaaagcaaagaaaaaatataaaatattggtttgataagcaaagaaaatcctcctttgagacaacatagatgrtccctcctgaaaaaaggggaaaacaagagacaacatagatgaacctagaggacgttaaaataagtgaaataaaccaaagacagaaacatactgcataatctcacttatatgtgaaatcttttttaaaaagtcaaatagatagaaatgtaaagtataatggtggttaccaggagcaagggcacaagaaatgggaagatgtaaatcaaagggtatatacatcaaagggtgcaaagttgcagttatgtaagataaatctagagagctaatgtatagcatgaaaactgtacttaataatattgtattacatacttacataccatacatttgctaagagagtacatcttaggtgtttttagctaaaagaacacttaaaatacaacacatttgt

SEQ ID NO: 597232 - DNA, 602 bp, Homo sapiens
tttttccgaaaagactgttctccaaacaaacacaaaaaagcaaatgtattagataacaagtcagttgctccagggagcatgcatttttattatttcaatatgaggtgtggtttgagccagtaaggaggaaattcaactttgactctgcctctagctgagggagctttaccctggaaccagagatctaagcagctgtgggcaccatctgtcttggatgataaccgtgttcatctctcatctttcccacgagaacataagtaacttgagggcaaagtcagaggttaatttcagaatgttgtacatgcatctaagcagtttaccttgatcttctttcctattccagctctgcttatgagtcccatatctccttgtctaaatatgcccttgaaatatgctcaaaagttgccttcaactttgtcatggctttctttaccttccctctcagctactgccaaatcatctttagttttactaaggtcccattatccttattgccctaattatatagtcacttatagttattctratacttgttttctcacggcttttaaagtgctggctggcctcttatctgcagcttatgcttaatatagtaccctaca

SEQ ID NO: 597233 - DNA, 544 bp, Homo sapiens
atgaattcacctactttacttccttctctgctcctagattacactgctccctgagaaacattacacatgcatgcagaatgctgctattgcccatgaagaagtcctggtctattagaaatctgtgttcctcaaccccaaycagaccttgataccccaggcaagccttataggtagttcctgcctttatttaacactcctgaaatctactacttgacgacttgcccactcattctcagcagatgactttgctccctacattatagacaaaaatagaagccatcatctagcaaattcctcaactccaccatgcctctttctttgaacccagcccacccatatttgcctctactccctttcttactacctattctatcagactgcagatctatttgattccaaaattcatgtgttctatttatattggggatgggtactgcagaggcagcaggaaatgaggagaaagaagaagctagcaaagtaattctttctggtacatagtcaagcataaaaattacataaaatattgtgttattttaactcaaag

SEQ ID NO: 597234 - DNA, 544 bp, Homo sapiens
atgaattcacctactttacttccttctctgctcctagattacactgctccctgagaaacattacacatgcatgcagaatgctgctattgcccatgaagaagtcctggtctattagaaatctgtgttcctcaaccccaaccagaccttgataccccaggcaagccttataggtagttcctgcctttatttaacactcctgaaatctactacttgacgacttgcccactcattctcagcagatgactttgctccctacattatagacaaaaatagaagccatcatctagsaaattcctcaactccaccatgcctctttctttgaacccagcccacccatatttgcctctactccctttcttactacctattctatcagactgcagatctatttgattccaaaattcatgtgttctatttatattggggatgggtactgcagaggcagcaggaaatgaggagaaagaagaagctagcaaagtaattctttctggtacatagtcaagcataaaaattacataaaatattgtgttattttaactcaaag

SEQ ID NO: 597235 - DNA, 533 bp, Homo sapiens
cacagctgcagctgcctgatgtctaagccatttgagcttcttgggaaaggggcagcagccagcactgggactcacaactgcctaacatgttaagctccttgggcaggggaagtgtggcatccatctctatagctccaggctgtgcttttcccctgctggaaccartagggctggacaccttggtcccaaaaggtgtccccaacagcccaacataccagctgtggaagactgcagccagaggacctcttcaggactgaccctgactcatccttcctcactgggtggggcttcctgcaggaaatccaacaactctaaccagaggctcagggacagaacccagatctccctgggcctgagcctctagtgggaggaatggctgcagtctctgtgaatcagcagacatagcctttcctcctgatagttccaggagcccagatgagtgggtttccccctagcaaagcacacccctgcaccaagggtcagtcaaagtgcttcattaaatgggtcctgttccccatgccgcccaactgggg

SEQ ID NO: 597236 - DNA, 593 bp, Homo sapiens
ctgaaatgtattttcaaggcagcacattgtgtgcacttttaccctaccctcacaactgagaggaaatgtttattttcaatttagcttttgactgcttctaaaaaataagccacttttcaattacacagaggctttaaaatgaagtgccaagatttaacacatgttctaagggctctggtttcctgtgtttctttggtgaggagtgaagtccagcaactggtgagccaaagaataggattcatttacaacagagcagtggttctcaaagtgtggttcctaaaccagccacatcagcatcaccaggaacttgatagaaatgcaaaycaccccagactccaccccagacagattgaatccgaaattctaagaatagggcccaagaatctacggtctagggagcttccaggcgattctcattacgccaaagctgggaaaccactgcaatattgggttgttgccagtgaagagtttgctaaactccaaaagcaaataaataggctagaagtcagagcctcttctagacagttttgttttttgttttttttttaacctgagtataagatcagaaccagtggtggcacaggagaaagcaa

SEQ ID NO: 597237 - DNA, 587 bp, Homo sapiens
aatcattaaatatttttcttaacccacttttcttttttcatactgtatctgccaaaaccatttgctagcatagaaaagagggatttctttctgtatttctcttagacatttgtatccagtgtaaataaacatcctgattttgcaactactggccagtgggatgttaccactgaaagggatggtaaaaaagaatcggctgtctttgatgctgtaatggtttgttccggacatcatgtgtatcccaacctaccaaaagagtcctttccaggtaaggccaaaatttaagctgctagccacataactgacaaaaatgaatatcttgataatgtcttcttttttctaaaagtataagcaggttaaattaaaatatacttctgttatatctaatatgcttggtgtgttaaaatagcacattattgtgactgcatctattcacaaggtcgcttctgttaaagtctttgtttaaatatatgactcaaactgccatrtatttctcacttttcactcaggactaaaccactttaaaggcaaatgcttccacagcagggactataaagaaccaggtgtattcaatggaaagcgtgtcc

SEQ ID NO: 597238 - DNA, 410 bp, Homo sapiens
accatctttgtttcaaagttaaactgtaaactaaatgtctcccatagttagcttggcctatgctcaggaatgaataatggcagcttggagattagaagaaagatggagtaattacattttttttttcacatttttttcactgtcacaatttttttaaaggtgatttcagaggtaacatcacaggacatgggagactaaagggaggaaagyatgtcaaacaaaggctgtcctgttctgcagacgaaacctcacagaaagcaactctcagagtcagtagcctatgatgaaagtttctctgtcagacattcagcagtgcctgactctcagtctctctctcctgcaagttaatctttcctagagtgggcaagggaggcctccgagaaagcctagtttccatcttctgtttactt

SEQ ID NO: 597239 - DNA, 610 bp, Homo sapiens
ggtcactgcaaatgctgttaattcattcctttttctagctgagtagtattccatctatatatatatatatacacacacaccaccgtttctttatccactcattgattgatgggcatttgggttggttccatgattttcaaattgggaattgtgctgctataaatatgtgtgtgaaagtttctttttcgaataatgtcttattttcctctgggtagatatccagtagtgagattgctggatcaaataaatggtagttctacttttagttctttaagggatctccacacagttttccatagkggctgtactacttcacattcccaccagcagtgtagaaatgttccctgatcactgcattcacaacaacatctactgttttttgattttcttgattactgtcattcttgcaggagtaaggtggtattgcattgtggttttgatttgcattttcctgattattaatgatgttgagcattttttcatatgtttgttggccatctgtatatcttcttttgggaattgtctattcatgtccttagcccactttttgatgggattacttgtttttttcttactgatttgtttgagttcattgtagaccctggatatt

SEQ ID NO: 597240 - DNA, 548 bp, Homo sapiens
ctgtgggttgtctgtttactctgctgactattccttttgtcatgcaaaagatctttagtttaattaggtctcagctatttatttttgtttttgttgcatttgcttttgggttcttggtcatgaaatccttgtctaagccaatgtctagaagttttttttccaatgttatcttttagaatttttatagtttccagttctcagagggaatgctttccacttttccctattcagtattatgttggctgtgggtttttcatagatggcttttattacattaagctatgtcccttgtatgccgattttgctgarggttttaatcataaagggatgctggactttgtcgaatgctttttctgcatctattgagatgatcatgtgatttttgtttttagctatgtttctgtggtttatcacatttattgacttgcatatattgaaccatccctgcatacctggtatgaaacccacttgatcatggtggattatctttctgatttgttgttgaattcatttagctagtattttgttaaggattttagcatctatgc

SEQ ID NO: 597241 - DNA, 651 bp, Homo sapiens
tatagctattgtaaatagaattgttttcttaatctttttcatatagtttattgttagtgcatagaaatgcaactgacttttgtatgtttattttgtattctgcagctttactgaatttattacgcccaacaggcattttatggagtcattatggttttttttacatacaagatcatggcatctgcaaagacagaacattttacttcttcctttctgatttgaatgacttgtgtttcttgtatgaatgtctgtcyaggacttaaagtactaggacttgcagcactttacactttttctccttacctgctcccattttattctattgatgtcaccctttacatatttttatattgtgtgttcattaacaaattattgaagctatattttaatacatttgtcttttaacttttatatgagagttaaatgtgatttacacaccatcccatattaaaatattctaattttgactatagatttatctttcaaagtgagttttacacatacaaaaaatttaatgttgttactcagtgtccttttatttcaagttgaagaactccctttagcatttcttgtaagttaggtctcatggttgtaaactccctcagcttttgtttgtttggggatgtctttatctctacttaattctcaagg

SEQ ID NO: 597242 - DNA, 553 bp, Homo sapiens
cagttctgtcttcttataaattttaaaaatattcatactgttatctaatattatagttaaaaactcagtgattcatctctttggctrtatattttgggataattcttgcaggaatttagatccttcccctgtaagataagcaaattggattaagtaattactaatatcccttcaacattttacaaatctcttaatttcctgcatacacctcagtgtattaagaaattaagagatttgtaaaatgtcagcttttcaaagacagaaaatataattttctgaaagggttggaaacttttccatcagcatcatggggaggaggagtggaagcataaggcgatataggagaaaagcctcatgcttgccttccaggacctcaggcttctcctagctgcaggttcagctgaaggtaatactgaaaagattacagctgaaagtaaagtccaaggttttgattatcacatatgatgggatctattttctggattgagactgcatttgtgatttaatgagatcacagaaagtcctgttactcaaaaatgatcaggaaaatcag

SEQ ID NO: 597243 - DNA, 358 bp, Homo sapiens
gcataaggcgatataggagaaaagcctcatgcttgccttccaggacctcaggcttctcctagctgcaggttcagctgaaggtaatactgaaaagattacagctgaaagtaaagtccaaggttttgattatcacatatgatgggatctattttcyggattgagactgcatttgtgatttaatgagatcacagaaagtcctgttactcaaaaatgatcaggaaaatcagaccttgtggatctcctgcctccccctgcattctcatagcttggcagtgtctttagagctataagaaggtggtatcccaggtacttaatcaactaaaagatgaagtccctggagttatttgataggccaaag

SEQ ID NO: 597244 - DNA, 527 bp, Homo sapiens
ttgtaccatttgaccaagattactcaatttcccccaccctcaagcccctggaaatcaccctactactctttgcttctgtgagtttatcttttgtagattctgcacgtaagtgagaatgatcagtatttgtctttctgggcctaggttaatttcacatagcaaaatgtctgtcaggttcatccatattgttgcaacaagatgttttccatttttaagcctgaataatattccactgtagttaagtgccacattttctttatccatttgttgataaatgcttaggttgattctatattttggtcattgtgaataattttgcagtgaacatgggagtgcagacatgtctttgacttactgatttcatgtcctgtggatatatacccagaggtaggaytgcagaatcatatggtagttctattctacttttttgaggaaccttcatactgtttcccataatggctattctaatttacattcccatcaacagcattcaaggattccctttactccacatcctcaccaacact

SEQ ID NO: 597245 - DNA, 585 bp, Homo sapiens
aatctactgattgttttatgagtgttctcttgtatgtgatgaatcacttttttcttggtgcctttaaaattctgtcttttgacttttatgaatttgattatgtgtcacagtgaagatctctttatgtttaatctaactgaattctttgggatttatggatttggatgtttagctccctttctagatttggaaagtctgctatcattatttctttatataagctttctacctctatttcttggttctttgtggggctcccataatgcgtatattggttgacttgatggtttcccatttgtcttgtagactttctttactatctgtcattcttttttctgtttctctcactgggtaatttcaactgatctgtcttaaagtttgctgatttttttttttctgcttgatcaagyctgctgttgaagttctctgttgaatctttcagttctgtaattgtgttttgcagctccagaatttttttgtgtgttttttgaatggtttctatctctttgttaaacttatcattttgtttatttttcccctgatttcatttaattgcctatctgtgttctattttagctcactgga

SEQ ID NO: 597246 - DNA, 539 bp, Homo sapiens
tttcttctccttacttaaatggagggcatctgtctccatactgtgttgcctaggcttgggggagaggtgatacaggtagtgtgaaactgtccctcctatcctcttctatgtgttttttcttatttctgtgccccattcaggtgctgtaatctctcacctggattccttaggtcttgtgcaggtatttttgttgtggatggttattaaaattgatattactgtgagagaatgagcactgaaaattccsattccaccagctgacattctgtagtgttttcttattaacaacacggaaaagtgattaaattcatctgccagggaattttaggctctctggtaccttgggatttggaacagactttatttcttaccacaggcatgctaagagccattcttcctttgttctgaatataatatgctatgtttatcttttcaagcaagtctatgtaaatacattttttggtcattactactggttgcaaaacacattctctacatttgttgtgttatgggaacagcttcaggtttggatccactta

SEQ ID NO: 597247 - DNA, 555 bp, Homo sapiens
ttgtgcatgtatacacttgtactaagaaaatatcttcattttatttccttttcctttatcctgtgactaagatttattgacttcatatcagcattgaagtattgttaattttaggtaataatatttgggttggggattggtgcatttctggttgtatgaaggatgttgtattatgttaggtgtaattatgacattatttttgtctttatttgaagattatgtatgatctcaggagatgtgtatgggctcaggttgacaagtggtggacttgtggtggttaatactgaatgtcaacttgattggattaagagatacaaattattgatcctggctgtgtgtttgtgagggtgttgccaaagragattatcatttgagtcagtgctggggaaagcagacccgcccttactctggtgagcacaatctaatcagctgccagagaatataaacaggcagaaaattttgaaaaggcaagagtggcctagactcccagcctacatctttctcctgtggatgctttgtgtcctcaaacattggactccaagttcttcagttttg

SEQ ID NO: 597248 - DNA, 591 bp, Homo sapiens
tgtggagaaaatggcattttaggttatcgttgaaaggtgtgtaagaaaagaatggaggaagacaacactttaagcaaagtatggccatgagaatcagtctgcaataagaatggagctgcaggaagtctcacccaactaacagaaggagaggagaggagcaagaaggtgggttagagaagctgcctaatgaagaatcctgaatgcctgaatgaagagtcacgcttcatctcatagttagaaggccactttagattctggaggagggaggagagatactgacatcttagggagcttattttggcaacgggaaattaaaaagtagaacaaagatgaagtagaattactagttagaaggctaataaagttgctgatgaaatgatgagaggcaaactttatcaattatatatactgttgcttcctattaatgatgaggaatgaaatccttcattcagagacttcacattcatgsggaagggcaagttgtaggaaagtgtatgagggtggagatggcaaaaagttaaaatggaaagtgactctgcttctgtaagttggggctagtgggggtcttgacaggcaagttaatgagtttgg

SEQ ID NO: 597249 - DNA, 502 bp, Homo sapiens
aatcaaccacaatcagatataaaacaatcctcatcaaatgcgaaagaaccaagaycataccaaacacactctcaggcacagtacaataaaaataaaaatcaagactgaaaaaagatcactcaaaaccatgcaattacatggaaattaatcaaactgctcctgaatgacttttgggtaaacaataaaattaaggcagaaatcaagaagttttttgaaactaatgagaacaaagatacaacataccagaatctgtgggacacagctaaggcagtggtaaaaaagaaatgtatagcactaaatgcccacatcaaagaactaggactgttttacatgaacaacctaacatcacaacttttagttgaataggaaagttgaacattcaacttttgtgaataggagaatcaaaagcgaaccaaccccaaatcaagcagaagacaaaaaataatcaaaatcagtactgaactaaaagagatcaagagaaaaaaaaaaaaaaaaacattaa

SEQ ID NO: 597250 - DNA, 535 bp, Homo sapiens
gacaaacatacagccaacatcacactgaatgggcaaagactggaaagattcccactgagaaccggcacaagacaaggatgctctctctcatcactcctattcaacatactattgaaagtcctggccagagcaatcaggcaagagaaaaaagcrcatccaaataggaagaaaataagtaaaactatttgtagatgacatcattctatatctagaaacccatagtctctacccaaaagctgcttgatctgataaacaactttagcaaagtttcaggatacaaaatcaacataccaaaaatcagtagaatttctatacaccaacaacatccaagctgagagccaaatcagaagcacaatcccattcacaaatgctgcaaaaagaataaaatcctaagaatagagctagccagggaggtaaaagatctctaaaatgagaacttacaaaaacactgctcaaagaaatcacagacaacacaaacaaagggacaaacattgtatgctcatggaaaggaggaatcagtatcattaaaacagcc

SEQ ID NO: 597251 - DNA, 535 bp, Homo sapiens
gacaaacatacagccaacatcacactgaatgggcaaagactggaaagattcccactgagaaccggcacaagacaaggatgctctctctcatcactcctattcaacatactattgaaagtcctggccagagcaatcaggcaagagaaaaaagcacatccaaataggaagaaaataagtaaaactatttgtagatkacatcattctatatctagaaacccatagtctctacccaaaagctgcttgatctgataaacaactttagcaaagtttcaggatacaaaatcaacataccaaaaatcagtagaatttctatacaccaacaacatccaagctgagagccaaatcagaagcacaatcccattcacaaatgctgcaaaaagaataaaatcctaagaatagagctagccagggaggtaaaagatctctaaaatgagaacttacaaaaacactgctcaaagaaatcacagacaacacaaacaaagggacaaacattgtatgctcatggaaaggaggaatcagtatcattaaaacagcc

SEQ ID NO: 597252 - DNA, 535 bp, Homo sapiens
gacaaacatacagccaacatcacactgaatgggcaaagactggaaagattcccactgagaaccggcacaagacaaggatgctctctctcatcactcctattcaacatactattgaaagtcctggccagagcaatcaggcaagagaaaaaagcacatccaaataggaagaaaataagtaaaactatttgtagatgacatcattctatatctagaaacccatagtctctacccaaaagctgcttgatctgataaacaactttagcaaagtttcaggatacaaaatcaacataccaaaaatcagtagaatttctatacaccaacaacatccaagctgagagccaaatcagaagcacaatcccattcacaaatgctgcaaaaagaataaaatcctaagaatagagctagccagggaggtaaaagatctctaaaatgagaacttacaaaaacactgctcaaagaaatcacagacaacacaaacaawgggacaaacattgtatgctcatggaaaggaggaatcagtatcattaaaacagcc

SEQ ID NO: 597253 - DNA, 613 bp, Homo sapiens
attcacaatagcaaagacatgtaatcagcctaaatgcctaccaatagcagaatggataaagaaattgtggtacatacacacaatatggaatactatgctgccataaaaagaatgagataaygtcttttgcaggaacatagagggagctagacaccattatccttagcaaactaatgcaggaacagaaaaccaaatattgcatgttctcacttataagtgggaactaaatgagaacacatgaatgcaaagaggaaagcagcacatactggggcctacttgagggtggagggtgggaggaaggagactatcagaaaaaataactattgggtaccaggatcaggacctggttgatgaaataatctgtattctaaacccctgtgaaacatgtttacctacataacaatcctgcacatatacctgaacctaaaattaaaattaaagattaataaatacatataaaagcaacagagagaaaaaggaataaagaaaaattaacaacaaaaaatgaaaatatgccacttaaacactaagataaaaaatcttaatgttcagatcatgattcgttgtgtgaaatataccatatacagtaagactaagaaatctggtgtggcta

SEQ ID NO: 597254 - DNA, 602 bp, Homo sapiens
caagagtagatgtggagtaaaaatgttttttatttgctcaaagttaagttgttgtcagattataatagtgtgtatattttatataagccttatgcaaacctcaaaggacaagtctatagtagatacacaaaagataaacagtaagaactagagaataacactttataaatcacctatcacaaaggaagacatgagagagaaagaaaggaataaaggagctacaaaaaataaaaacaaacagaaaaccagaaaataactcacaaaatggcagtagtaagtcctaagctatcaacaatttctttgactgtaaatggattaaattctaaaatcaaaagcattagagtggcggaaggagtttaaaaaaaaaagactcaactgtatctgtttacaagagagtcatttcacctttaagaatatacatacctggaaagtgaagagatagaaatggatattctacacaaatggaaaccaaaagagagcagrgtgctaagtatatcagacaaaattgactttaaatcaaaagctgtaagacaaagaaggtcatgatatgatgacataaggctcaattcatcaagaggtcataacaattgtaaataaatttt

SEQ ID NO: 597255 - DNA, 410 bp, Homo sapiens
tgtaaataaattttcagccaatactggagcacctaaatatatgaagaaaacattaatagatctggaaagagacatagacctggctattgtgaatgaacatgagagtgcagatatcttttctgcatacagatttcaattattttgtatataatgcccagaagtaagattgstggatcatatgtcaattctatttttagttatctgaggaacttctgtatgttttccttgatgcttgtactaatttacattcccaccaacgatgcacagcagttatttccttttcttcatacacttgctaatacttacctttcatcttttggatagtagtcattccaatacgtgtgatgtaatatctcattgtggttttaatattcgttactctgatgcttagcaatgatgagcactttttc

SEQ ID NO: 597256 - DNA, 181 bp, Homo sapiens
ataatgcttccagttttgctcttttttaaaaaaaatcaagattgccttggttgttcrgggtcttttgtggttctacacaaattttaggatttttttctacttatgtaaaaatgtcattggaattttgataaggattgcattgaatctgtagatcactttgtttagtacaaacattttaaaa

SEQ ID NO: 597257 - DNA, 181 bp, Homo sapiens
ataatgcttccagttttgctcttttttaaaaaaaatcaagattgccttggttgttcagggtcttttgtggttctayacaaattttaggatttttttctacttatgtaaaaatgtcattggaattttgataaggattgcattgaatctgtagatcactttgtttagtacaaacattttaaaa

SEQ ID NO: 597258 - DNA, 613 bp, Homo sapiens
ctgaatttttatttcaggtcaaatttccaaggcmtgaggctgtctgttaggaacagataagaccaaaaccaatacgagagcacttgttggaagtgtcagtggtgctgaggatttgaaagggatgcttcagttttctgtttaggacatgacataacaacatatgttttagcagccagaaaaaccaaccagcagctccctgtcattttttctatggatcctactgggaagatttcagaagagaagtcagatttcttcgggagaagagatgatttttttaaaaaaacgtatagcctcttttgtcatactattttcccctagccaatactgcctagaatatttcaaacaaatgcaactaaccagtattttttttagcacaaagaccaataagccctagaatatgacttttacagccaaagaacaaacagagctgcataactgtatctaataaaaaaagttggaaatcaataaagttgagggtttataaactcattcagatgtgttgacccactgaattaaatgggaaaattcaggtgtgttttaaaagttcctttgtaaatgttctgggttagactctagataattgatattctcctggctgacaagaatgggtcct

SEQ ID NO: 597259 - DNA, 613 bp, Homo sapiens
ctgaatttttatttcaggtcaaatttccaaggcctgaggctgtctgttaggaacagataagaccaaaaccaatacgagagcacttgttggaagtgtcagtggtgctgagratttgaaagggatgcttcagttttctgtttaggacatgacataacaacatatgttttagcagccagaaaaaccaaccagcagctccctgtcattttttctatggatcctactgggaagatttcagaagagaagtcagatttcttcgggagaagagatgatttttttaaaaaaacgtatagcctcttttgtcatactattttcccctagccaatactgcctagaatatttcaaacaaatgcaactaaccagtattttttttagcacaaagaccaataagccctagaatatgacttttacagccaaagaacaaacagagctgcataactgtatctaataaaaaaagttggaaatcaataaagttgagggtttataaactcattcagatgtgttgacccactgaattaaatgggaaaattcaggtgtgttttaaaagttcctttgtaaatgttctgggttagactctagataattgatattctcctggctgacaagaatgggtcct

SEQ ID NO: 597260 - DNA, 576 bp, Homo sapiens
tttgtgatttttaaccagctagagtggtttttttcaaaagttaatatttatcttgccataatatttaccttcacatggtaagtgctgctattttcccatgactgcaatgaagaattgtggtaagataaactcacctctataagataaatgtcagatgtttaatgaaaatcactggatgatcatcccaggtttactttgaattttctgagggtctggccctccagtaaaatttaactcacaaaattttccaaatataagtccctgtgttcaaaactggggattataagaaatgaattttgagagagcacacaccttagggaagagatggttggttgagggaagcagagatgtgaattctctatgcctttttgacacttaatggttgagagattctcttggcctcagtttmatctgtaaaatgagcagacttaactaggtagtctccaagattctatccccttgtatggttctgtgattctatgctgatacatgaccaggctgaagtccattgtttatcataaatatcatactccagtatttcagaaataagacattggatataattttaaggataaa

SEQ ID NO: 597261 - DNA, 612 bp, Homo sapiens
agaaaaataaataaataaataaataaaagtacttggacttctgtagatacatgcyaactgttaactgaaatgatctatgggtagtagaattagaggtgattagtattttctccttttgtaaatctacatttttctgatttctcggtaatgaatgggtatcagttgggtaataataaaataattagttcctacctcccaggctacagtatatgttaactgagatatttattcacttatttgataaatatttattaagcatcaaaaaaaagaactttctgccatgctggaaatattctatatctgtgctgttatagtagccgctagtctcagtggctaatgcttaaaaagcaactggtgtgattgaatacctaaattgtatattttagtcacatttaattattttaaatttaattagccacatatgtctagtggctatcatattgctcatcacaattttaaagtgtaccttagaacaaagcacacagtaaacatcaataaatggagtctgaattaatgaatgaacaaaatgcagagtaatctggctcatgtaactctggatttttttaaaatatcttctatattatagcattagagccagagcttggacatcac

SEQ ID NO: 597262 - DNA, 612 bp, Homo sapiens
agaaaaataaataaataaataaataaaagtacttggacttctgtagatacatgctaactgttaactgaaatgatctatgggtagtagaattagaggtgattagtattttctccttttgtaaatctacatttttctgatttctcggtaatgaatgggtatcagttgggtaataataaaataattagttcctacctcccaggctacagtatatgttaactgagatatttattcacttatttgataartatttattaagcatcaaaaaaaagaactttctgccatgctggaaatattctatatctgtgctgttatagtagccgctagtctcagtggctaatgcttaaaaagcaactggtgtgattgaatacctaaattgtatattttagtcacatttaattattttaaatttaattagccacatatgtctagtggctatcatattgctcatcacaattttaaagtgtaccttagaacaaagcacacagtaaacatcaataaatggagtctgaattaatgaatgaacaaaatgcagagtaatctggctcatgtaactctggatttttttaaaatatcttctatattatagcattagagccagagcttggacatcac

SEQ ID NO: 597263 - DNA, 612 bp, Homo sapiens
agaaaaataaataaataaataaataaaagtacttggacttctgtagatacatgctaactgttaactgaaatgatctatgggtagtagaattagaggtgattagtattttctccttttgtaaatctacatttttctgatttctcggtaatgaatgggtatcagttgggtaataataaaataattagttcctacctcccaggctacagtatatgttaactgagatatttattcacttatttgataaatatttattaagcatcraaaaaaagaactttctgccatgctggaaatattctatatctgtgctgttatagtagccgctagtctcagtggctaatgcttaaaaagcaactggtgtgattgaatacctaaattgtatattttagtcacatttaattattttaaatttaattagccacatatgtctagtggctatcatattgctcatcacaattttaaagtgtaccttagaacaaagcacacagtaaacatcaataaatggagtctgaattaatgaatgaacaaaatgcagagtaatctggctcatgtaactctggatttttttaaaatatcttctatattatagcattagagccagagcttggacatcac

SEQ ID NO: 597264 - DNA, 612 bp, Homo sapiens
agaaaaataaataaataaataaataaaagtacttggacttctgtagatacatgctaactgttaactgaaatgatctatgggtagtagaattagaggtgattagtattttctccttttgtaaatctacatttttctgatttctcggtaatgaatgggtatcagttgggtaataataaaataattagttcctacctcccaggctacagtatatgttaactgagatatttattcacttatttgataaatatttattaagcatcaaaaaaaagaactttctgccatgctggaaatattctatatctgtgctgttatagtagccgctagtctcagtggctaatgcttaaaaagcaactggtgtgattgaatacctaaattgtatattttagtcacatttaattattttaaatttaattagccacayatgtctagtggctatcatattgctcatcacaattttaaagtgtaccttagaacaaagcacacagtaaacatcaataaatggagtctgaattaatgaatgaacaaaatgcagagtaatctggctcatgtaactctggatttttttaaaatatcttctatattatagcattagagccagagcttggacatcac

SEQ ID NO: 597265 - DNA, 590 bp, Homo sapiens
ccaggctggagtgcaggggcacaatctctgctcactgcaacctccaccttctaggttcaagcaattctcctgcctcagcctcccaagtaggkgggactacaggtgcatgccaccatgcccagctaattttttgtatttttagaaaagacggagtttcaccatgttggccaggatggtctcgatctcctcacctgggtgatccacctacctcagcctcccaaagggctgggatcacaggcgtgaaccaccgtgccctgcagatgtgtttacaaggtagtgactttatctcgttggatatacacccagaagaggaattgctgggtcatattgagaggtgaagctgggctgggcttctgggtcaggtggggacttggagaacttttctgtctagctaaaggatggtaaatgcaccaatcagctctctgtgtctagctaaaggtttgtaaacacaccaatcagcattctgtaaaaacacaccaatcagcactctgtgtctagctaaaggtttgtaaatgcactaatcagcactctgtaaaaacggaccaattagcactctgtaaaatggaccaatcagcattctgtaaaatgga

SEQ ID NO: 597266 - DNA, 590 bp, Homo sapiens
ccaggctggagtgcaggggcacaatctctgctcactgcaacctccaccttctaggttcaagcaattctcctgcctcagcctcccaagtaggggggactacaggtgcatgccaccatgcccagctaattttttgtatttttagaaaagacggagtttcaccatgttggccaggatggtctcgatctcctcacctgggtgatccaccyacctcagcctcccaaagggctgggatcacaggcgtgaaccaccgtgccctgcagatgtgtttacaaggtagtgactttatctcgttggatatacacccagaagaggaattgctgggtcatattgagaggtgaagctgggctgggcttctgggtcaggtggggacttggagaacttttctgtctagctaaaggatggtaaatgcaccaatcagctctctgtgtctagctaaaggtttgtaaacacaccaatcagcattctgtaaaaacacaccaatcagcactctgtgtctagctaaaggtttgtaaatgcactaatcagcactctgtaaaaacggaccaattagcactctgtaaaatggaccaatcagcattctgtaaaatgga

SEQ ID NO: 597267 - DNA, 485 bp, Homo sapiens
ccctggaccaacggtgggtagcagaggggcctgttgccaaaggagggtgcaggaccctgcaaacaaagcaaatgcatatctgcaaactgaaatttggacagtaggtcaaatgtttatgatttcattttataaatagattagggaagtatttgtctatggataactagattgtatctcctatattattaaaattattctagtgccatgtctgattttcagttttttaaaattctctttcaattaccagattttaaggagaatttaaaaatcaaaaggcagtatagcagtgggggtccatgctataccacaagcagatcgatcacwacttatattgtctattagtacaggaatgtaatgacaaatctgtttccacagcaacacataatttttagatccaaatgaagttattatttagacattcatttatttatttgttttgggcctgcatacatcctgcttcttcgcatcttcatcctgtccacatc

SEQ ID NO: 597268 - DNA, 520 bp, Homo sapiens
atcgggggtggtggagtgaggaactaattcctcataaacatcatgcctgctatctagttagctacttcaatgagatggagtgtgcctgttactgggtttggctgcattagctcaaccaatatgaatttctcagatgtgcacaattaagaaagtaaaaattgcaaaaagaagccatatgatcctttcaatgttgatgcttatatttgttagtattaataaataaaatgacattaattattctctaatatccactctaaacatgtgatacacataatacctgggmttaagtggactttatccactaaagtttgattgtcatcaacttatgtttaatataaccctagaatttatttatttttattaactagatctcatcttcaaattcttagggagtccagaatattctgggatatgctcactgaatttgattgctcatcattatcatctgcccttgggcatctcacacctttctttattctaatctatttctaactggagccagaccatttaaaaaaatgta

SEQ ID NO: 597269 - DNA, 520 bp, Homo sapiens
atcgggggtggtggagtgaggaactaattcctcataaacatcatgcctgctatctagttagctacttcaatgagatggagtgtgcctgttactgggtttggctgcattagctcaaccaatatgaatttctcagatgtgcacaattaagaaagtaaaaattgcaaaaagaagccatatgatcctttcaatgttgatgcttatatttgttagtattaataaataaaatgacattaattattctctaatatccactctaaacatgtgatacacataatacctgggcttaagtggactttatccactaaagtttgattgtcatcaacttatgtttaatataaccctagaatttatttatttttattaactagatctcatcttcaaattcttagggagtccagaatattctgggatatgctcactgaatttgattgctcatcattatcatctgcccttgggcatctcayacctttctttattctaatctatttctaactggagccagaccatttaaaaaaatgta

SEQ ID NO: 597270 - DNA, 600 bp, Homo sapiens
tttttgttttacatttaggcctgtgatccattttgagttaatttttttgaagggtgtacattgtgtgtcaagattttttgtttttgactgtagatgtccagttgttccagtaccatgttgaaaagactctttgcttcattcagctttcactcctctatcaaagatcagttgactgtatttatgtgggtctatttctaggctctttattcagttctgttgatctatttgtctattcttttagtaatacaacattgtcttgtttatgctagctttatggtaagtcttgaagtcaggtagttttagtcctccaactttatttttctcttttaatattgacttggctttctgggatcttttgtctcccatataaactttagaataggtttgtaaatagccacaaaataacttgctaggatttcagttgggattgtgttgaatctatggaagaagttaagaaaaacagatatcttgacaatagtgagtattcctatccatgaacatagratacaactccatttatttgtgtagttttatttttatatcattcataaaagttttttagctttccttatttagaccttgtacatattttattagatt

SEQ ID NO: 597271 - DNA, 606 bp, Homo sapiens
actcgtggtcctctggtcttgctccagcaggttggcggtgaggttggcaaggtgaatgagtaatttgtaagtgtgtgcttgattgatttaataaggaatcaagtcatttgtaatgttgagggaaagcagacagacttatttcctatacaggtgaaaatttaactgcctccaccccaccccactctaaatgaaaccttgtcttcatttagagtgtttaagtggaaagaatagaaactggaaacaggacgccaaaactgcttgtgattctaaatatgtgtgtaccattgggcaagtcatttctcattttaaggccgtagttttcatattccccctttaggtactttataaggatgtatctgtttataactatataattaatgtgtaaaatctataaaaggtgaatatttctaaatattgtcagtgtaaaagatgataatattagtaatgctaataatgactcctcctgtcttttgagagtgaactaatactctcagaattgactaagaatggatattgaataaaatacatagataaactaaaagaagactrctctagacactactgtaaaatactgaaagaaagaactatgggaaacatttaaaaagg

SEQ ID NO: 597272 - DNA, 596 bp, Homo sapiens
attacacattcctggaaaaattaacgctggaatgttcagtggagtttgcaataatcccaaatttccttctgtatatctttccctaatgtacaagggtattatttatgtgagataggagggaaaccaataaccatgaggaaaaatgcaacctagctttccataaaataatgcattactgtttattctattgtaattgtctaatgatgcatctctatattgaatctctataatttgtctaaaattaattctatcctttctaaagttrtactttagttatgctactatttgccaccctatcctactagaaacaaaatattaaaaaaataaagtgatgcagcctaacactaagtcatgcatagtaagtatctacatgtgaaaacaatgactggggaacataatttgtttcctgacttctgattgttttgtgtcattacacacacctcactctagcatatgtgtgttagggctgttcattttgtgagacgtaagccacatatggttgccaatttgtagctggtgtttgttttgagataactaaagatcgctgtcaccttatacaagttcatgatgtaattgtataagcatatctaaagatc

SEQ ID NO: 597273 - DNA, 619 bp, Homo sapiens
gcaactgttaaaacttttaaacagcaattatcagagtatgaaaccagtctctttcctgtagagctgacatgtacttagctaattacctcatcattgccttagcagtatttacagtgaaagaagcatttatgcacagctttgtctgtggggccaggcaactgttaaatatataatatagcattttgggtaacagttttgaaatagctcagaaagcccaaacaaagaaaattgaggacttacaaaaagagtgaaaaggtagacagagtttaggaactaacagattagggaaggatcagatatcaggatttcagtaaaacactaatacccccawcccaaagttagttatctgtctgtaaagctgaaaatattcccaagaatgtcacaaattcccagtggaaacatctatggatattaaaataaaaatggggcttcttaaaagataatgcaagggatcctaagaattatctaatgaagtcctaaatatgtcagagttcatttcttgaaaataaagtacagtttcactcaattttagtcccaagagaaaagctttaggcagtcagttcccaagccataggttcctggggagctccaggattagtacaaaggttccaaacttcca

SEQ ID NO: 597274 - DNA, 535 bp, Homo sapiens
actctggttcattcttgtcttaaattttttaaaaaatactgatattttctttttgatcttgctgtgttcttcttctctttgtgcagtattatttatgaatctatttcctcttcttttttcttttcacttactactgcatttaaactgttattataggagacatcwcaggaggaaaacgcagtgagaacattaagatggtctctctctcagtctctctctttctctcgtgtttctggtgctatgttcagtactcgctctctgttcccattgaggttgcagcttctctgctgaatcactgctttgtattcagccagggaccgtggagtattcccagtgtatttattttctgttcctgagctgaatgctgggtgcttctttgtcctgatgccttctgcaaaggagtttaggaggtgggggatggaggggaaaaagaggaggagggataggaaagccaataaagctttctctatcccccagaggaatgtgtgcaaacatctttaacattgctttcctcagtgttctcctctctgccacc

SEQ ID NO: 597275 - DNA, 600 bp, Homo sapiens
aattaagaatagaaggaactctctttaacctaataaaaaacatcctcagaaaccctatagctaacatttttaattgtaaaatattttatgctttccttttttctttcctaaacaaagcaaaaacatcttggttcatcatttatgtttaatattttcctgtygtttctctcttgtgcaatacgacaggaaaagtagaactgtgttatttgtaggcaaaattattatatatgtagaaaatcacatggaatcttcaaaaagacaagaactgctaagtacattttgtaagatttaaggactcaaagttaattcacaaaaatcaagagcaattttagatacaaatgataaaaaattagaaaacaaaatttaaaatatcatttacaatgctgtcaaagaatattaaatatataggcaataatttattgaaaatatgcaagattttcgcagtgaaaactacaaaacatttctgagaaaattaaataacgcaaataaatagagacccacgcttatgttcattgacaaaacatagagttttaaagtggtctgttctccccaaattgacctatatattcaatatggtatctatcatgttgcaaagagccc

SEQ ID NO: 597276 - DNA, 600 bp, Homo sapiens
aattaagaatagaaggaactctctttaacctaataaaaaacatcctcagaaaccctatagctaacatttttaattgtaaaatattttatgctttccttttttctttcctaaacaaagcaaaaacatcttggttcatcatttatgtttaatattttcctgttgtttctctcttgtgcaatacgacaggaaaagtagaactgtgttatttgtaggcaaaattattatatatgtagaaaatcacatggaatcttcaaaaagacaagaactgctaagtacattttgtaagatttaaggactcaaagttaattcacaaaaatcaagagcaattttagatacaaatgataaaaaattagaaaacaaaatttaaaatatcatttacaatgctgtcaaagaatattaaatatataggcaataatttattgaaaatatgcaagattttcrcagtgaaaactacaaaacatttctgagaaaattaaataacgcaaataaatagagacccacgcttatgttcattgacaaaacatagagttttaaagtggtctgttctccccaaattgacctatatattcaatatggtatctatcatgttgcaaagagccc

SEQ ID NO: 597277 - DNA, 572 bp, Homo sapiens
cccacgcttatgttcattgacaaaacatagagttttaaagtggtctgttctccccaaattgacctatatattcaatatggtatctatcatgttgcaaagagcccattttaaagtcattggcaagccgattctaaaattcgggtggaaatatgaaggatctagaatagccaaaatcatatatatatttaaagttagaggactcaacattacctaacttcaagacttactataggttatagtaagtcagtataataattagcttaaatatataatctatggatcggtagaacagaatagagtccagaaacagacaatacatatagtgtcaactaatcttcagacaaggcattgagttcacttattgaaggaaaggaaagcctttttaataaatggtgctggaacaactcaacccttatatttkgattttaaaaattagatgaatcttagacttaaatataaaacctagcaccacgatgcatagaggaaaaataagaataatatctttgtaaatttgggggcatgaaaagagttttcaaaagggtacggaatcagtaatcctaaaagaaagaaat

SEQ ID NO: 597278 - DNA, 658 bp, Homo sapiens
ataatacctgacttcaaatcatactacaaagctgtagtaaccaaaaagcatgayactggtataaaaacagacatataggctagtggaacaaaataaagaactcagaaataaatctttactactacagtgaactaattttcaataaaggtgccaagaacatacattggggaaatgatagtctcttcaataaatggtgctaagaaaaaactagaccccaactcttgccatatataaaaattaaatcgaaatggatgaaatacttaaatctcaaactataaaactactaatagaaaacactgggggaaaatccccaggatattggtctgggcaaagatttcttgagccatagcctataagcacaggtaaccaaagcaaaaatggacaaatgggatcacatcaagttaaaaactttctgcataacaaaggaaacaatcaacaaagtgaagagacaacccacagaatgggagaaaatatttgcaaactatttatctgacaagggattaataactagactatataaagagctcaaacaactcaataggaaaaaatctaataatccaatcaaaatggactaaagattggaatagacatttctcaaaagaagacatatggcaaacagatatatgaaaaggtgctcaatatcactgatcatcagaga

SEQ ID NO: 597279 - DNA, 658 bp, Homo sapiens
ataatacctgacttcaaatcatactacaaagctgtagtaaccaaaaagcatgatactggtataaaaacagacatataggctagtggaacaaaataaagaactcagaaataaatctttactactacagtgaactaattttcaataaaggtgccaagaacatacattggggaaatgatagtctcttcaataaatggtgctaagaaaaaactagaccccaactcttgccatatataaaaattaaatcgaaatggatgaaatacttaaatctcaaactataaaactactaatagaaaacactgggggaaaatccccaggatattggtctgggcaaagatttcttgagccatagcctataagcacaggtaaccaaagcaaaaatggacaaatgggatcacatcaagttaaaaactttctgcataacaaagraaacaatcaacaaagtgaagagacaacccacagaatgggagaaaatatttgcaaactatttatctgacaagggattaataactagactatataaagagctcaaacaactcaataggaaaaaatctaataatccaatcaaaatggactaaagattggaatagacatttctcaaaagaagacatatggcaaacagatatatgaaaaggtgctcaatatcactgatcatcagaga

SEQ ID NO: 597280 - DNA, 554 bp, Homo sapiens
ctatcaacatagtagtggaagtcctagccaaagcaaccagaaaagagaaagaaataaaaagcatccgaattggaaaagaggaagtaaaattatttctgttcactagcaatatgatctcaaaaaccctaaagactcctccaaaaaactcttagatttgataaatgaattttaaaaagtttcaggatatgaaatcaatgtacaaaaaccagtagcatttctatacactaagaacaatcaaactcagaaccaaatcaagaaggcaagcccatttacaatagctacaaaaaaaaaaaaatctggaatttatttaaccagagaggtgaaatatatttgcaaggaaaagtacaaaaaactgacaaaataaattgtagatgacataaagaaatggaaaaacatcccatcttcagagattggaagaatattgttaaaatgaccatactgcccaaagcaatctacagattcaaagcaatctcaacraaaataccaacattatttttcacaggattaggaaaaaatctaaaattcatatggaaccaaaaaagagcccaaatagc

SEQ ID NO: 597281 - DNA, 568 bp, Homo sapiens
aagactggaaacaacccaaattcccaccagtaaagaatgcattgaataaactaggtatgttcaaatagtggaatagtatacaaccttaattaaatgaggagtatttatctatatttctatgaagctattrccaagatatattgttaattgaaattttttaaaagcaacttatataagagtgtacatagcacactaccttttgtgcaacaaatagacaaatatatgtttatattgctttaattatatagatacgtttacttatgcttttatctctctctctctctcacacacacacacattaggttttgctttaatatctatttaaaacctaacaaacatgtcacttatgaagaagggagagaacagaggtgggtagggtcagggatggaaacttgacttttctaaaactgaatgtaccttgctttatgttttcattttgaaaccatgcttatatataacacaacttaaaaagttgtatcaaaaaataataattttcaaaacctgaaacaagtgaaccaaactatatatcatgtaggtgacaatgacatggaggagattcaatttaatc

SEQ ID NO: 597282 - DNA, 567 bp, Homo sapiens
ttctgaaaattttatattgatctattttatataatttaattcaattttgtttaacaaacattaataagctccaagtgatcaaggtaccatgggggtgggagtcagggttggggagtaacaaatattagaaagaaaaaacatcttgctctgcctttttggtgattacagtctaacgggaggcaggcaaacaagcagagaaatgtgacataagtgataagagaaggacatgagcaaataaaagcattttagatgactgaagggaacataagaccatgctatcagccttcctggaacactaccaacctaccacaaacagccacatttaagccctctatcctctaattctgatgctaaagttctgattccatttataagccatcatctcatctcatcttctatgcagtgcaygagactctctgaaataggttggtacctttggacaattaaaatgaatgcagtaattggaaatatgaaggtgctctcacaggaattgtgttcttgctatgttgtatatgcatgtgtaggaatgttaaaatgttaacatgtctttgactgcataactgcaat

SEQ ID NO: 597283 - DNA, 547 bp, Homo sapiens
aatttgtttaaacatgttaggtctcagtttcatcaactacaaaatggaagtttagagttttttatttctttcagggyaggagtgtcaatacttgaaaatagaactaaaataatgtggaggagagagtgaaagtaaggagaatggagagagaagaactaagacaaggattagaaggagaaaaaaagaatgaggagggaaggagagagatggggagaaggaggagaagagagtgaaagaagaggaagaggaggaggaggaagaaagcaaagggaaataggaaaggaaaagggggagaaggaagagggaggaaaggaaaaagaagcaggaagaggaaagaagggaaaggaagaggggaaaagagaagccagggaaggaaattaagctgacagagtgaatcagtcagggtttttgttgcaagcaacagaaatttggtttatttaagcagaattatcatttattcccaagtgggccagataattggcttggagactttcaccaagaaccaagtccaactttgtattgcccaacataaagcctagtaggactg

SEQ ID NO: 597284 - DNA, 527 bp, Homo sapiens
caacataagagagtgagacactgagggattagcaagagcagaatgccagagacaccactattctggaagggaaaaggaatggagcggtcatggagatgctgcagagacaacagctctgaacagaatgcagccactgccaggaacagtgaggcagtaaggagcagaaagaatcaatatcccaacctttctgtcctctcacccctgatctccagctagtgacacacagaagccagaggataagsaagcctggagtgtactctggagagtggtcatcttcctgggggacaaaagaagacagagaatacagagaatggatctgggcaacaaatgaaaaataatgagtgcaggatatcaggatggcaatttgcatcctggatgtgtgtgtatgtccacaaatataggtatgtgctatgccaattggttatattgggaccaacgtttacttcttcacagtaggctaggacaattcgctcacattctgccactgccagcaccaaactcaaatgtttacacatttgattgcttta

SEQ ID NO: 597285 - DNA, 467 bp, Homo sapiens
ttttcaaactcttacctcacattctgctatctgtgcacatgtgcagatgccatgagtaaaaggaacaggcccacccctctctgttctgcacaacaccagagagttaatctattgaagtcccctgcttaggaatataaaatctttaatctcttgcagatgaaatttagtctcatcctttgtcttattccaaagactggagtctgtcttggaaatcaagttaactccctgattgcctttcaacatagtccctggacctagctgcctgagatcccatacatttccagtggctccctgtctcatttctrtgctttacttctgtctttcttttccacctaaagtattttctagcttaaccaagttaccaccttgattccctttaattaattcactcatccaagcaataaatattatgtgcatacttagcatcaccacctacaagttactgagaactgcagaagtcctgtttc

SEQ ID NO: 597286 - DNA, 544 bp, Homo sapiens
actgaaaacccagctacctctgctttgaaatccactgtagtaaggacagattttgggcttaatttatggtgctcaggataaagatgtcttttctctgaatttttggttgatacacatacacaccatttgctcctgaactttaagtattgaggtatgcacattttttgatggagaaaaatgtgggagatttgaacaaatacaatcttaaaaagaaaagagcaaataaattacaaactgcatccaaatttaagtaggggaagaaaaaagagattcctttaatctttcacttttcctccctgccttcctttcacctctcttggacccctcctgtgttttccttcctttctgcctcttcacttacccttctaacttccttctctcgtcttttattctgtttaatatgtattagttattattaagacacttgctaaatgttgaggacacaamgaggtttaaaaaaagaagaagaagaagaagtctctgcccttatgctgcacgtgcctttaactcagcaagggacccaggaggtgataaatcacaaaac

SEQ ID NO: 597287 - DNA, 553 bp, Homo sapiens
ctcaggaagtaaaggactctcaattttctttttgatgtttaggtttatctcatttttttgaaaggttcagaaagtcaccaaaccataacgatgttaaataataacattaaacaataaaatcccccattttaaaagaatttggggattartatttctttagactgttgatgtgacagctttcttcgacccaagctcaaatgcaatgtaattcatgatttctgaagatgcttctaaactacgaacttgctgtcagtacttgtttaattcttgcttggtagatggcttattttctcattaaaaacctattttcattgacctaggtccttgatttctcaaaacatttcttatagagggggaagagagttcaagtgagtgatcagagatgtagaaagaatcatgagtaaagcatgtttttataatgcctttgatgtgggaacctgcatagtgagactgaatgtttttcaggagttccagacagagagaaccaagagaatcctctgtgatgctttctagagaacagatctttttaactcaatctaatctattgctttgc

SEQ ID NO: 597288 - DNA, 553 bp, Homo sapiens
ctcaggaagtaaaggactctcaattttctttttgatgtttaggtttatctcatttttttgaaaggttcagaaagtcaccaaaccataacgatgttaaataataacattaaacaataaaatcccccattttaaaagaatttggggattagtatttctttagactgttgatgtgacagctttcttcgacccaagctcaaatgcaatgtaattcatgatttctgaagatgcttctaaactacgaacttgctgtcagtacttgtttaattcttgcttggtagatggcttattttctcattaaaaacctattttcattgacctaggtccttgatttctcaaaacatttcttatagagggggaagagagttcaagtgagtgatcagagatgtagaaagaatcatgagtaaagcatgtttttataatgcctttgatgtgggaacctgcatagtgagactgmatgtttttcaggagttccagacagagagaaccaagagaatcctctgtgatgctttctagagaacagatctttttaactcaatctaatctattgctttgc

SEQ ID NO: 597289 - DNA, 601 bp, Homo sapiens
agaagtttgtgtgatgattacctcaagcctactccttaataagcttacattaggctctgatgtaccttcttattcatcatggttctataatagtatattttaatactatataaaataggatgaaacttgttagagcctgactctgtttgtaggagcttatggcttgtcacttgtcacaagaattggtccacttggtgaatgatagttgggtctggagttaagaataaataccgtcagtggccacatgggaagctgggtttagtagacactggcctctagattgttcctgtcatgctcagcttgcaaattttaacatgcaaattcatcattttccatgacaaggtaaatcaggcatgcaaatcatgtaccatagtcatgaagattgctacatgaacaataaccaacaattwcttaagattgaacaaccccaaggttgcttccataagtcaccattcgcttttatgcacatcctcaggctatacttagacctttttcctaacataagcattccttgcaaaggcctgaagatgaagaatagaatcttgctgtatccttactggtgggtataggggggaatggcataggggttccttaaaacctt

SEQ ID NO: 597290 - DNA, 511 bp, Homo sapiens
caggtggcttaagaattactaaaaagagccatcacttgtcttttttattttccattctcttcttgccataatttcttcctttgcgctttctctttttacctctttctaggcctcctcttccttttctttatacttacattttctactgccctatttgctatttttttctctcagtctccctgttactctctttattttgttctaccttagttctgtcaaaagtgaccatttattttagtttttacttgttattatgggggtgctgtgtgcatggagaacaggaggagataagctttcaaaaagaaatagaagtgctgttccaaatttgccattttttctctctattgcaatagcaakcattttctactcaattcctaatcaaaggatgagaagaagatgcaaagaaaaattgtgaggtttaagtggaagtatttgatttaaatatcaattaaaaataaaaaaggcaggaagcaaatgtaagacagcagagtaaaaaaagaggctcagagag

SEQ ID NO: 597291 - DNA, 511 bp, Homo sapiens
caggtggcttaagaattactaaaaagagccatcacttgtcttttttattttccattctcttcttgccataatttcttcctttgcgctttctctttttacctctttctaggcctcctcttccttttctttatacttacattttctactgccctatttgctatttttttctctcagtctccctgttactctctttattttgttctaccttagttctgtcaaaagtgaccatttattttagtttttacttgttattatgggggtgctgtgtgcatggagaacaggaggagataagctttcaaaaagaaatagaagtgctgttccaaatttgccattttttctctctattgcaatagcaatcattttctactcaattcctaatcaaaggatgagaagaagatgcaaagaaaaattgtgaggtttaagtggaagtatttgatttaaatatcaattaaaaataaaaaagrcaggaagcaaatgtaagacagcagagtaaaaaaagaggctcagagag

SEQ ID NO: 597292 - DNA, 566 bp, Homo sapiens
catctcctctttaactatttatcgtattggaagcatttcatattgccagtgtgactgttactagcagtgtgtcagacagaacatctcagagtggcatttttgcaacccagacaaagaagtttctcacactgtctgtctcccagatgctctccacttgtcttctgttcttatccggaagataagtaagtagctcatgttcctcatagaaataatttagcagcttgtctgtctagaaggtaatggcatagcatgtgtaattcctgcaattttgatagtgtaacataataggaaatgagacaccyccaaactgcaacccagacagccctgttgttcagagtggtaaattactccagcctcctactcacagaagtattgcggtcagtaccatgcatctatgcctgttcttttgaatcttttcaagctgcctatatctaggaagcaaatatattacttgcgtactacctaaaacttacagatagcccaatatgaataaactcttagcctctgaatccaatgattttgggctctttttattccaatttcccattgagttgccccttttcaat

SEQ ID NO: 597293 - DNA, 553 bp, Homo sapiens
caatatgaataaactcttagcctctgaatccaatgattttgggctctttttattccaatttcccattgagttgccccttttcartaaatcctggttttgtgcaatgttaacatatctcaagtcctgaggtgcattattacattgacctcagagactagaaaatgagacatttagaggaagagaaacagaattggtcacatgtttgaatatctatacagaagaaaagagaaagaaaatttctaggaaaaaatatgagccatatttctcctgtaaattctgagtgtggcttttgatatttaccacaaaaaaacaattttgtcaccttagaatcatgtgatctgtctgaggttggctaacaaggagaaaaagccatctgttttattaaattaaattatagtatttctttgtgagatagtatatctgtagagagttttattgtcatcattatcattgtaataataatgacaggctgtcttcctttgactttacgacttatttacatttattcacccatctgtccattcgtctacccaccacattcatccattcacca

SEQ ID NO: 597294 - DNA, 361 bp, Homo sapiens
aatattttctgaagcattaaaaacagagagaattctaactttctctattagatcataataaatagatccttaaacttgattttgtatttacaactgaatctaaaatttgcaatcaatataatcatggatcacatagactatttgtacccatttttggcatctaaaaatacatggtaacatttcaaatggtgaatttttaccatgatttgtttttattttctgatttmtttatgaattaaaactttaggggaaaaatacttccccctttaatctcctattttaacatataaaaaattctaagctgactttgggaggccaaggctggaggattgcttgaggtaaggagtttgagaccagcctg

SEQ ID NO: 597295 - DNA, 603 bp, Homo sapiens
tcgcaaataaaatacaaaattatcactttaaaatagcacaatatcagctatttcacagtttgagatgtgagtcaccaaatgtttttcacaatggtgtagtgaaatgtattattagaaaatgacagtggctgaattttctagtttgggttgctatgttggataatggaagcatgaaataatattcttcataaaatagcaagtggtttaattattttcttaaaaatttatgtagtatctacctaccaatactacctactagtgtactactaggcagtcagaacacaaaaatcatragacctagcctttcatctcaagaatataacaatctacacagtgaactgacttaagcaatttaataaatgtgtatatatctctttatgtatatatttgatgatattatatgacagaacatatatagccttaacttggtctatctctatgaatagtgaactaattgtatctatgagctgctgtgtgaattgaggaagataaatccgattctgtgcaaaaaaagagtcagaagctggtcaggtaaaatctgaaagagaagattacacttgagtcttgaaggattagcagggatgatcaagtcagcaacggaca

SEQ ID NO: 597296 - DNA, 570 bp, Homo sapiens
catgggttctttgcatgattcagcttcaatattcttttctaactaaaccattttgtggtaaaacatccattcaaagtccagagcaaatctctttgacccaattaatcatttttaattggctgtaccctagtccagttcatattttttcaacctctctatccctcagatggtttgataaggatrtttctgtacatagatgaattatcttccatcttggtaactttacttatttctctcatcagtaaaggtcagagctgtttgtctcagattcataggttcttggaaaagcagaatctttttccacctaagatctaattctaccatcttctgctggctcttccaactagcatgtaggctcaatttcaacctctaatcatggccctcaaaaacttttagaacacattgtcctactttctgagcacagacaccactaaaatgccttgtttatagcattctttcagcttcattgcccttctttatgtattgctcatgaagatgtaagaactgaagatccaaaacaatcttcaacccttccttccaagcttaaattgcaattattcaaaaaatgat

SEQ ID NO: 597297 - DNA, 569 bp, Homo sapiens
atcctttggtttggtgcttcttccatgtcaagtggaagaaaagagagataaaagggactggtagctatgagaatcatctgtttccattgctggtgctaggtgaatagtatgacccccagtaaragcagagatactctgaggggaaggattagacatttaaagagtataagtattctcctgtgtcagtcaactagattttgtatgaagaaaggaaagtttttttcaggacaaggaggaagtatggtggctggtagcatatcataaacagaagatgtttatacatgattgttagctaatacctatactggtaacctcatactaccagaagaacttgcctggtggtgcttggagaaaacatatgtttaacatactgtaatatgaagtaatttacatcaaagtagtaggaatgtggaatttgtagtaactcaatcaaatctggaatttgtctctacattcactctgagaaatggatatattaaagtaaatctggattgtaatcagaattatagaattgcctaacctacctaatcagaaacaaattataaacacatatgtgtataaaaatcata

SEQ ID NO: 597298 - DNA, 566 bp, Homo sapiens
ctaagtggaattaacatttccatatgaactagaaatgcagaattgctaatacttttccttaggatccgtggtatgacattttcaatgatttcatcataatttarcaatattcaagtaacccagtttatgcttataaacatagcactatcttatatgagttttctctggaatctaggccttccaatacagacacttcattggcatgtgtgtcactgcctaagaaaatcagtcagctgcaagtcagttaaatattgtccaaatctttactatagaccccctcccccagtgatgtaaaacacgtggtccacatcctacacaattaaaaaatcactctttggtttgcatttagtgcatgtctttgtggtttattattatcatatcagtcttttgcttctaagtaagtatactttggtcacttgttctattttggtaggcatcaatgcttggatctgtcccagtttttgaaagggctttgggattcttaaactgctgcctgcatcctcacttcttgcttctgctcctgattatgcataaacatatatgtgcttacacttactgatgcattt

SEQ ID NO: 597299 - DNA, 505 bp, Homo sapiens
tatatatatatttattaatttctaatttgatacacttgtgtccagagaatatattctttataattttaatcctttaatattttgaaaaatttttatggcctggtatgtagtctattatggttaataatttatgtgcacatgcaaagaccatgtacagttgctgctgtagtgttatacacacacagttgtttagtaatgtgttatataagatctctgattataaaggtagattgcatctccatttggtctatcaggtttcaccctacatattttgaaatcctattttggktgcatatacacttataattgttatgattttctgatgaatcaatcttttcataattgtaaaatgttcttctttttctctagtgatgttctttgtcttgaagtccattttgtttgatattactatagccacaccagatttcttagtcttactgtatatggtatatttcacacaacgaatcatgatctgaacattaagattttttatcttagtgtttaa

SEQ ID NO: 597300 - DNA, 420 bp, Homo sapiens
taagccttggctgccagttaccatggtaactagccatgtcccaaaggggaaagagactactgacatatggactctgggccaatggtccagtatctcctgggactgatgtttttactcctgcacatgaaactgttctgtccaagtacaacctaaaatcacatgaaaaggaaaccataggacataatgaaatgctgccttttctcctgcagcccacagtgtctaaagggawtagaattgtgtccaacttcccatgagcaatgggaacaggctgccctaacttgttaagtggcagttcctatgtacagccacacagctgggtctactacccaggccacctgctgccagatattttattcctgaaagcttcctgggctgctgggctccactgctctaaagaggttttcctaatacattcagttt

SEQ ID NO: 597301 - DNA, 625 bp, Homo sapiens
tctcacatcagcttatgaataaaaatgttctatctcaagaaataattgaccacattacaagtttcctttcattgcctcatatccttctctttcactacctatattggctcacattccctctttttcatttagtgctgtcacaacccaaattttctcccctgattatcctttcacctagcctcctaactctttaaagtgtcttgtccatatatccaagctagatatttcctagatcaaagctctacctataacccaattctattgaaacagccaatrttcctcatatcatctcattcccattgcttccaaacatcacaaatgtcttctaaagccacttaccagactgattttatcctaggatcaacactctgtcatgctttcttgaaacagaaaagaataccttagaagaaagaagactacttttgctactgaaaaaacaagccatgtgaaaattttaactgataaattgttgttgggtatgggcatcaggaatatttaccaagcgttttggaaagtaggtatatttgtgaattgtctatagtgtctatatttgtttatatttatatatacatattatataaagtttcatatttaacttatttatctattcctgaaagatgcctag

SEQ ID NO: 597302 - DNA, 608 bp, Homo sapiens
acctgcctcatagcatacatagaaattgataaaaaatggatcatagacccaaatgtaagagctaaaactatataattttagagaagaaggtaagaataactctttgtaatttgagtctaggcaaaaagttcttagctacaatgccaaaagcagaattataaaagaaaccttgataaattgaacttcatcaaaattcaaaacttttacactttaaaagaaaataaaaagataagccatatcctgaaagataaaagacttacatgcagaatttataaagaattaytggggccaggcgtggtagctcatgcctgtaatcccagcactttgggaggctgaggcgggtggatcacctggggtcaggagttcgagaccagcctggccaacatggtgaaaccctgtctctactgaaaatagaagagttggctgggcatggtggtgggcgcctgtaatcccagctacttgaacccagagggcagaggttgcagtgaactgagatcgtgccattgcactccagcctgggcaacaagagcaagattctgtctaaaaaaaaaaaagaagaagaagaagagttctcaaaattcaataataaggaacaaaattctcaatca

SEQ ID NO: 597303 - DNA, 570 bp, Homo sapiens
aatacgtcattctaagtcaaaccacataaaataaaaatctcctgtgtattgtatgtgtgtataaacccacttatatgtcccatacttacagaaacacaggtggccacaatttgcttttcttrcgagatttgcccactctgtttctcaggccataaatgacaacaaatgataaagctcacaggtacataaatattctttaacaaaatgtatataatatgccatattcctagatgatatatagtatgctatactccatcatttactaagtatatttgataaaggatttatctgcaatgcacgatccttacagtatcagggctaaccaacaaattttgataacatttagtgatttaactacagaaaaagaaaatttcatgatggtcacaaacttacccagtaggcccatgcccacagtttgtttcaaatagtgaattgtaagtcatagaaaatcacatatcgtatcaagaatttgagggttgacacttcattagtgaatattgccattccacatgatttacagaagataaacagaaatttgaacaagatctttatatttcactatcaaataat

SEQ ID NO: 597304 - DNA, 570 bp, Homo sapiens
atataagtcacaatttacaactatctagtctatgttttaattaacataatttagttatagttgttttaaatacctttgtcttttcacttttgtagggggattacaattgatttagtcattattgttatagtaatataattcgtttttgcctatatatttacctttgccaatgagtttcataccttcttatgctcttgtgttgctatttagcattttttcatttctacttgaagaattctctttarcgtttcttgaatggcaaatctagtaatgataacttctttcagctttttttttgtctgagaaaacatttttctccacttcatttctgaataatacatttgctgggtatagcatttttagtgaacagtcttttcttttttcttttaggtggggtctctctccttgttgcccaggctggagtgcagtggtgagatcatagttcactacaacttcaactcccaggttcaaatgatcctcctacctcagcctcccaagtagcctggactacaggcaagtgccaccacgcccaaacgatttttattattattttttttttgtagagacagc

SEQ ID NO: 597305 - DNA, 508 bp, Homo sapiens
taatctcttcagttaaaatcactgattacatatgttaatcacatttacaaaataccttcacagcaacatctaaactagtgtttgaccaaaacactgagcaacatagcctagccaagttgacacataaaatttaaccatcacagcttaccccttgttagcttggcacccatacacatgtacttaagccatacttaatctctaaataaagacaatagtgaagtcatactttcaattaacatgatagaactgtcctgtgtacaaatgaaaacatgctaggcagggcacagtggctcacgcctataataccagtactttgagaggctgaggcaagtggattgcttgagcccaggtgttcgagaccagactggataacaaggcaaaaccmcatctctaccaaaaaaacacacaaaaaaatagctgggcatggtagtacatgcctgtagtcccagctacttgggaggcagggggagaatcacctgagcccaggagattgaggctgcagtgagcc

SEQ ID NO: 597306 - DNA, 495 bp, Homo sapiens
gattagacacaataaagtatagtgaacttaaagatagatcagtagatacataataaggaaagagattgagaagtgaagagggagatgaagagaaaagaacaacccagagttatgggaaaatattacatggtacaaaaaaaagaaaaaaaacccataaaattggggtcccagaaggacaaaaaagaaaggagcagagggcatacttgaaaaaaaaattgccaacaagattctgaaattaaagaaaagcaataaccacatatctaagatcayagaatctcagcaaaataaatacgagaaaaacctaccttggcacattatagtacaatggctgaaaactaaagataatgagaagatcttgagggcagctagtaaaaagaattgtaacagagaaagaaaaggatgtcaaaaggttaactcatcagaatgtatgcaagctggaagataataaacaaaaatgtttattgaactgaaaaaaaatctatcaacacagaattc

SEQ ID NO: 597307 - DNA, 544 bp, Homo sapiens
gtgtgtgagtgtgtgtgtgtgttatatataacttagtgattgctctaggaattacaatatatatgtataacttattagtctattaaaattaatatttacaatttcaagtaaatgataaaaatcttataaccatataggtcctgttaacctctctccctttatgctgtaatttcctatgaggtagtaggcagtataatgccccctccccaacacaaaaaaatattcacaccctgaatctcaaaacctattaataagtaaacttacaaggcaaaaggatctctgtgagtgtgattaaagttaaggactactgtggtttgaatgtaaatgtccctccaaaatttatatgttagaacttcaaccccaagaagatagtattaagaggtggggcttttgggaggtgactaggtcatgagggatctgccttcaccaatgggattagttcctttwtaaaggagacctttgaaagctgcctgggacttccgtttctttttccatgtgaggacacagcatttgtccctttttgcttttctgttcttccacagtg

SEQ ID NO: 597308 - DNA, 637 bp, Homo sapiens
gaattctgtctccctcccccagattcatatgctaagtcctcagtctcagtatttcagtatgtaattgtatttggaggtagggtctttaagaggtaatgaagttaaaatgagatcattaaggtataccgcaattcatggaccagtgttgttataagaagagtttgggacatagacacatagagtgggagacaatatgaagaaatagggaaaagatggccatctacaagccaatgaaagaggtctcagaataatccaactttggtgacactttgatcttggactttgagcctccagagccgtggaaataaatttcctttgtttaaccactgatckctggtactttgctatggcagccttagaaaactaatacatggactactaaaagaatgtcaagcatcagcatcagtaaacaaatgcagaaggagaccaagagtaaagtgtacttgatcattctgaaaaaaaggacaggataccaactgtagccacttggcactcatagcccaagtttccactgcctattcttctagggctctgaaattcaacttagtcctcatgctccctaacacagctcccagctccaagaacacacttttcacataaataggttatattttcaaatattaattttcttaaaaat

SEQ ID NO: 597309 - DNA, 621 bp, Homo sapiens
acagataaatgaccacataaagaggcagcagcaaaagggtggccatctgcaagccaaagagtgaaacctcagagtacaccatctctgctggcttcttgatcttagacttccagagacccaaactgtgagaaaacaaatttcagttgttgaagccacccaatgtgtggtatttaattatagcaaactaatacagcagttatcataaagaacatttccattagccccaaagttctcttctccttctttgcagtcrctcccctctctccacacttagcccctattaatcactgatctgataactctctctatagctttgcctttttcagatcagaatgctatacagtatggaatcattcattgtagccatctgagtttgtcttccttctcttagaatgaagcatttgatattgacccctgttatcgtgtattagtagcttgttcttttcttattgctgcatattattttattgttcatatgtaccacaatttatctagttattccaaagtgcctggaccattttgcattctatcagcaatatatgagagtttcagttgctctacatcttcagtgcttaggattttcagtcttctaaattttactaattctggtagttgggtagt

SEQ ID NO: 597310 - DNA, 624 bp, Homo sapiens
ggtatatatatttttaaagaaaatgatcagcaaatgtataacaactttgacaaaacctttttttatgaatattttcttgtgacgtaaactaatagcttaataaggacttacacacacaaatattcagagtaattttatttatattctgaaactggaaacaatgtaatacctgttaaatgaattactatgggttttcaggtaattagggaattgggatttgaagttggttagggcaaaatcaagccaacgtttctttatcaaattgctttactgccaaaagcagaggatacaaaaatcagaaagacaagtctactagcacgtaaccttggatcagaaaaatagtgagactgagttggtgcaacctaayctaaagcagtcaaatgtttttaaaactatcaagatcattttctaagttttacagggttaacacataatgttcttatctgtaagtgatcactcacacagagacactcaacttttcctaaaattcgcaaattatggttttaatatctcagtagttaacaacaaatttttcaactcgattttttctgataatgaacattcatcattttctgatccaactaatcgttgtttaagttagaagtcagctatcccaattatgta

SEQ ID NO: 597311 - DNA, 624 bp, Homo sapiens
ggtatatatatttttaaagaaaatgatcagcaaatgtataacaactttgacaaaacctttttttatgaatattttcttgtgacgtaaactaatagcttaataaggacttacacacacaaatattcagagtaattttatttatattctgaaactggaaacaatgtaatacctgttaaatgaattactatgggttttcaggtaattagggaattgggatttgaagttggttagggcaaaatcaagccaacgtttctttatcaaattgctttactgccaaaagcagaggatacaaaaatcagaaagacaagtctactagcacgtaaccttggatcagaaaaatagtgagactgagttggtgcaacctaacctaaagcagtcaaatgtttttaaaactatcaagatcattttctaagttttacagggttaacacataatgttcttatctgtaagtgatcactcacacagagacactcaacttttcctaaaattcgcaaattatggttttaatatctcagtagttaacaacaaatttttcaactcgattttttctgataatgaacrttcatcattttctgatccaactaatcgttgtttaagttagaagtcagctatcccaattatgta

SEQ ID NO: 597312 - DNA, 650 bp, Homo sapiens
tataaaatacatatactataaaagttcctagcataatccctggcacatactgctcaataactattgaattgacaatgaatgggaattcttgggagaatgttcttcactttgaaggaaaacaacatatttaaaaacacacatttgcacaaatgataaagtttaaagttatttcaaaaaaagttatcctatgaatattatttatacatatcaattattcaaggcatgatgaaatttgtcaaataatgatataactaaaattttatagagcacagcatacaaaatgagatataatttatactgwaaacttatttcaagaacagaacatggtaaatttcactatgcctggggcatggaaagctacaaaagaacaatgttgctcctctaataagaaaaaagagcaggattctctctatcatcaaaactattcttgagcccatcagagagttgagattgcaagccaactacatgaatcaaatttcaaggttggcgaatccctgtaagcagtgatataacataggaagttttcttttcacagaatgtggaaagaagaggtagtaaccatgaaaaatgggtaagaaaaaactgctgaaattataatgattatataagagtgaagcatggttagcatgaaagtttacaatgcctataag

SEQ ID NO: 597313 - DNA, 644 bp, Homo sapiens
cctccttggttagatatattcctaaacattttactttttctgcagctgtttcactgttggtgtatagcagtgctactgatttgtgtacattgattttgtatcctgaaactttactgaattcatttatcagttctagaagttttctgaatgagtctttacagtttactaggtgtataatcatatcattggtgaacagtgacagtttgactttctctttactgatttagatgccctttatttctttctcttctctgattgctctggctggactgctttattctttttattgtttgttgttgttgttgtttgtcttatctgactgtgttttttccaataggctatcttccagctcactaattttttcatttgtttgatcagttctgytgttgagactctaatgcattttttgatatttaaattggatctttcagctacacattttctgcttgactctatttaattattttaatctgtccattaaatttatctgttcagattctgaatttcttctctgtgttatctatcatgcatttaatttagcttccacatatagctatttctaattctttgtctataaagtcacatatctccaactctccaggattagtcactatgtcttgtttagttcatgtggtgaggtcatg

SEQ ID NO: 597314 - DNA, 610 bp, Homo sapiens
aaaaaggaaaataataaaatatgtcttgggatttttgcagggatctaaagcaaaggtctggacaggtaatttaataaaggtcttggtggttctcagtggaaagttgagttgccctcatcacccatcctggaggtgggggtgcaggtgggtaaaggtggtgcaggcaggttgcacggggttaagggttagggggattgagggagcattgggatgcgcagtgggattattgactgtcacaacgacttgagaacaagggaaaggagctgaatgtcctacattaaatagaatgctcattataaagagcattataaagcattttgtcttgcctaaaatgctaatagcaccactggagagaaacactggaagggaaatgagtaattagcatgactcttctagtgcctcctctaaaataccaattaagtctttacagggagttgatggcagtgaccacaagaatgtctgctccgggaagtagagatgaaggaggatgccaggtttctgatgtgtcagctctgctggtggtaaaatgcatattgtcttatgaggcataacgagcctgaagggtattgttggctggacagagasctgggcaatggtgcactataagcat

SEQ ID NO: 597315 - DNA, 493 bp, Homo sapiens
atcctgcttcatccctgtgtagagtttctattaggctcagagacggaggggaatatttgaatatgtctgtggcaggcaactgatcaggggtggaagacctgaagacagaagaccccagggatgagaaataaggacaaagagtaaattatcaagggccaatctgagcctcaagtttaattaaccatcctargaagattttgttttaatttaacttgtattcctgtttgaatagcaaatacagttatatggtttgaaattgtttgggggctcagaaaacaataccccaaaatgaagacttcagaagcagcctcagaagcaaaagtttctctctgaccttcttcttccctcctgtctctggccactcattctcctccaaggacaccagaatccctcttccccaaggcaggttatagaaaccagaatcccttttccttaaagccagccaggaaacctaaaaatattattctaacttctccccctggcctttctgtgt

SEQ ID NO: 597316 - DNA, 658 bp, Homo sapiens
attctaaggtttttataccatacgtgaagtgatataattggaaggtagactgtgatgaaagatatatgttgtaaacactagagcacacactacatttttaaaaagaagtataatgataagccaatagtggagataaaatgaaataataaaaattctcagctggatgtggtggctcatgtctgtaatcccagcactttgggaggctgaggcaggcagatcaactgaggtcaggagtttgagaccagcctggccaacatggtgaaaccccatctctactaaaaatacaaaaattagtcaggcatggcggcaygtgcctgtagtcccagctacttgggaggctgaggcaggagaattgcctgaacttgggaggtggaggtggcagtgagcaagactgtgccactgcactccagcctgggcaacagagcgagactccaccttaaacaaaacaaaacaaacaaacaaatctcaataaatacaaaggcaagcagaaaaagaggataaaagggacaagaaaaagatgaaacaaaaaatatttatggtagttttaatccaatcatatcaataattgcattaattataaatggcctaactacatgaattaaagattgttagactgtataaaaaagtaagacccaattatatgctatccacaaaaaaa

SEQ ID NO: 597317 - DNA, 298 bp, Homo sapiens
caataaatacaaaggcaagcagaaaaagaggataaaagggacaagaaaaagatgaaacaaaaaatatttatggtagttttaatccaatcatatcaataattgcattaattataaatggcctaactacatgaattaaagattgttagactgtataaaaaagtaagacccaattatatgctatccacaaaaaaagctcaccttgaatataaaracagaaatgggttaaaaataaaacaatgggaaaagatataaatgtaagcactaatcaaaagaaaactgaaatggctatattaatatc

SEQ ID NO: 597318 - DNA, 489 bp, Homo sapiens
aatataggcctacctcttattagttttattaccttagggaagtcacttaacctttctaagcctgttaactcatctgtaagacaggagcaattgaccactccakcgggttgtgataaagacggaggggcaggcatacattctacaactcttagttctgtctgcacccagcccactcttccctcagaagcagacagtgtctaatcttaggaaggtctgtaagcacagagaaaaaaagatgcaccaacctcaccttgataactccagctccagtgtgtgtcaccatttctgggtaatatataactcttctcctcagttgttttttttttttttttttttaaaggacaggatcttgctatgttgcccaagctagcatgcaggggctattcacaggtacaatcatagtgcactgtagccttgaactcctggccctcaagcaatcctcctgcctcagccacctcagtagctggcactgcaggcatgagccacagt

SEQ ID NO: 597319 - DNA, 489 bp, Homo sapiens
aatataggcctacctcttattagttttattaccttagggaagtcacttaacctttctaagcctgttaactcatctgtaagacaggagcaattgaccactccagcgggttgtgataaagacggaggggcaggcatacattctacaactcttagttctgtctgcacccagcccactyttccctcagaagcagacagtgtctaatcttaggaaggtctgtaagcacagagaaaaaaagatgcaccaacctcaccttgataactccagctccagtgtgtgtcaccatttctgggtaatatataactcttctcctcagttgttttttttttttttttttttaaaggacaggatcttgctatgttgcccaagctagcatgcaggggctattcacaggtacaatcatagtgcactgtagccttgaactcctggccctcaagcaatcctcctgcctcagccacctcagtagctggcactgcaggcatgagccacagt

SEQ ID NO: 597320 - DNA, 558 bp, Homo sapiens
attgtaccagttcccctaaactctggctagtgactagagacaaagaggatctgcacaaatacctgaagaagaccatgtccaaacacacaaacctagcacattataatgtctggtgtgtcaagacaaaataaatttccttcagtgagaaattgtctgtttccttaggcctcttgaaacaatgtaagttagcccccactgccccaaagtgacattagttgtagaaaattttccttggcttggtggggagggggtgcccatttatttttactacctttgcaaaaagtttattctgcaagtctggatctcccatctgtctatgcacatccgctgcacttccttcctgtctctgaatccttccctggcttggcccccttcactgcttggtccttgtttaaaaataaataaataaataagccaaaggagaaggaaagggaaggaaaagacrgtaagatgtcacaatttattaatcttacatgggtgttgaataatatattagctcaccttagctcatgaatgtactaaatctatccagatcagcattggtgggctgaggctaaa

SEQ ID NO: 597321 - DNA, 662 bp, Homo sapiens
aatataaatgttaattgcaagaaaaagggaaagaaaacaaacattatagaaggtagaaaataaaatgtatctatcatcttcctcacagccacaccctgtaatcccctaagtaactttgaytgagaatttactgggcatctttcaggaaaagactgttttattagatcacttattataataattctaaaatttagtacaaaatattattttaaagttcctaggattattattatgttacaaataagtttaaaatccaaactgattatttcaagctgcagaaccccagattccaaggaggtgactgaagttgaagtgggtgctggggccaggactcagatctcccacctcttccttgttcagagcagttctgcttttccgtagttcatgtactgtattgggcttttgtgtaagactttgcagaacatttaagtccacagttttaaaaagtctgaaagaatagaaatgacaacataaataaatataaacttgggattacattctattattttacattctatctgtcatccttccttcatattctacttttataaacctataggttctccgtttgctaccctcaagagccctatacctccattctaaaaacactgtagaagtttatcttagaaacaataggtgatctgggcagaggggagggaagg

SEQ ID NO: 597322 - DNA, 391 bp, Homo sapiens
acacatcaaagaagtttaatccattacttcataatgatactaaaaaaaccagtcatcattaaaggatgctaaggaaccatttcattattttgaaaactggtagataatgggaaagaatcaagcacttatgttgccttatttatatgaactataccattgggtaaccaaacagcagaggtgagaaagtttttctctatagacagtacacctcataaatgaaaaagagtagatttagactgtcaccattctgcartcctaatgaacaaatagatctgggtactgagcatcaatggttgctaaccaacatcacgaagagggagacaaccaaacattatgtgactcctgatggagaaacaatcactgcctttgaattcttcttgccataaaaatc

SEQ ID NO: 597323 - DNA, 581 bp, Homo sapiens
tgcaacttgtgtacctttatttgtgtacctcaaataagatgtaaatactagctaactatttaatgaataattattgttaatttttttagatatgataatattgtgcttatcttttttaaaaatttttttactgtaagttctgggatacatgtgctgaacatgcaggtttgttacataggtatacatgtgccatggtggtttgctgcacctatcaacccatcatctaggttttaggcccacatgcattaggtatttgtcctaatactctccctccccttgtcctccacccaccgacaggccccagtgtgtgatgtttccctccctgtgtctatgtcttctcatcattcaactcccacttatgagtgagaacatgcggtgtttggttttctgttcctgtgttttagaaatacatttatacttatatttatggatgagataataaggcatcaggaacttgytttaaaacaaaatgaaacagaaggaattggatggggcaggtttggccatggttattgggctggctgatggacacacagaagttcactaggctatttgccttttttgtgcatgcttgaaattct

SEQ ID NO: 597324 - DNA, 618 bp, Homo sapiens
acttcatgagcatggagaaaacactgacaatcacccattaggttatgaagataggttacaggtgtgtggctagggtgtgggaaagggactagtatgaggagagaaggtggtgagagaaggtgttgatgaaaaaaatagcaagcatgatatgatcctatatatatagaattacttgtgtatttttatgtgtatgtataaagaatgcttaaaaggataaccaactcgttaatctcatgatggtgggatttcaggtgggatttacttttatgtgattaggaacaaactaaaggtcttttcattgtggaaaaaaagaaaaaaaaaaaaaccctgggatgtgcaactgtaacaaaagctataaggtacttaggaataaattctataaaagtttaacaagatttttatggagtaagtaaatggagygttatacaatattaatgagttggaggtttcaatataataaaaatggcaattctccaagttaacctataaattctacgcaattctaataaaatctcaagagaatttgtcacagaatttgatcaactggtccttcacacagaagagtaaaggcccaagcatagacaaagacaattttgcagatgaatggggggagaaagg

SEQ ID NO: 597325 - DNA, 627 bp, Homo sapiens
aagtgtctattatagtacacacacatacatacacatagaccaactacatgtaattagtaatcattatcatccacttagtgtttgtagtttgcaaaacattttcacatgtgattttatttaatcctcagaacaaatcccaaagggaattccttattattagaccatgctagtagagagagaatggcacagagctaggttctggtgacagatttggagccctaaagtttccagtggtcatgagactgagctgtcatcaggaagacaacataatgaagaaaggcaactgagaatcacaacatctggttaaggtgttaggtgtgcggccttaagcaagtatctttaaatatgtctgatttcagtttccacatgatarttttcatatttcattattcatggcctctaaaagcagacctggcttcaaggagaacaagcactgagagtttgtggtaaacttgagctcttcctttagaagcagctgagaccacttatctagttagaaccttagtcttcgaggaaatgctcatgtctagctagatgaaaatggccacccatgacttcctgccccagctgccctaacatggtgccactcaacaccaagaatgacaatgtgaatattattgggaaact

SEQ ID NO: 597326 - DNA, 517 bp, Homo sapiens
atgccaatattcatattatgcattattcataatagccaaaatgtaaaaacaacccaaatgtccattaacagaagaatggataaacaaaataatgctagatatgaatattactcagctataaaaaaatgaagttttgatatattctacctggataaaccttgaaaacattacactgaatgaaataagacagacacaaaaggataaatattatatgattacacttatatggggtatctagaataggcaaaatgatagagacagaaagtagaataaargttaccaggtgttggagggaagaggaaatgggagatgttgcttaatgtgtacaaagtttctgtttgggattatgacaaaagtctggaaatagatagttacacaatatggtgaatgtacttaatgctactaaattgtatactttaaaaatggttaaaattggcagggcacggtggctcatgcctgtaataccaggtctttgggaggccaaggtgggtggatcacaaggtcaggtgattgagac

SEQ ID NO: 597327 - DNA, 596 bp, Homo sapiens
tactacaacaaagtgaataaagatcataataacctccagaaagatattctcaaaaaaattaaagctataatgtcctagaaaagctaatacacactgagtgacatgaaacwtgaaagaacaacatacatcagaattagagaaactcagaaattagaacagaactcacagaagaattaaacgttttattttttattcttttttggaattaaacattttaaaaagcatttgagaaataaagattgacctataaggaacacaagaacacataaatataactaataaaaacttaaaagaaaataaggtaaaaaggagggaaatttataaacttaaaaataaatgaagaaagaaattaaaaagatttaagggaaagtgacaaatgttgaagatagacaaaaaaggttcaatatgcagataatagaagtctccagagaagcaatctaaagcaatccaaaacagaacaaatatttaagactttaattgaagaaaattttcctgaaattaacaaaatatatgtatttgaaaccacattttgaaagaaatacacactgtttactttcaaactagaatgaccaacaaacattctaataaaattactg

SEQ ID NO: 597328 - DNA, 596 bp, Homo sapiens
tactacaacaaagtgaataaagatcataataacctccagaaagatattctcaaaaaaattaaagctataatgtcctagaaaagctaatacacactgagtgacatgaaacttgaaagaacaacatacatcagaattagagaaactcagaaattagaacagaacycacagaagaattaaacgttttattttttattcttttttggaattaaacattttaaaaagcatttgagaaataaagattgacctataaggaacacaagaacacataaatataactaataaaaacttaaaagaaaataaggtaaaaaggagggaaatttataaacttaaaaataaatgaagaaagaaattaaaaagatttaagggaaagtgacaaatgttgaagatagacaaaaaaggttcaatatgcagataatagaagtctccagagaagcaatctaaagcaatccaaaacagaacaaatatttaagactttaattgaagaaaattttcctgaaattaacaaaatatatgtatttgaaaccacattttgaaagaaatacacactgtttactttcaaactagaatgaccaacaaacattctaataaaattactg

SEQ ID NO: 597329 - DNA, 596 bp, Homo sapiens
tactacaacaaagtgaataaagatcataataacctccagaaagatattctcaaaaaaattaaagctataatgtcctagaaaagctaatacacactgagtgacatgaaacttgaaagaacaacatacatcagaattagagaaactcagaaattagaacagaactcacagaagaattaaacgttttattttttattcttttttggaattaaacattttaaaaagcatttgagaaataaagattgacctataaggaacacaagaacacataaatataactaataaaaacttaaaagaaaataaggtaaaaaggagggaaatttataaacttaaaaayaaatgaagaaagaaattaaaaagatttaagggaaagtgacaaatgttgaagatagacaaaaaaggttcaatatgcagataatagaagtctccagagaagcaatctaaagcaatccaaaacagaacaaatatttaagactttaattgaagaaaattttcctgaaattaacaaaatatatgtatttgaaaccacattttgaaagaaatacacactgtttactttcaaactagaatgaccaacaaacattctaataaaattactg

SEQ ID NO: 597330 - DNA, 596 bp, Homo sapiens
tactacaacaaagtgaataaagatcataataacctccagaaagatattctcaaaaaaattaaagctataatgtcctagaaaagctaatacacactgagtgacatgaaacttgaaagaacaacatacatcagaattagagaaactcagaaattagaacagaactcacagaagaattaaacgttttattttttattcttttttggaattaaacattttaaaaagcatttgagaaataaagattgacctataaggaacacaagaacacataaatataactaataaaaacttaaaagaaaataaggtaaaaaggagggaaatttataaacttaaaaataaatgaagaaagaaattaaaaagatttaagggaaagtgacaaatgttgaagatagacaaaaaaggttcaatatgcagataatagaagtctccagagaagcartctaaagcaatccaaaacagaacaaatatttaagactttaattgaagaaaattttcctgaaattaacaaaatatatgtatttgaaaccacattttgaaagaaatacacactgtttactttcaaactagaatgaccaacaaacattctaataaaattactg

SEQ ID NO: 597331 - DNA, 559 bp, Homo sapiens
ggaggttgcagtgagccgagatcgtgccactgcactctagcctggtgacagagtgagactccatctgaaagaaaagaaagaaagaaagaaggaaagaaggaaagaaggaaagaaagaaagaaaaaaagaaagaaaaagagagagagaaggaaggaaggaaagaaaaaacaaaaaaagctagagcttcttggagaaatggctgattccaggtttgaggcagcaaatgtacagatgtgcctggaacatcttgtcatatcagatagcaaggaagctatcaaagacttctagggtctttgaagctctttgcacactagtgagagagagagagagaraaaaaaaaaaagactactagaatcttatcaaaaggagccaggagccatattgaagaagctcctactggccaaagatgggacaatttgagctctaatatcgtagatggaaacctatcaaatatatttaaattcatgaatttataatgatattaaagaaatctaagaatgacagagaatcaattccttaacttgaaaactgggtaatttttttttaaaaaagcaggtat

SEQ ID NO: 597332 - DNA, 542 bp, Homo sapiens
tctggccctacatatatttccatccccactgtctatacttcagcagcaaggaactctctgggtttctctttctcaacatcatgctgtctccacrtctttagaatactctgctctccactctctatctagttcatttgcagatctcagctcactgcaacattatttataatagcaaacaacaaaatgaaacggggtgggggcataacattcccaacactagggaagtgaatcatggaacaccaggcagccattttataattgtagactaatgagaaacaatgttgattagatattaagagaaaacacgcatgttacagtaatacctattatttcatattgtcgtaatacatttatacatatatatgtaggtggaaaaaatcttgaagggaatgcaccaagctgttcaaagtgataactcatgggtaatggggttatgggtggtcttttcctttttgcttatctatattttctaaaataaacatgtattaagaaaaatcaatatgaattcaaaaaatatcaacttaactaaaaaaaacccctta

SEQ ID NO: 597333 - DNA, 482 bp, Homo sapiens
ttatagatagcctgttgaacataaaataataagtaatatggtgactatagtcagatcttagattccagtgaataattaattcttccaggtaaaggtagttttaaagaggaacagaccctcatcctgtttgaggatagaggtcacaagaacttctcaagaagtgaagatgcagtgtattgttttctgggattggctggggtactgaaaactaaacaaagagatagtggcaaaagttttcttccattcatgaccattctttcagcagccagatgtttgacaaccatcatattgatactggtagaaacacatattcagagagtgggcagggcagttaacaggggtggtagcttgtcattttgtcatatcagagatgtggctgcttgayagtctgtagtgacttcctacaattttccaatgctacaaaattaatcataaacttctcaacctacagggtctcacacagtaccttaaatagtcccctg

SEQ ID NO: 597334 - DNA, 608 bp, Homo sapiens
aataacatttctaaccggagtgagataatatctcattgtggttttgatttgcatttccctgatgattagtgatgttgamcattttttcttatattttttgtaagtttgtatgtcttcttttgagaaatgtttatccaaatcccttgcccattattaaaatcatatttttggggtttgttttgcttttgagttgtttgaatttttcgtatattctggatattaatcatttatcggatgtatactttccaaacattttctctctttctacaggttgtctcttcactctgctgatcgtttcctttgctgtgcacaagttttttagtttgagatattctcatttgtctttttgtttttgttgcctgtgcttttgaagtctcacctatgaaatctttgcctagaccaatgtcctaaagcatttatcatgttttcttctggtagatttatcattttgtatcttacatttaagttttcattcattttgagttgattttcatatatgaccagggaaaggtttctagtttgatggctttcccagtactatttattgaagagggtgtcattttcccaatgtatgtccctggcaccttgggtcaaaaatcaactggctg

SEQ ID NO: 597335 - DNA, 608 bp, Homo sapiens
aataacatttctaaccggagtgagataatatctcattgtggttttgatttgcatttccctgatgattagtgatgttgaccattttttcttatattttttgtaagtttgtatgtcttcttttgagaaatgtttatccaaatcccttgcccattattaaaatcatatttttggggtttgttttgcttttgagttgtttgaatttttcgtatattctggatattaatcatttatcggatgtatactttccaaacattttctctctttctacaggttgtctcttcactctgctsatcgtttcctttgctgtgcacaagttttttagtttgagatattctcatttgtctttttgtttttgttgcctgtgcttttgaagtctcacctatgaaatctttgcctagaccaatgtcctaaagcatttatcatgttttcttctggtagatttatcattttgtatcttacatttaagttttcattcattttgagttgattttcatatatgaccagggaaaggtttctagtttgatggctttcccagtactatttattgaagagggtgtcattttcccaatgtatgtccctggcaccttgggtcaaaaatcaactggctg

SEQ ID NO: 597336 - DNA, 517 bp, Homo sapiens
cagtttcattcacatgtcttttgctttggcaatgatgactggaagattgaaattagttgagcctgacaatagtacttatctgtgtggtcttacaggcatgtaaatctcaggtagttgatcttacatggcaactgagggtttccagagaatcacgttccaggagtcccacttgcaaggcctcttaygttctaaccttgcaagtcccaggatatcacttctgccacattctgttgaacagacaaatcatgacggccagtccagttgcaagggagaaagaattagtcgccatctttcaagggagaagtagcaaatgttttgtagttattgttagttggccatatttgacttattattggctgtttcagatctcactatcagacaatcattgactgcttatgtggagagacaaaaaaaaagcgcttctatgtatagccttaaaattccatgatccttaggggacttccctcaggaaggaagaacaggattttccattttttcctttcaatagttgtcaagt

SEQ ID NO: 597337 - DNA, 574 bp, Homo sapiens
ccctggtagcagaacaaggtagatgggacttataactttctgtagtatggtgttatactaaatagcaatgtcatgttatttagctatcatttaaatggagtttgtggtattttccatagaactgtgttttgagctaataagaaaatgagttctacttattgtattattttttaagttttgatcccttctttcctgtggatttaaaatgygtttgagaatatcaaacattcagtcttttgcttgcaagtgtgtatttattctgcttgataatagaccttgaaaagagtcaaccaaagagaatttggacagataaaaattttaattagagaatgcctataaatgattaactccctgagtagactgattattcttcctgttttaaaaagatgcagagaattctttcctgtcacttctttaatagccaactgttagattgtttaacaaatctcactttgagaagtaacgcataccttcttatgcccttttcagtgtatttttaggactttttttcttaaatcaaggtgtttctgagccagattctattcatttgtttccattctgtatatgtattcta

SEQ ID NO: 597338 - DNA, 578 bp, Homo sapiens
cacatacatttacaactaaatgatattaaaatcagagacaatggatattctaaactcatcacttcttacatccactatgatctatgctcttggggatagcatctcttacaaactcacattccatgacagcaggttggcatcttgaaatcagccattgtgggaatatttacaccgcataaatgagctaatagtacaaatagaggcttaatttattgctttgttgacgaggaagtgaaggagaaagtgtttataatgcatattaaaactgcattgtgtctctggtcattgtattgtgaatagcaccaaaaattgagaaactattatttcagtatttgaaaactattatttgattcaatgcctaagtggcttgggtaattgacaaaccaaagttctgaggaatrtttttgttgtttcacttttgtcttactcactaaacaataccaatcaatattcatactggagttatattcacccatcagttgcaaccacaggttggctatacaagagtttaacaaaaactgataacagaattctattgtatattctgttattatttataattttgtgctatgtaaaca

SEQ ID NO: 597339 - DNA, 578 bp, Homo sapiens
cacatacatttacaactaaatgatattaaaatcagagacaatggatattctaaactcatcacttcttacatccactatgatctatgctcttggggatagcatctcttacaaactcacattccatgacagcaggttggcatcttgaaatcagccattgtgggaatatttacaccgcataaatgagctaatagtacaaatagaggcttaatttattgctttgttgacgaggaagtgaaggagaaagtgtttataatgcatattaaaactgcattgtgtctctggtcattgtattgtgaatagcaccaaaaattgagaaactattatttcagtatttgaaaactattatttgattcaatgcctaagtggcttgggtaattgacaaaccaaagttctgaggaatatttttgttgtttcacttttgtcttactcactaaacaataccaatcaatattcatactggagttatattcacccatcagttgcaaccacrggttggctatacaagagtttaacaaaaactgataacagaattctattgtatattctgttattatttataattttgtgctatgtaaaca

SEQ ID NO: 597340 - DNA, 598 bp, Homo sapiens
tgaaaaaagagaacagaacaaatggattaaagacaatattaagatatttataaataaaagggaaaattttctggttgtaccactttattctagcctgggaaacagagcaagaccctatctctaaaaaaaaaaaaaaaaaagatctgtgtcagcagatgaataggacatagaagatctcagaaaaaccatgcaaaacaatcaacaccaacacatatgctggttaagttactacamcctaaggatgaaaaaagttaatttttggaggcactcaaaagaaatagaaaattatgtatgaagagaaaaattttaggctatctccagcctttccacggtgattttcgttgccaggggatcatagaatatcatttacaaagttctgagggaaagaaagtatgccccgagaatctctaatgtggtctagctgtccttttagtgcaaaggcaacagtcatattctcaagtgtgcaagaacttaggaagtttaacacccttgaactcctttaaaaaacaaaacaaaaaacttcaatggcaaagtccagtcaaccaaaaggtgaattcaaacaaaagaatagacagatgtgaacattgaatctatacat

SEQ ID NO: 597341 - DNA, 598 bp, Homo sapiens
tgaaaaaagagaacagaacaaatggattaaagacaatattaagatatttataaataaaagggaaaattttctggttgtaccactttattctagcctgggaaacagagcaagaccctatctctaaaaaaaaaaaaaaaaaagatctgtgtcagcagatgaataggacatagaagatctcagaaaaaccatgcaaaacaatcaacaccaacacatatgctggttaagttactacaacctaaggatgaaaaaagttaatttttggaggcactcaaaagaaatagaaaattatgtatgaagagaaaaattttaggctatctccagcctttccacggtgattttcgttgccaggggatcatagaatatcatttacaaagttctgagggaaagaaagtatgccccgagaatctctaatgtggtctagctgtccttttagtgcaaaggcaacagtcatattctcaagtgtgcaagaacttaggaagtttaacacccttgaactcctttaaaaaacaaaacaaaaaacttsaatggcaaagtccagtcaaccaaaaggtgaattcaaacaaaagaatagacagatgtgaacattgaatctatacat

SEQ ID NO: 597342 - DNA, 598 bp, Homo sapiens
tgaaaaaagagaacagaacaaatggattaaagacaatattaagatatttataaataaaagggaaaattttctggttgtaccactttattctagcctgggaaacagagcaagaccctatctctaaaaaaaaaaaaaaaaaagatctgtgtcagcagatgaataggacatagaagatctcagaaaaaccatgcaaaacaatcaacaccaacacatatgctggttaagttactacaacctaaggatgaaaaaagttaatttttggaggcactcaaaagaaatagaaaattatgtatgaagagaaaaattttaggctatctccagcctttccacggtgattttcgttgccaggggatcatagaatatcatttacaaagttctgagggaaagaaagtatgccccgagaatctctaatgtggtctagctgtccttttagtgcaaaggcaacagtcatattctcaagtgtgcaagaacttaggaagtttaacacccttgaactcctttaaaaaacaaaacaaaaaacttcaatggcaaagtccagtcaaccaaaaggtgaattcaaacaaaagartagacagatgtgaacattgaatctatacat

SEQ ID NO: 597343 - DNA, 611 bp, Homo sapiens
cacattcatcggttttatacgttgaaccatccttgcatctcaaatgtaaatcccctttaattgtgttgaataattcttttaatttattgttgaatttggtttgctagtattttgttgagkgttttttaagtctgtgttcatcagagatattgacctgtagttttcttttcttgtagtgttcttttctggctttgttatcagagtcatattggccttgaacagtgttttcaagtgttcaacaagaacacttggccttgttcagtgttttctatgtaaaacaagtttggaaaaattccctgcactttgaatgtttggaagagtttgagaagggttggtattctcaatccttctttaaatgttctttaagtgttggttagaattcagctataaagctgtcttgtcctgggcttttctttggtgggagactttattaagaacacttaatatccttactcattattggtctgctcagactttctattccttcatgattcaggtttggtaagttgtgtctgtataggaatttatccatttcttctgggttatctaatttgttggtgtataattgctcatagtaacttcttatgattctttgcattgctgtgttatca

SEQ ID NO: 597344 - DNA, 595 bp, Homo sapiens
ttcctaactggtgccccagaagcatcatcactttgccaaagcctctcactccaaaagacaagcatggtaaccaaagcaaatagacccygatcctgctttttgccaccactacctgccctagagatttgggaccttctgcttttacaccaaagctttcactgatcaagccacctagagcagaggactttgtcaggaattttaaagactaatataatcttttccactcattcgagtgtaaacatttcaggtagaaagagtgagatgaaagaggaaacagtgaatactgcaatttgtttatatctcaaaactgcaagtctattctttccagaacagaacttggtacactggggcctgggcacctgagtccccagtgtttgtgatgttatccttactcagttactggaaatataaagggacaacacctagtttggaatcaacaaatggagaatctatgacacttcagtagtttttcttcctctttacctggaaaggaatgctttgttgcctgtgagtgtggaaggagaaagttggttcccaattggaacattttcctctgtaacacaccactacaaccctctcgtttgtgcatacactg

SEQ ID NO: 597345 - DNA, 595 bp, Homo sapiens
ttcctaactggtgccccagaagcatcatcactttgccaaagcctctcactccaaaagacaagcatggtaaccaaagcaaatagaccccgatcctgctttttgccaccactacctgccctagagatttgggaccttctgcttttacaccaaagctttcactgatcaagccacctagagcagaggactttgtcaggaattttaaagactaatataatcttttccactcattygagtgtaaacatttcaggtagaaagagtgagatgaaagaggaaacagtgaatactgcaatttgtttatatctcaaaactgcaagtctattctttccagaacagaacttggtacactggggcctgggcacctgagtccccagtgtttgtgatgttatccttactcagttactggaaatataaagggacaacacctagtttggaatcaacaaatggagaatctatgacacttcagtagtttttcttcctctttacctggaaaggaatgctttgttgcctgtgagtgtggaaggagaaagttggttcccaattggaacattttcctctgtaacacaccactacaaccctctcgtttgtgcatacactg

SEQ ID NO: 597346 - DNA, 595 bp, Homo sapiens
ttcctaactggtgccccagaagcatcatcactttgccaaagcctctcactccaaaagacaagcatggtaaccaaagcaaatagaccccgatcctgctttttgccaccactacctgccctagagatttgggaccttctgcttttacaccaaagctttcactgatcaagccacctagagcagaggactttgtcaggaattttaaagactaatataatcttttccactcattcgagtgtaaacatttcaggtagaaagagtgagatgaaagaggaaacagtgaatactgcaatttgtttatatctcaaaactgcaagtctattctttccagaacagaacttggtacactggggcctgggcacctgagtccccagtgtttgtgatgttatccttactcagttactggaaatatamagggacaacacctagtttggaatcaacaaatggagaatctatgacacttcagtagtttttcttcctctttacctggaaaggaatgctttgttgcctgtgagtgtggaaggagaaagttggttcccaattggaacattttcctctgtaacacaccactacaaccctctcgtttgtgcatacactg

SEQ ID NO: 597347 - DNA, 595 bp, Homo sapiens
ttcctaactggtgccccagaagcatcatcactttgccaaagcctctcactccaaaagacaagcatggtaaccaaagcaaatagaccccgatcctgctttttgccaccactacctgccctagagatttgggaccttctgcttttacaccaaagctttcactgatcaagccacctagagcagaggactttgtcaggaattttaaagactaatataatcttttccactcattcgagtgtaaacatttcaggtagaaagagtgagatgaaagaggaaacagtgaatactgcaatttgtttatatctcaaaactgcaagtctattctttccagaacagaacttggtacactggggcctgggcacctgagtccccagtgtttgtgatgttatccttactcagttactggaaatataaagggacaacacctagtttggaatcaacaaatggagaatctatgacacttcagtagtttttcttcctctttacctggaaaggaaygctttgttgcctgtgagtgtggaaggagaaagttggttcccaattggaacattttcctctgtaacacaccactacaaccctctcgtttgtgcatacactg

SEQ ID NO: 597348 - DNA, 455 bp, Homo sapiens
caaggcctggatgaagacctgaagccaggtctgtctaacagagagtaggcatcctaaacatgatgcttrctgactttccctacctctacttaatctatttatcttctctggctttatgactcttgctcatgtcacccttactacctaaattcaaaagatttagactagctgtatcttgcctatttcatgactcttctagaccaggattgatatgacagagaaccaatcccctgatgctaaataaaaaaggtgaaatccaggttaggcttaataacatcccctttcagcagcccccacctcccttctcccctacttgttcttccaagtttttccgtcttttttctatcttctccccactgtgcccactcaggtatcccatgggctccccagctcaatcccaaactgaactcccctgcttcctgaattccctaccagggctttacactgagctgcct

SEQ ID NO: 597349 - DNA, 463 bp, Homo sapiens
ggcaagtcaatcttcctagttcacagctcctattacatgtactctgctgctcaacaatatttgatgactcttcattaatgaataatatctatactcagtgtcctgtaacaaggcccttacattctagccttattctgccattgtcctaggaaaatacagaaattattagctatcatcaaaccagattaccagtattccctaacataccatacaacttctatctccatactcatgtctcttccacaggaatctattcctaacccacagctttcagcagtgmagaatatgaatggaaactggttagaaaactttggccttaatagacaggagtttcaagtcttcctgtagctacttagcagtgctaagccagccacagaaaacacccattccctgtgttcgtgcattcattcacttgcttgctaacttgcttagtacttattgtgtgccagataatgtgctaggt

SEQ ID NO: 597350 - DNA, 562 bp, Homo sapiens
gacaaagattaaatgcaaaatgtacaaataaactgtaaaacattatccaaatgagaagtatttatagcaaaataataactgaatattttatgtggcaggcctaattgcagcctattttacatgccaygttgaatagctgaaattttgtcttttaggtagcaggggattaacattgtttttaaccaggggtgtcacaatgagatctgtgtttcaatactgttttcaggtacaataatacaagattatctcagggtgacaaaattggaactttatctagttcttgatccttaacaagttttatgagctctccagtaaaagccttggtctgattgtcccagaaggcaatgaggcctcagtctggggtgagcagggcggcctaggagctgtagtgcccttaactcacagactctgcaggaaagcagggtcctcatcccctaacacgtgtgcaaaagggtcttgaaccttgtcaagaggaaagcagaaacctcagaacacatgaaaaggtggtggtgttctgaaggcagttggaggtgactctcctcactcctcccacactgggtag

SEQ ID NO: 597351 - DNA, 566 bp, Homo sapiens
cacatgaaaaggtggtggtgttctgaaggcagttggaggtgactctcctcactcctcccacactgggtagtcataaggagggttattattatcaacaggtccaagaggccttaaattttcccattaaatccaaggcaattatgcaactaattcctctaaaccaggactggcacagctccaggttcctatcccagtgaacctggctgaacaatgaaagacaagaggcccaaacaacctaaggcatcatccagacctasggtggtcttgctccagagcagaatcagaggcttggcccttgaatcacccctccccatctttcagctctgaaatattctaggcaggaaaaggggaccagcacaccctctccatatcccagtctgcaaatggattctcccatgttttcaagtcgttttgcacttctgttgtccaccactctgctcacctctgtcagcccaggagagaaagtgagggacttaacatacccctcacaacaattctgggaagttgttacatctccattttataagggagtgaactgaagttcagagtagttaaataatgtgccc

SEQ ID NO: 597352 - DNA, 586 bp, Homo sapiens
gggacttaacatacccctcacaacaattctgggaagttgttacatctccattttataagggagtgaactgaagttcagagtagttaaataatgtgcccagattcacccatctaataagttcttgagctgggattgaaacccaggtctgttagctccaggaccttcccatcaactgcccacccagccctcccaatcawttaggaaaattggctaagatggacgatgaaatctacctgtgcaaaatccatttgtaatgccttgtcacatggctctatctagtccacactccacaggcatgaaggtcacttaggagccagaagggcatggaccctcctgctctgccccttcccacacacaggcacactcttctataaaaggatctagaaagccatggtcctggaaaggggtcaatcaagcccttttagaacaccagcactgggctggcacctggaggcctgaattcctgagcctgccagctatggtgccaaccacatcccccagaaaaaggacagagagtaattagaaagcaatgcctcacagaccaaacatgagtcacatttctaaaagagtctcaaaatgaaagatc

SEQ ID NO: 597353 - DNA, 571 bp, Homo sapiens
aatcactgagtagaggagatttatgagagttgagtagagagttgaataaagtaccttatggcccacaaagcctaaaatatttgttatctggctattatgacctgtttttaactcccagaacacttctgacacccagctatgtggagtttttttcctcataccaactgaatctctctctagacaccagctgcgtcttacaatccaattcaatgctaacactatcaaccttgagttagatctaaccttagtgttagatcctacagcttaagggctcagtccccaagactgcccccatttcagatcacaagtcctgggcccctcttatttctgaccaaccgacgataagttagggattcccatgacccccttcttgggtttgataatttgttagactggtttacagaacttgagagccctctttccttatatttgccagtttattttacaggatacaatctaggaacagccaaatggaagagatacataggacaaggtatgtgaaaaggagcagggaacttccatgccctctccaggcattgccrgcaccttgccagcatctcagtgtgcttag

SEQ ID NO: 597354 - DNA, 505 bp, Homo sapiens
aagaaagcactggagaaaatcttaatgactccacattaggttagtatttcttagatataacagcaaaagcataacacatctttaaaaattgataaattgaatttcatcacaattaaagacttctgtcatgcagtaacaggcattgttaaagagaatgagaagacaagctacaggcagcragaaaatatttgccaaacacgtacccaataaaagattaatgtccagaatatataaagagctctcaaatctaaatcataaggaaacaaacaatccaataaaacttgggcaaaagacttaaacagatacttcaccaaagacaatatatgtttggcaaataagtacaaagatgttcaacatcagtagtcactaaggaaattcaaattaaaaacacaatatgataaaactatacctattagaatgtctaaaatttttaaaatctgacaataccaagtactgacaaagatgtggaaaatataaccctcatatattactaccaggaatgcaa

SEQ ID NO: 597355 - DNA, 642 bp, Homo sapiens
acacttctcccagagacttgcattgttgattcctgattctttgaagtgtgggcggggttccccaaatggtcctcctaagcccaccatctggaaataatttattgataagtgcattttgacaaaaagtattccattcaggtggagaagaacacagcctctcttggaagggggatgcagctccagggcaggctctcaaaggctgtggggtgggcgggtcattgcatatactctggtctttgcacttggggagaggagggatggtaaaaaccaacggcctgaggtctggcatcatgcccactgcccaggtgtttccctacacccacccagctccctgaatcacaacagctaattttactccctctagactctagtagagctgggtcttctccttctggctacgaaatagaaagtgccccgcaccccaacacacacaccccaatctaaaaaaaaaatatatccttgaaaccatttccccatcagcccatcttcacatctgcaatgccactcctagaaattcagtcctttgggtcttgaagggttttagttccrtaagttccagggaggggtctacctcaaccattgacaactcacatctcctgagaagtttatccaaaactttccaactgcaatcatcggcgaaca

SEQ ID NO: 597356 - DNA, 584 bp, Homo sapiens
tttttttttctttaagacaatgttctttgataatttggcttcggtcttcctacaagggctgcatacacaatgaccagacagcttgcgtatcttatagcatgacgtaacygaaaaaagggatgtcaggtttcctgagagatatccccccatctccctaaaaacaatccacgtagagcttgcaatggctttccagataaatataatcaacggatcctctgtcaaccctctggatcattgtgtatgactgaagaaggcaccagaggaggacctgttgagttggaccatcttagaggtaggttgctgaaatatgagtcatatttagtgactttggtcaactgttcatcacgaaacttagatatattaatcaatcattgccttaacgcagatattcatacttttggacatttttagtgccccagggaagacctactggtttagggtatgactaattaagaaaagcctagaatgacaaaatagtcactgttagcctaaggtcttaaactgaaggacctcatcagcattcgtgttgctatctacttatagcaaccctccttaccgggtattaaaaactaaccacctgtgag

SEQ ID NO: 597357 - DNA, 584 bp, Homo sapiens
tttttttttctttaagacaatgttctttgataatttggcttcggtcttcctacaagggctgcatacacaatgaccagacagcttgcgtatcttatagcatgacgtaactgaaaaaagggatgtcaggtttcctgagagatatccccccatctccctaaaaacaatccacgtagagcttgcaatggctttccagataaatataatcaacggatcctctgtcaacccwctggatcattgtgtatgactgaagaaggcaccagaggaggacctgttgagttggaccatcttagaggtaggttgctgaaatatgagtcatatttagtgactttggtcaactgttcatcacgaaacttagatatattaatcaatcattgccttaacgcagatattcatacttttggacatttttagtgccccagggaagacctactggtttagggtatgactaattaagaaaagcctagaatgacaaaatagtcactgttagcctaaggtcttaaactgaaggacctcatcagcattcgtgttgctatctacttatagcaaccctccttaccgggtattaaaaactaaccacctgtgag

SEQ ID NO: 597358 - DNA, 603 bp, Homo sapiens
atacacattgggcttttgtttccttgtctcaattgcatctccttgccttccagaaattgtggcttttatgacttcctgatgatcagtaccaaatcaacaaggcacaaatttgtgaatctatgtctgaaagagaggttcagcaacagctgtcttatgggctcaaactaaccaagggaaggtaaataagaatgcttcattttattatctcccacctacacacatgcttcatgaatactgtaaacatattcttattgcatcagtcttcatcaggttaccagatatttcaaaccaaaagcccagtaggcaaactgatcattactaacttggggtcacagccatgccatagttatccttttgtctatgaagttgaagatgataaaaggaaaagaagatcattcttgattctactgggatctatttgagcataggaaatggattttgttgatcaacttgttaccaatggcccctagcacactgatggggacacagaggaggtcytaaaagaatattcatgttgaatccattaatcagctatcaaatcaatgagtgctatgtagtcttgtgagagaatcacactgaaaccccactaggaatttaggtccc

SEQ ID NO: 597359 - DNA, 595 bp, Homo sapiens
gctaaagaatatgagttctaggatgtaataaattatttacgtaatttactacatgcagatattcttctaagaacatacatgtataagcatatttaatcctcacaagacagatcttactattagcctattttacagataggcaatgtaaaggagtaatctatatagcatctcatggataattaaaatgtaaagctggacagttaacacaggcattctggctttagaaaggtatcattacattctctattcccccttcgagaaataacacatagcttgccttaaataaaggaatgattgccacctctaattgagatggaagaaactgagaaaaataagagaaaggaaggagtaaatgagtaattattgaatttctagtgacatttcaatgtaaacttttaaaaattaytcactcacataaacagactaaagaagataaataggatcttattaattgatggagaaaaaaaatcatttgacaacatccgatatccatttatgaccaaaaagtctcaggacattgggagtataggagaaattcctcaacttgacatagaacacctacaaaaaacctaaacctgatgtgtaatggtacgaa

SEQ ID NO: 597360 - DNA, 646 bp, Homo sapiens
atatgttttgcattgatgggagaggagactcaatactgtctagatgttagctcctcccaacttgatgtatacattcaaaacattccaaattaaaatcctggmaggttatttatttttttttgagatattggcaaactcactctgaagtttatgtggagagacaaatgatctggaatatccaacacaatactgaaaaagaaaaaaattggaggattcattctacctggtttcaagacatactgtaaagggcagtaatcaagacatttggtattgacaaaagaatatacttatagatcaatgaaacagaatggaaggttcagatatatatacagacccatacaaataccgtcaactgatcttgggcaaagaagaaaaagcaattcaatggagaaataatagacttttttttcaaacaaatggtgctgaaacaatcgagtgtccatatgcaaaaaaaaaaaaaaaactgaacctagacatacaccttacatctttcacaaaaattaacttaaaatggatcatagaactcaatgtaaaaattttaaaaatataaagaatgtctggaagaaaatatgggaaaaatctggaccactgagtttgataataaatttttagataaaatgtataatctcagaaataaaataattgg

SEQ ID NO: 597361 - DNA, 544 bp, Homo sapiens
tgtatagccggaaacggtaaactacaagttttctaatttagatctcttcaagggggatttacttaggaattataacatgacaaaacagcagccctgctttagaggaagccaacaacwtcattgctggctccaaatgaatggctgccatggacaagcactccttgtcatttccttttctcgtggcgcttttctttgcctccccagagtcaaaacaatggtaactgagaagctggcatcaatgtgattgacagtaagtattccaagacagctggttgattgattgatggacgatgatgaatgttgcctaaaagatcagaaagctggtccgggggggaaaccattgaaatgtgggcaacgtagaccaagaatcatacatttataaatttaatgagcataacattttcaaataagcactacaatgatcaaaatcaccacccaccaggaatcacatacattgataagtgtcaagatatttcaaacatcagaaagctgctttttcacctgcccagattccacaagtcccagttgatgaaatgacatacag

SEQ ID NO: 597362 - DNA, 547 bp, Homo sapiens
gtgacttaatgttatctcatttgcacagctagcgagtggcctcaaattcaagcagactgatttcaggttcaggattctttgcactctacctcaaacctcctcacttatacatattcatagcttcaagaagtatgatttcacttgtctgaactcaatctctgatgtagtcagctgtcatacataggcaactctctgtacacttatagtctttcacatgattctgtcagggaacttgggagtttgagctagtgctttgtagcttggaggcaccatttagaaatataacagagagcattttggttgtcacaatgacggggtcatgctgtagaayttagtagttggaggcagggattctaaacatttaagtatcggtcaatattgtacaatgaaaaattgtcttgcccaagtatataccaaaatccctctcatggagaaacacttcaatttagattgttcctctaacagttagccaggacactgtctaaagaagtccttattatactttagtatatagaatgttctcctgaagcatgtatagaaaatgcag

SEQ ID NO: 597363 - DNA, 577 bp, Homo sapiens
atacaccattaaaatattcttctcttcatgttttccttatctttaataactgtaccattatttacctactattcaagccagaaaccagaaatcctaagactgatctttctctccacattcagttagttacttgggatagagatagggtacctcaggcaaggattatattctaaactctgaaatcatctacagtcaaaatgtatcctttaaagatgagctttctgtctctcagtagattcaatgcattcaatttttcatccagggcttgaatagattgctgtttcatcaattgaatagcagatgaagtaattaatttgcatttagcactaaatatctacaaactttaaaatatgagcttcatatacagcccaatgagatgatcatggaaccaagggaattcaggagctgaggctgacyaaagaatggcagggatgcagtattcccactgcatgttcattaaatgaactctcttactctctctgtgtatcttctcaaattaaatgagtctattatgggactctactgcatctcctacctatctcaacctctccatccctatattagttaattttattca

SEQ ID NO: 597364 - DNA, 366 bp, Homo sapiens
agaattcttaaaattcctctgatgtttggcttattcctctcttgtgacacacgtaaaagactggtcttagagctcgcttgctacataagagagaaagacaggtgaatttgcttagtagctcatggcaaacatgataaagtctgtatcaccaaacaagaatatgtgtgtaaagtcaaagatacatgaacacgatcttgctratttccaaactggactttttgttttctcttttgagattcctttgagtcagaataattaacaagcttggagagacatctcaaacccttcaacaatgcccttgaatgtgggcctacacatgcttgatttagatcactaaaactctacatttttatttaatctcatcag

SEQ ID NO: 597365 - DNA, 651 bp, Homo sapiens
tttagtatcagtggaatgctggtctcctaaaatgagtttggtggtggtctctccttttcaattttttggaagagtctgaaaaggatgggcattaattatttaattatttaaaatagtataaaaataaaatacttaagaacatatttgaccaaggaggctgaagatccatacacttaaaactacaaaatattgatgaaagaaattgcagaagacacatataaatgaaaatatatcccatgttcatgaattggaataattaatatttaaatatccaaacacccaaaagatatctacagatttaatgcaatccctaccagaattccaatggcagttttcagtgacatagagaaaaaaaacataaaattaatttgaaaccacraaagagcccaaatagccaaagtgattttgagcaagaaaaacaaagctggagacatcacattacctggtttcaaaattaagacagtgtggtactgtcataaaaactaacatgtataccaaatggaacagaatagagagcttagaaataaatctatgcatttgtggttaattgttttttccacaaagtgccaagaacatacaatagggaacagatagcttcttcaataaatgttgaaaaaaattgaatatccacgtcaagaattaaaactggat

SEQ ID NO: 597366 - DNA, 517 bp, Homo sapiens
attaaaactggatacttattttatgccaaatataaataccaattgaatactttacataaaacctggagctgtagaactgctgaaagaaaacacaggagaaagtcttctttatattagtctgggcaatgattttttgaatgtgacaccaaaagcaaaggcaacaaaagccagagtagacatatgaagtcgtatcaaacaaaaaaacttttgtacagtaaaaaaacaatcaacagaatgaagaggtcacctacgaaatgagtgaaaatatttgcaaatcagacatctgatagagggttaatattctaaatatataaggagtttaaacaactcaattgcaagaaaacaaataatctaatttaaaaatgggcaaagaacctgaaaagacatttctcaaaaacagtcttacaaatgatgactaggtatatgaaaaaaatggyaaacattactaatcatcaaggaaatgcaaaacaaaaccattgtaagatgtcacctcacagctgatagaatagctattata

SEQ ID NO: 597367 - DNA, 622 bp, Homo sapiens
gggaatactactctgtcctatatcctgagtgacatgaatggctttcagccttgagtgggggctggagcaggaaaggattttgtagcatatccagtccacagaacaatttgttttgtcacttgagccaaataatctggtagactctatgatgtcacaggtgtcactggtaggaaaaactacagtatggagattatggaaagctccaggtagagaattatagcacaagcccatgtgatcctggagcgagactatctatgccttcagcagtagagcattatttatcttttgaaaaatagctattggcaggctagtggtccccggtagagtaagatrtttgaccatggaatatcaggtaattattagtctggagctatccatcatgaactggattctgagacaccaatcaaataataaaggcaggtatgctgagcactagttaattttaagttggaaataatatatctaggattgagcctgagaaggaccagtgggcataataaactgaaggaatatataatccaaatctctatgtcacccaccatagttgtaccagtgacctttccctggcctgcacctatgagcatacaagggaccttgaaagaggaggaaaaaactcaagctt

SEQ ID NO: 597368 - DNA, 609 bp, Homo sapiens
tgatgattggttgaggtacatttgtacttaccttgtttgaaactctttttattcattgcttatgttctttgttcccmatctcccatacatacccttatgccttctttggttttaactaagcatattatataagaccattttgcctcctctatttatgtaaaaattgcaattaaacattcttttagtgatttagagttgaaatatgcacttttaactaatctaagtctgtctccaaataacactacactatcttatgggtagtacatgttctcttataatagagaactcccaattcttctctcatcccatgtgatattgatgtaattcatttcaccctgctatacactttaatcatttaatacattgttatttactattgttttaaacagttttctttcaggccaattaaggataaaaaaagtaaatattttatgtttgtttattctcaattattatacaatcttgttgattatgttatttttctttcttactaaggcattaaacctggataaggcaagagtcaggaagaatttccttctcccaaaagcaatgagtccctgtcaatgtcttttcttatggataataggtcatttgtggggttatgaaaaa

SEQ ID NO: 597369 - DNA, 540 bp, Homo sapiens
tttagcatacattatctcatttgatcttccctcaaaccccttttaattggcatacatacccattattattttacaaatgaggaaactgaggctcaaagaaggtaagtcattttctcaggatcacacagttagcaagtggagaagttatgattcctaaccaaccccaagcatgtttcaatatgctgtcacaagcaactyagagttcctttgagatgacaaggcaaacttataatgcgatgttccaagatattgccaaggagtggaaagtggggtccaatttgggatcatatggtagttttatttttaatgtttttgaggaacctccatactgctttccatagtggctgtactaatttatattcccaccaacagtgtattccttaattaatttattttaattatttatgcttccgggtaatattttaagtttgaaaatcaatgatctaagtacatatccctgccttttgtagaagaaaagccaagcccagggaggaaaagaaattgcttaaagttacaaaactgtttagcctagagcacaaa

SEQ ID NO: 597370 - DNA, 609 bp, Homo sapiens
tgatgattggttgaggtacatttgtacttaccttgtttgaaactctttttattcattgcttatgttctttgttccccatctcccatacatacccttatgccttctttggttttaactaagcatattatataagaccattttgcctcctctatttatgtaaaaattgcaattaaacattcttttagtgatttagagttgaaatatgcacttttaactaatctaagtctgtctccaaataacactacactatcttatgggtagtacatgttctcttataatagagaactccyaattcttctctcatcccatgtgatattgatgtaattcatttcaccctgctatacactttaatcatttaatacattgttatttactattgttttaaacagttttctttcaggccaattaaggataaaaaaagtaaatattttatgtttgtttattctcaattattatacaatcttgttgattatgttatttttctttcttactaaggcattaaacctggataaggcaagagtcaggaagaatttccttctcccaaaagcaatgagtccctgtcaatgtcttttcttatggataataggtcatttgtggggttatgaaaaa

SEQ ID NO: 597371 - DNA, 615 bp, Homo sapiens
ttggtatgtttaaaccattcacatttaatgtgatgattggttgaggtacatttgtacttaccttgtttgaaactctttttattcattgcttatgttctttgttccccatctcccatacatacccttatgccttctttggttttaactaagcatattatataagaccattttgcctcctctatttatgtaaaaattgcaattaaacattcttttagtgatttagagttgaaatatgcacttttaactaatctaagtctgtctccaaataacactacactatcttatgggtagtacatgttctcttataatagagaactcccaattcttctctcatcccatgtgatattgwtgtaattcatttcaccctgctatacactttaatcatttaatacattgttatttactattgttttaaacagttttctttcaggccaattaaggataaaaaaagtaaatattttatgtttgtttattctcaattattatacaatcttgttgattatgttatttttctttcttactaaggcattaaacctggataaggcaagagtcaggaagaatttccttctcccaaaagcaatgagtccctgtcaatgtcttttcttatggataata

SEQ ID NO: 597372 - DNA, 609 bp, Homo sapiens
tgatgattggttgaggtacatttgtacttaccttgtttgaaactctttttattcattgcttatgttctttgttccccatctcccatacatacccttatgccttctttggttttaactaagcatattatataagaccattttgcctcctctatttatgtaaaaattgcaattaaacattcttttagtgatttagagttgaaatatgcacttttaactaatctaagtctgtctccaaataacactacactatcttatgggtagtacatgttctcttataatagagaactcccaattcttctctcatcccatgtgatattgatgtaattcatttcaccctgctatacactttaatcatytaatacattgttatttactattgttttaaacagttttctttcaggccaattaaggataaaaaaagtaaatattttatgtttgtttattctcaattattatacaatcttgttgattatgttatttttctttcttactaaggcattaaacctggataaggcaagagtcaggaagaatttccttctcccaaaagcaatgagtccctgtcaatgtcttttcttatggataataggtcatttgtggggttatgaaaaa

SEQ ID NO: 597373 - DNA, 609 bp, Homo sapiens
tgatgattggttgaggtacatttgtacttaccttgtttgaaactctttttattcattgcttatgttctttgttccccatctcccatacatacccttatgccttctttggttttaactaagcatattatataagaccattttgcctcctctatttatgtaaaaattgcaattaaacattcttttagtgatttagagttgaaatatgcacttttaactaatctaagtctgtctccaaataacactacactatcttatgggtagtacatgttctcttataatagagaactcccaattcttctctcatcccatgtgatattgatgtaattcatttcaccctgctatacactttaatcatttaatacattgttatttactattgttttaaacagttttctttcaggccaattaaggataaaaaaagtaaatattttatgtttgtttrttctcaattattatacaatcttgttgattatgttatttttctttcttactaaggcattaaacctggataaggcaagagtcaggaagaatttccttctcccaaaagcaatgagtccctgtcaatgtcttttcttatggataataggtcatttgtggggttatgaaaaa

SEQ ID NO: 597374 - DNA, 457 bp, Homo sapiens
ttgcatattccattaatcattttttagggtttttaaatatatttttgtaaaaagccattataacwttagcatatctgaaaaccccaggctatcccaaggtaaacattggtaatacatctctaccacaaagattccattgaaaagtacttcttaaaattaattaatgcaataataaaagtataacatcaaaaatgtgtttattttttactccttagtaaaattcctaaatagtaacatgagcttctttagttctaatatcaaagccagtaaacaaaataattagttaatctaaagccagactggttttcttgtcctatagcctgtggaagaaaatggattttttcacatacatttcagtttaataatctatatatttttttcattctgccatgagtcctgccattttgattatttgtaatgattgcaatttttcttttttttttttacaaaaggcttg

SEQ ID NO: 597375 - DNA, 457 bp, Homo sapiens
ttgcatattccattaatcattttttagggtttttaaatatatttttgtaaaaagccattataactttagcatatctgaaaaccccaggctatcccaaggtaaacattggtaatacatctctaccacamagattccattgaaaagtacttcttaaaattaattaatgcaataataaaagtataacatcaaaaatgtgtttattttttactccttagtaaaattcctaaatagtaacatgagcttctttagttctaatatcaaagccagtaaacaaaataattagttaatctaaagccagactggttttcttgtcctatagcctgtggaagaaaatggattttttcacatacatttcagtttaataatctatatatttttttcattctgccatgagtcctgccattttgattatttgtaatgattgcaatttttcttttttttttttacaaaaggcttg

SEQ ID NO: 597376 - DNA, 457 bp, Homo sapiens
ttgcatattccattaatcattttttagggtttttaaatatatttttgtaaaaagccattataactttagcatatctgaaaaccccaggctatcccaaggtaaacattggtaatacatctctaccacaaagattccattgaaaagtacttcttaaaattaattaatgcaataataaaagtataacatcaaaaatgtgtttatttttyactccttagtaaaattcctaaatagtaacatgagcttctttagttctaatatcaaagccagtaaacaaaataattagttaatctaaagccagactggttttcttgtcctatagcctgtggaagaaaatggattttttcacatacatttcagtttaataatctatatatttttttcattctgccatgagtcctgccattttgattatttgtaatgattgcaatttttcttttttttttttacaaaaggcttg

SEQ ID NO: 597377 - DNA, 543 bp, Homo sapiens
tcacagctgtaaaatctgaaagcattcatcaccagatacctaaactataagaaatgttgaaggaaaacaatgtaacacatgaaacctacatttataaaaataagtgaagcatatcagcaatagtaaccaagtaggtaaacaaaaattattatakcttattttaatatgtttaaaagataaactatttaaggcaaaattagttaaaaatgtattgtgaagctgataatatatagaagtattaataaaatgcatgaaaacattagcccagaagagggattttcacaatagcacagatagaacacttttgtgaggttttatattataagtcaagtagtataatatcacttgaaggtaaaaaaatagtaagttaaaggagccattaacagaacacagcacataattgtagctggtaagcaaaagaaaaaaaagtgagagagaaaaaatagacaatccaaaagaggagagaaaaaagaacaaagaaccgctatggaaaaataacaactagcaagtttagtagatttaagcctacccgtatcgataagt

SEQ ID NO: 597378 - DNA, 543 bp, Homo sapiens
tcacagctgtaaaatctgaaagcattcatcaccagatacctaaactataagaaatgttgaaggaaaacaatgtaacacatgaaacctacatttataaaaataagtgaagcatatcagcaatagtaaccaagtaggtaaacaaaaattattatatcttattttaatatgtttaaaagataaactatttaaggcaaaattagttaaaaatgtattgygaagctgataatatatagaagtattaataaaatgcatgaaaacattagcccagaagagggattttcacaatagcacagatagaacacttttgtgaggttttatattataagtcaagtagtataatatcacttgaaggtaaaaaaatagtaagttaaaggagccattaacagaacacagcacataattgtagctggtaagcaaaagaaaaaaaagtgagagagaaaaaatagacaatccaaaagaggagagaaaaaagaacaaagaaccgctatggaaaaataacaactagcaagtttagtagatttaagcctacccgtatcgataagt

SEQ ID NO: 597379 - DNA, 543 bp, Homo sapiens
tcacagctgtaaaatctgaaagcattcatcaccagatacctaaactataagaaatgttgaaggaaaacaatgtaacacatgaaacctacatttataaaaataagtgaagcatatcagcaatagtaaccaagtaggtaaacaaaaattattatatcttattttaatatgtttaaaagataaactatttaaggcaaaattagttaaaaatgtattgtgaagctgayaatatatagaagtattaataaaatgcatgaaaacattagcccagaagagggattttcacaatagcacagatagaacacttttgtgaggttttatattataagtcaagtagtataatatcacttgaaggtaaaaaaatagtaagttaaaggagccattaacagaacacagcacataattgtagctggtaagcaaaagaaaaaaaagtgagagagaaaaaatagacaatccaaaagaggagagaaaaaagaacaaagaaccgctatggaaaaataacaactagcaagtttagtagatttaagcctacccgtatcgataagt

SEQ ID NO: 597380 - DNA, 543 bp, Homo sapiens
tcacagctgtaaaatctgaaagcattcatcaccagatacctaaactataagaaatgttgaaggaaaacaatgtaacacatgaaacctacatttataaaaataagtgaagcatatcagcaatagtaaccaagtaggtaaacaaaaattattatatcttattttaatatgtttaaaagataaactatttaaggcaaaattagttaaaaatgtattgtgaagctgataatatatagaagtattaataaaatgcatgaaaacattagcccagaagagggattttcacaatagcacagatagaacacttttgtgaggttttatattataagtcaagtagtataatatcacttgaaggtaaaaaaatagtaagttaaaggagccattaacagaacacagcacataattgtagctggtaagcaaaagaaaaaaaagtgaragagaaaaaatagacaatccaaaagaggagagaaaaaagaacaaagaaccgctatggaaaaataacaactagcaagtttagtagatttaagcctacccgtatcgataagt

SEQ ID NO: 597381 - DNA, 520 bp, Homo sapiens
tgataacatcactacacatttggcaaatagacactaaaacgataataataaaatatacgaacaacttatgccaataaattcaactctttagaatggacaaatttcttgaaaaacataaacttctaaagctcactcaagaagaaatacataatctaaatatatatgtgaaattgaatttctagtgaaaaattgtaagcaatatttttccagtcatactcaacaccatagaaggaaaattcactgtgaccaagtgggatttacattgcagaaagaaaagttctgtttattattcacgtatcaactaacataattcaacatattaacaaactaaaagagaaaagctaaatgatcatcttaatagatgcagagaaagcaagccaacactgattactgattaaaactactcagcgttttaggaatagaagagaaaccraaaaaggacatctgtgaaaaacttgtagctaatatcacatttaataatgaagaactgagtggtttccctctaatattaagaagaagg

SEQ ID NO: 597382 - DNA, 489 bp, Homo sapiens
gtctgggcatcccagctatcagccttcaggggctgcctggcctgaaggtttggcttccttggggamctgctcccttctgcccaggagcctgtctgcttcccgcagccatccatggcagcaggcttctggcaccaaggggcacctgcaagcccgtgcccaactgccctcagccccccttcagtttctcctctggcactccttggtgcccaaagatcagaggaggccaaggcggcagagggctggcatatcagcactaccctgagcttgcatacatggtctgggttgtgacagtgctagaggcctgccccaaccccactcggagatcaaaaagggaactaggaacaaagagaggccaggcagtgggagcaggcacctctgagcctgcaaggtcaagggggccattcctaggcccccaaagagtgcagggatgcctgggtgtgcagccctggtttgggcagctgcatctgtgggggatggggggactcctac

SEQ ID NO: 597383 - DNA, 489 bp, Homo sapiens
gtctgggcatcccagctatcagccttcaggggctgcctggcctgaaggtttggcttccttggggacctgctcccttctgcccaggagcctgtctgcttccygcagccatccatggcagcaggcttctggcaccaaggggcacctgcaagcccgtgcccaactgccctcagccccccttcagtttctcctctggcactccttggtgcccaaagatcagaggaggccaaggcggcagagggctggcatatcagcactaccctgagcttgcatacatggtctgggttgtgacagtgctagaggcctgccccaaccccactcggagatcaaaaagggaactaggaacaaagagaggccaggcagtgggagcaggcacctctgagcctgcaaggtcaagggggccattcctaggcccccaaagagtgcagggatgcctgggtgtgcagccctggtttgggcagctgcatctgtgggggatggggggactcctac

SEQ ID NO: 597384 - DNA, 489 bp, Homo sapiens
gtctgggcatcccagctatcagccttcaggggctgcctggcctgaaggtttggcttccttggggacctgctcccttctgcccaggagcctgtctgcttcccgcagccatccatggcagcaggcttctggcaccaaggggcacctgcaagcccgtgcccaactgccctcagccccccttcagtttctcctctggcactccttggtgcccaaagatcagaggaggccaaggcggcagagggctggcatatcagcactaccctgagcttgcatacatggtcygggttgtgacagtgctagaggcctgccccaaccccactcggagatcaaaaagggaactaggaacaaagagaggccaggcagtgggagcaggcacctctgagcctgcaaggtcaagggggccattcctaggcccccaaagagtgcagggatgcctgggtgtgcagccctggtttgggcagctgcatctgtgggggatggggggactcctac

SEQ ID NO: 597385 - DNA, 556 bp, Homo sapiens
cctggtttgggcagctgcatctgtgggggatggggggactcctacctgcttaggatcygcagccatgactccactggctgcagccctgtacaggagggcagggctcctgcctactcccagctcccaagagcagaggggtgcccgggttgcagccgcagcttgggcagctgcagttgcacctggggcatctgaaattgcaccgggggagctcccaccttgacaacgtggaagaggcagggcttccacttttccctggtttctggtggctccatggagcatggcaccctgccatgcccccttgcagcctggggcactccaggtccttgctaggcctgggccagcatccagagcaggcctgacattctcctgagctttccctatggctcctcccctcaggggcagatcagagctccatgggactggctgggccccatcgggggagcctccagggttgcaggctgtggaagttggtggggaggttttccaccttctcccagtaccctgcttgcagctgccagcaatagggcagctgccacaccagactgcctgccactgc

SEQ ID NO: 597386 - DNA, 556 bp, Homo sapiens
cctggtttgggcagctgcatctgtgggggatggggggactcctacctgcttaggatctgcagccatgactccactggctgcagccctgtacaggagggcagggctcctgcctactcccagctcccaagagcagaggggtgcccgggttgcagccgcagcttgggcagctgcagttgcacctggggcatctgaaattgcacckggggagctcccaccttgacaacgtggaagaggcagggcttccacttttccctggtttctggtggctccatggagcatggcaccctgccatgcccccttgcagcctggggcactccaggtccttgctaggcctgggccagcatccagagcaggcctgacattctcctgagctttccctatggctcctcccctcaggggcagatcagagctccatgggactggctgggccccatcgggggagcctccagggttgcaggctgtggaagttggtggggaggttttccaccttctcccagtaccctgcttgcagctgccagcaatagggcagctgccacaccagactgcctgccactgc

SEQ ID NO: 597387 - DNA, 556 bp, Homo sapiens
cctggtttgggcagctgcatctgtgggggatggggggactcctacctgcttaggatctgcagccatgactccactggctgcagccctgtacaggagggcagggctcctgcctactcccagctcccaagagcagaggggtgcccgggttgcagccgcagcttgggcagctgcagttgcacctggggcatctgaaattgcaccgggggagctcccaccttgacaacgtggaagaggcagggcttccacttttccctggtttctggtggctccatggagcatggcaccctgccatgcccccttgcagcctggkgcactccaggtccttgctaggcctgggccagcatccagagcaggcctgacattctcctgagctttccctatggctcctcccctcaggggcagatcagagctccatgggactggctgggccccatcgggggagcctccagggttgcaggctgtggaagttggtggggaggttttccaccttctcccagtaccctgcttgcagctgccagcaatagggcagctgccacaccagactgcctgccactgc

SEQ ID NO: 597388 - DNA, 556 bp, Homo sapiens
cctggtttgggcagctgcatctgtgggggatggggggactcctacctgcttaggatctgcagccatgactccactggctgcagccctgtacaggagggcagggctcctgcctactcccagctcccaagagcagaggggtgcccgggttgcagccgcagcttgggcagctgcagttgcacctggggcatctgaaattgcaccgggggagctcccaccttgacaacgtggaagaggcagggcttccacttttccctggtttctggtggctccatggagcatggcaccctgccatgcccccttgcagcctggggcactccaggtccttgctaggcctgggccagcatccagagcaggcctgacattctcctgagctttccctatggctcctcccctcaggggcagatcagagctccatgggactggctgggccccatcgggggagcctccagggttgcaggctgtggaagttggtggggaggttttccacctyctcccagtaccctgcttgcagctgccagcaatagggcagctgccacaccagactgcctgccactgc

SEQ ID NO: 597389 - DNA, 506 bp, Homo sapiens
tgaaaagagactgcacttgttttggtacaaccagctgaaattagcagataagtctacttagtagaaatctaggaaaattacataacatagtttataattgtgacatataatggttacaacatagaaactgagaaataagattgattgtcctcatgagtgaaaaatatataaacactggatctgattgacaaagtcatcaaacagatggattaatttcaggttaaaaatagaatgaaacctatcaaatatattaacatatctaaagtacaaatgtgctagtcaggctgttgraggatgttttggtctttggtcagtgtcgagaaaccacaagagagaaagagatatcctgactctaggttctcccactctgtcctggcatatgtatgttctggaccaagaacatgagtaactatatggtccttttaataggtatatctttatggaattagctataggtagatggatgaatcatgctattaaattctccatttatttcctattttctg

SEQ ID NO: 597390 - DNA, 506 bp, Homo sapiens
tgaaaagagactgcacttgttttggtacaaccagctgaaattagcagataagtctacttagtagaaatctaggaaaattacataacatagtttataattgtgacatataatggttacaacatagaaactgagaaataagattgattgtcctcatgagtgaaaaatatataaacactggatctgattgacaaagtcatcaaacagatggattaatttcaggttaaaaatagaatgaaacctatcaaatatattaacatatctaaagtacaaatgtgctagtcaggctgttgaaggatgttttggtctttggtcagtgtcgagaaaccacaagagagaaagagatatcctgactctaggttctcccactctgtcctggcatatgtatkttctggaccaagaacatgagtaactatatggtccttttaataggtatatctttatggaattagctataggtagatggatgaatcatgctattaaattctccatttatttcctattttctg

SEQ ID NO: 597391 - DNA, 506 bp, Homo sapiens
tgaaaagagactgcacttgttttggtacaaccagctgaaattagcagataagtctacttagtagaaatctaggaaaattacataacatagtttataattgtgacatataatggttacaacatagaaactgagaaataagattgattgtcctcatgagtgaaaaatatataaacactggatctgattgacaaagtcatcaaacagatggattaatttcaggttaaaaatagaatgaaacctatcaaatatattaacatatctaaagtacaaatgtgctagtcaggctgttgaaggatgttttggtctttggtcagtgtcgagaaaccacaagagagaaagagatatcctgactctaggttctcccactctgtcctggcatatgtatgttctggaccaagaacatgagtaactrtatggtccttttaataggtatatctttatggaattagctataggtagatggatgaatcatgctattaaattctccatttatttcctattttctg

SEQ ID NO: 597392 - DNA, 532 bp, Homo sapiens
aatgtgaagtgacccttggtaggatctgtgttcagtatccccatcatttcttcagttgaatctattgacaaaggcatcattaaaagcaatcaacttacatttcattttgatgaccttgtaaacaaaaaataaaatcctaagcccccaccatctgaacaggccccctcttggccaagggattccagaaaaacctaaaaactgagtttccagccatgacccatgatgggacaggaggtcaaacatactctgttaaccccyctcctttttgcagtttagacataactgaccagcattaatgttaaaatagagaccacaagactgacagaacagactctttatgacaatagactatcaaattataaacaggacctaaggccatgccatgcaagagttaagtcacatgcctgcactaaagaataaactgtgttctaaccatgccacaaggcgttttctttagcatctaaacaagcactggggtcttgaaagaagcaatattaagaacattttcagctcaccaccatacactcactga

SEQ ID NO: 597393 - DNA, 464 bp, Homo sapiens
  misc_feature 35, 67: n = A,T,C or G
ctatataactcagttggtagagaatgagatttttnagttatttactttgataataatgtatcggtantgtgtcattaattgtgacaaacgtccattctaatatatgatgttaataatagggaactgagtcagggtaagggaaactgtcctatctttcattgttctgaaatataacgctattctaaaataaaagtttattaacttatttattcatttatttttaattatttcaacttttattttagattcatggggtacatgtgcagttgtgttgtatgaatatattgcatgatgctgaagtctggattatgattgattccatcacccagtacccaatagttcatttttcaacccttgccccatctctcattccccactctagtagtcaccagtgtctactgttgccatctttatgtccccgtatacmcaatgattagctcccacttatacatgagagcatgcag

SEQ ID NO: 597394 - DNA, 618 bp, Homo sapiens
tagatggatgaatcatgctattaaattctccatttatttcctattttctgcgatgccatacttatctggcaacattctggacctaattttctgtcctctatatctatagaaaaagaacatgctgattatattagtccattatcacactgytaataaagacatgcctgagactgaataatttataaaggaaagaggtttaattgactcagttccacatggctgggagtcctcaggaaacttacagtcatggcagtaggagaagcaaacatatctttcttcacatggtgacaggaaggagaagaatgagcgcccagcaaagtggcaaaccctttataaaaccatcagatctcatgaaaacaaactcactatcatgagaacaggatgggggaaactgctcccatgattcaattatctccacctgatccctcccatgacacgtggggattatgggaactaaaattcaagatgacatttgagtagggacacagccaaaccatatcattctgcactgtgcccctccaaaatctcatgttcttacaattcaaaacacaatcatgacttttcaacagtcctccaaagtcttaactcattctagcattaacccaaaagtccaagccc

SEQ ID NO: 597395 - DNA, 618 bp, Homo sapiens
tagatggatgaatcatgctattaaattctccatttatttcctattttctgcgatgccatacttatctggcaacattctggacctaattttctgtcctctatatctatagaaaaagaacatgctgattatattagtccattatcacactgttaataaagacatgyctgagactgaataatttataaaggaaagaggtttaattgactcagttccacatggctgggagtcctcaggaaacttacagtcatggcagtaggagaagcaaacatatctttcttcacatggtgacaggaaggagaagaatgagcgcccagcaaagtggcaaaccctttataaaaccatcagatctcatgaaaacaaactcactatcatgagaacaggatgggggaaactgctcccatgattcaattatctccacctgatccctcccatgacacgtggggattatgggaactaaaattcaagatgacatttgagtagggacacagccaaaccatatcattctgcactgtgcccctccaaaatctcatgttcttacaattcaaaacacaatcatgacttttcaacagtcctccaaagtcttaactcattctagcattaacccaaaagtccaagccc

SEQ ID NO: 597396 - DNA, 603 bp, Homo sapiens
gataatgttgaatctgtagattgatttgggcattatggctattacaacaatattgattcttccaatccatgagcatggaatgttttttttcatttgtttgtgtcatctatgaattccttcaaccgtgttttgtagttctccttgtrgagatctttcaccttcgatgttagatgtagtcctaggtatttttgtgtgtgttcctattgtaaatgggattgcattcttgatttgctctcagcttcaacattattggtgtatagaaatgctactgatagcatttctatcagtgtaactatacatttattttgtatcctgaaactttactgatgtcatttatcagttctcaaagccttttggtggagtctttcgggttttctaggtgtaaaatcatatcagcaaagagagactttgacttcttccttttctatttgggtgtctttcatttctctcttgcctgattgctcttgctgggactgccagtattaggttgaatagaagtagtgagagtaagcatccttgtcttcttctagttctccaggaaaatgtttccaatttgtgcacactcagtatgatgttggctgtaggtttgccgtagatcactct

SEQ ID NO: 597397 - DNA, 462 bp, Homo sapiens
ttttcttttttcattttgcctttgcgagcttttggtatcagggtgatgctggcttcatagaattagttagggacgagtccctcatgcttgatttttttgaaatagttttgatagaattggtaccttgccctctttgtatgtctggtagaatttggctgtgaattatgtagtcagrcttttttggttggtagaatttttaatgccaattccatttcagaactcaatattggccacttcagagtttcaatttcttcctgcttcaatcctgagaggttgtgtttctagaaatttatccatttcctctagattttccagtttgtgtgaatagatatgtttataatagtctttgagaaacttttgtatgtctctggattggttgtaatgccaccattgtatttttgattgcgcttatttggatcttctctcttttttctttgttaatctagctagagtctatcaata

SEQ ID NO: 597398 - DNA, 462 bp, Homo sapiens
ttttcttttttcattttgcctttgcgagcttttggtatcagggtgatgctggcttcatagaattagttagggacgagtccctcatgcttgatttttttgaaatagttttgatagaattggtaccttgccctctttgtatgtctggtagaatttggctgtgaattatgtagtcaggcttttttggttggtagaatttttaatgccarttccatttcagaactcaatattggccacttcagagtttcaatttcttcctgcttcaatcctgagaggttgtgtttctagaaatttatccatttcctctagattttccagtttgtgtgaatagatatgtttataatagtctttgagaaacttttgtatgtctctggattggttgtaatgccaccattgtatttttgattgcgcttatttggatcttctctcttttttctttgttaatctagctagagtctatcaata

SEQ ID NO: 597399 - DNA, 618 bp, Homo sapiens
tagatggatgaatcatgctattaaattctccatttatttcctattttctgcgatgccatacttatctggcaacattctggacctaattttctgtcctctatatctatagaaaaagaacatgctgattatattagtccattatcacactgttaataaagacatgcctgagactgaataatttataaaggaaagaggtttaattgactcagttccacatggctgggagtcctcaggaaacttacagtcatggcagtaggagaagcaaacatatctttcttcacatggtgacaggaaggagaagaatgagcgcccagcaaagtggcaaaccctttataaaaccatcagatctcatgaaaacaaactcactatcatgagaacaggatgggggaaactgctcccatgattcaattatctccacctgatccctcccatgacacgtggggattatgggaactaaaattcaagatgacatttgagtagggacacagccaaaccatatcattctscactgtgcccctccaaaatctcatgttcttacaattcaaaacacaatcatgacttttcaacagtcctccaaagtcttaactcattctagcattaacccaaaagtccaagccc

SEQ ID NO: 597400 - DNA, 481 bp, Homo sapiens
atggagtccttaccatttaagttctttttcatcaatgaaagaaattaagacccagaggaaaagatttatagaaacatcatcttaaagcatcttatagaatcatttaaagtggttatgctatcctttgctgtccacaaagatgagctgctataatttcagtacaatttcaggcaagatgaactaaaacacctaattcataatttaagtggcttatttcattcattcttttttttttttttttttttttttgagacagtgtctcactctgtcacccaggctggagttyggcagtacaatctcagctcactgcaacatccatctcctagattaaagagatcctcctgcctcagcctcctgagtaactgggattacaggcacatgccgctattttcagctaatttttgtatttttagtagagacaggatttcaccatcttggccaggctggtgttgaactcctgacctcaagtgatcctcccacc

SEQ ID NO: 597401 - DNA, 212 bp, Homo sapiens
cacttttaattgtggtgtgtattatatgcagcagaaagtaacctaactaatacaccaattacccattttatagataaaagtcagctaattcctacagccacgacatttaggaaagttcatgtaaggtcttattagcacttctattttaaaggcttgtcttttttgttttttaattttaagcataactttarttatagcttccagtatataaa

SEQ ID NO: 597402 - DNA, 604 bp, Homo sapiens
gaaagcagaaaaaacaattattcagggaataaataatataaatcatgactgacttctcatcagaaaaatggacaccaaaagataatggaatagcgtcttttaaatagcaaaggaatgtggtggcagttaggtcagttggttggtgtggtgctagtatatagcaaaagaaaaaaacaatactaacaaccaaaaaacctgtaaaacttgattctatgtctagtaaaaatagttttgaaaaacaatagcagaatgaagacatttatggtaaacaaactgaggataatttgtagttagcaggtgtgtrctacaaaaaaaaaaaagaaaaatgttaaataattttcttcaagctaaaaggaaattataccagacaaaaactcaaacctacaggaaataataggggacataagaaatgataaataattgggcaaatagaaaatgttttttgtttctcgaattttcctgaggaaacaactgtttgtatgaagtaaaaataatcacactgtaaagtgggtttataaaatctgtaagtaaaacctgtgacaatagtgaaagggaagacaaggaaaatagaactataccccataagcttattacatttctgaat

SEQ ID NO: 597403 - DNA, 604 bp, Homo sapiens
gaaagcagaaaaaacaattattcagggaataaataatataaatcatgactgacttctcatcagaaaaatggacaccaaaagataatggaatagcgtcttttaaatagcaaaggaatgtggtggcagttaggtcagttggttggtgtggtgctagtatatagcaaaagaaaaaaacaatactaacaaccaaaaaacctgtaaaacttgattctatgtctagtaaaaatagttttgaaaaacaatagcagaatgaagacatttatggtaaacaaactgaggataatttgtagttagcaggtgtgtgctacaaaaaaaaaaaagaaaaatgttaaataattttcttcaagctaaaaggaaattataccagacaaaaactcaaacctacaggaaataataggggacataagaaatgataaataattgggcaaatagaaaatgttttttgtttctcgaattttcctgaggaaacaactgtttgtatgaagtaaaaataatcacactrtaaagtgggtttataaaatctgtaagtaaaacctgtgacaatagtgaaagggaagacaaggaaaatagaactataccccataagcttattacatttctgaat

SEQ ID NO: 597404 - DNA, 593 bp, Homo sapiens
aaagggaactcttacacattcttggttggaagataaattagtacagccattatggaaaagagtatggaggtttctcaaaagattaaaaacaaaactatcatatgatctagtaattctactacagggtatttattcaaaggaaagaaaatacatatattgaagagatacctgcacctttatatttattgcagatctatttaaaatagccaaaatatggaatcaacctaaatgtccatcaatggatgaatgaataaagaacttatgatacatatacacaatggaatactattcagcaataaaaaagaatgaaatatggtcattcacagcaacatggatgagcctgggaggacattattttaagtgaaataagtcagagacagaaagacaaatactacatgttctcactcatatgtgggggctaaaaayattgagttaatagaagtagtgagtagaactgtggttatcagaggctgggaagggtagcaaggagggaaagataggaaaaagctggttaaggtatacaaagttacagctgagtaggaagaataagttctatgttctgcagcactatagggtgaatatagctaatgata

SEQ ID NO: 597405 - DNA, 646 bp, Homo sapiens
gtccatcaatggatgaatgaataaagaacttatgatacatatacacaatggaatactattcagcaataaaaaagaatgaaatatggtcattcacagcaacatggatgagcctgggaggacattattttaagtgaaataagtcagagacagaaagacaaatactacatgttctcactcatatgtgggggctaaaaatattgagttaatagaagtagtgagtagaactgtggttatcagaggctgggaagggtagcaaggagggaaagataggaaaaagctggttaaggtatacaaagttacagctgagtaggaagaataagttctatgttctgcagcactatagggtgaatatagctaatgataatgtagtgtatattttcaaaaagctagaagagaagatttttgaatgttcacaacacattttttttgataaatgtttcaagtgataaatatattagttattcttatttgatcattacacattgtagataagaatgcaaagatcaytctgtatcccataaatatgtacaattattacctgtaaactaaacataaaaggaaaaaaataggttgcagccaaagctgtgcagaggcaaatttacagctttaaatatccatattaggaaaaaaagttttaaaataaatt

SEQ ID NO: 597406 - DNA, 594 bp, Homo sapiens
gtagatacaccagtgtacataatgtcaggtctttgcagaagtggcaagtagctcaaaagtaggttaatatgagaaatttctttttcaaacaaaatgagatagcattgttccaggacttcttattgggacctrttcaatcctgaaccactccatctaagtctgcatatctccaaaaccacagtcgtcattcttgtttgggatgatgttcttaaatgtcttatttctggttccctcaaaaacagaaacccagacaggaactttggtcctggtaatttattcaggcgatgatccaggaagcaagaaaggggagcaaacaaagtaagacagggacacagaagcgtcaatatagaatgatttatcgaggttacactgtgggcaatgagggatttttttccaaaacctgagaaacatacagaaagtttcccaaaattttcccttagccagacagaaatctgcaatatttatccacaagctccatgaattgaaaattacatgaaggcattaactcccctaactctctgcctatccaggctgcgtgtgtaccaggctgagtagattcccaaagtgtcagagaaggcactgaagcagagtaca

SEQ ID NO: 597407 - DNA, 605 bp, Homo sapiens
tatatgcaatatttgaccctgttaataactcttcttcttgccattcctttggcttccttgactttgaactctactggttctcttcttcctcctcctcctttttttctactctctcgctgactgcctctaaaagtaaatattttccaaaaartagggtacaatatatggatacttcctcaggttctctcctcaggtccctcctcttacttctgactctcctcatcaagaaatgacctctatccccacaggctggaatccctcatttgttacctagggaaccaggcaatcaccttttacacactaagtgaaccaaccagaccaaaatagcaatgcaaaggctttgaaaactatattgtcagctgagcacggtggctcatgcctgtaatcttagcactttgggaggccaaggtgggaggatcacctgagaacaggagtccgagaccagcctggccaacatggtgaaacccggtctctactaaaaatacaaaaattagctaggtgtggtggtacacacctgtagtcccagctactcaagaaaatattctaatatatggcagagtgatgacattcttaatatctatattcatatatcagtgcaacacaga

SEQ ID NO: 597408 - DNA, 543 bp, Homo sapiens
ttgaaaactatattgtcagctgagcacggtggctcatgcctgtaatcttagcactttgggaggccaaggtgggaggatcacctgagaacaggagtccgagaccagcctggccaacatggtgaaacccggtctctactaaaaatacaaaaattagctaggtgtggtggtacacacctgtagtcccagctactcaagaaaatattctaatatatggcagagtgatgacattcttaatatctatattcatatatcagtgcaacacagaagacctcaaataaaaattaatgaagagcattaataatttcccaaagaaagaccacaaatgaccaatgcatatatgaaaaattctcaactttgccataaatcaaagagaggaaaattaataataaacttccattttctgttgaataaatcagcacctttttttttttttaattactacttagtgttgagaagtttctargaggggggtacctttcttacactgctaccttaaaagtgttacattatcctggaaaaaaataggacgatattttgcaaaag

SEQ ID NO: 597409 - DNA, 669 bp, Homo sapiens
aaatcttatgcttcagatgcttttattatttccattatacagatgaggaaactcaggattagcagataattagcctgtcagtttcatgcacctattaagtggcaaggttgagatataagccctggatcaccttattttgtggctcaaactcttaataattataaagacattgcctaaaggattcatcatatctaatgaatattagataactatgtgcaaggtactgtagtaagtgctttatatgtatctgttcatttaggcttcacagctctgagataaatatcattattatctccattgtacagatgagaaaatatgcacagcacaaaacatatgttgcccaaggcttatgtcagtatgtggcagagctaaaataaagccacatgcatttcactttgctgccttgtgaagctcctaccatctacataatgttttgataataatttataacatatgcttaattcattcactttcttttagaaacaaatctttctttgacaactcagttgctaaaatacaagatgctggagcagcagacacaggaaacaggaaaaatgccacttctaaaacatgaagagctatatttcttcctcaacagccastgaatcagttccatcccctatcatatttagcatattgaatgtcccactatatagttggacaattgca

SEQ ID NO: 597410 - DNA, 513 bp, Homo sapiens
ggaaatgaagctagttataattaggtaaagaagcagcagtaatgcaaattagctaggatgagaggatrtgtggatatttttgtggtttgaacagtttttttaaatgtgtttataactgattacagaatgctcttatttttgtcttgatccatgacactcatgaagagaccttgtctgatgctgatttcattaagtagttgtctcgttcagtaagaagacaccaaaatctaactgtgagttctaggccagcttcagcaacgccaggctcagctaatagtgccagatcgggtcttaacagtcaagccctgcttttctccttcccaaggccaggcttactttacagataggttaacttggtaagtggttgaaggccaaaaatgacagtggcagccttcaagaacatctgaggacagcattggaagtcaatagagaagaaatcttcctaaagtgtggagttgtgacttaggagcgtgggcatctacttcatgaggaaggagaaatggcctgaggtaa

SEQ ID NO: 597411 - DNA, 610 bp, Homo sapiens
taactgtgagttctaggccagcttcagcaacgccaggctcagctaatagtgccagatcgggtcttaacagtcaagccctgcttttctccttcccaaggccaggcttactttacagataggttaacttggtaagtggttgaaggccaaaaatgacagtggcagccttcaagaacatctgaggacagcattggaagtcaatagagaagaaatcttcctaaagtgtggagttgtgacttaggagcgtgggcatctacttcatgaggaaggagaaatggcctgaggtaacgacataaatagatgcttgagtcaagaccaatggcctggctatcttgtcaagggcctagaataaaaggaatggggagattggagacaaggaagcctggagcaaatatatggacatatgggagtggaaactgagtatgaacattttgtatcacacattaactttcattagaactcaggaaaaaagacmaaacacataaaattatgttaatgtggtatgtgccaaagcaggaaaagagaccaaacacacaaaattatgttaatgtgatgcgtgccattaaagaaacctgaaaagaagcagcaattataaataatgagagggagaggc

SEQ ID NO: 597412 - DNA, 523 bp, Homo sapiens
aagttaaaaaaaagtcaatgggtgatagtaacatacccatttcattgatagcatcatggtttgattcttatttatgcactattaattgtatcaacacattgaatattaccgtttttcaggagaaaaagggaaagcattcaatcagataaacttggctgacaatttgtctatgttacatgaaactcatccatcacccatacatggaaagatgtctaaaaggagattcaaagagataataaaaaattatactcaagtgatttcttatttatggtgtgtatttttcatcagaaacttgcccacagcggttgtgaattcagagaatataagaacacaatggtacaatcagtctggaggtatctcaattagacagcaagagaaggtcaagaaaaaaattyattgtatgaaactacagtgttttcctcctgaatcctaagattgaaactacttgtacccatgcattaaatttgtacgtggtgctccaaatcttggaaggaatactcttacatgttaccgagaggcaggg

SEQ ID NO: 597413 - DNA, 505 bp, Homo sapiens
gaaagaatgtatgtgatattcaaaaatattttgtgctcatcttaaaactatataaatacattaaagtgataaacattataatcctagaatacctatccactgttctatgttttggcatttcctcctgggtttggcttaaaagtatacatttttatatgtacgataattttaaatatatatgtaatattcataatgacatacactattattatatattctaatttttcatttaatcttataatagaaacaaatttatatactcactatagtcataattaccattttaaactgtttcatttttattgacaaaatgcttcatcttacttatccattttactctaataaaaattattttttaaaaaatttcacaacyaggaaaaattatttgtaataataaataactgcaatgaataccttctcacaaataacctttttctattaagtttttaaaaataaactttttattttgaaatgaatattgatttacagaaaagttgcaaagata

SEQ ID NO: 597414 - DNA, 492 bp, Homo sapiens
ttaatagagaaaacttttaaatcagcttagtataaatgtgtttggaaaattaaagaaaaccacttttaaataatttaaaacaagtatgaaaacaatgcctcattagacagacaatatcaaaagaaagacagaaattaaagaaccaaagagaaactatggaattaaaaagtacagtaacaaatacaaaacttaatagaaggttcaacagcaagtttaggctgaaaaacggaatcagtgaacttgaagataggtcaatagaygttatccagtctaaagaaacaaacaaaagaactttaaaaaagtaacagagtgtcagaaacaatgaaaaacaactggcatgccaacatatgcaaaatagaagttccaaaaggagagaagggagaaagaagaaaaataaactactgaagatacagtagctgaaaatgtcccaagtttgctggaaaacattaatctacacatccaaaaagtttaaagaactccaagtagcctaaa

SEQ ID NO: 597415 - DNA, 599 bp, Homo sapiens
atataaatataatttctattacaataatacaaaggaggggagagaaaatgatgctatattggaacaaagtttctatatactaaagttagtattaatcaaagctagattgtttcaaatgagcatgtatattgcaattcctagagcaaccactaagaatattactcaaaagactagtgctaaaacaccaacaaagtaaaatgrtgcaattataaaatacatatttaacacaaacggaggctgtaaagaagcaatacagcaaccaaaaacatgagacatgtagaacacagtcaaatgacagctataaatccaaccattaaatataaaccatataagtccaacattaaatataaatggagtaaaccctttaatcagaagtgaaaaattataacattggatgaaaaaacaggatccaactacatgctatctacctctcctcatcagcaaaataaggagaaaatcctaggagcaagccctaggttacctaaaaatttctttgcattctagaattccttaattctatcaaaaacagtggttttcctccaaaatagattagccaacatcacactactccaagtgtaggtctaaaaggaattgaccag

SEQ ID NO: 597416 - DNA, 599 bp, Homo sapiens
atataaatataatttctattacaataatacaaaggaggggagagaaaatgatgctatattggaacaaagtttctatatactaaagttagtattaatcaaagctagattgtttcaaatgagcatgtatattgcaattcctagagcaaccactaagaatattactcaaaagactagtgctaaaacaccaacaaagtaaaatgatgcaattataaaatacatatttaacacaaacggaggctgtaaagaagcaatacagcaaccaaaaacatgagacatgtagaacacagtcaaatgacagctataaatccaaccattaaatataaaccatataagtcyaacattaaatataaatggagtaaaccctttaatcagaagtgaaaaattataacattggatgaaaaaacaggatccaactacatgctatctacctctcctcatcagcaaaataaggagaaaatcctaggagcaagccctaggttacctaaaaatttctttgcattctagaattccttaattctatcaaaaacagtggttttcctccaaaatagattagccaacatcacactactccaagtgtaggtctaaaaggaattgaccag

SEQ ID NO: 597417 - DNA, 627 bp, Homo sapiens
agaattccttaattctatcaaaaacagtggttttcctccaaaatagattagccaacatcacactactccaagtgtaggtctaaaaggaattgaccagcctgggcaacatgaaaaaaaaaacaaaaaaaacctgtctttacaaaaaaaattcaacaattatccaggtgtggtgatgtgtacctgtagtcccagctatttgagaggttgaggtgggagggtcactcaagcctgggaggcagaggttgcagtgagccactgcactccagcctagggtggcagagcaagaccctgtctcaacagcaacaaaaaaagatatccctagaagatatcattggtttcttcgggtatgccctatataaatggagaggatgaagtaaagttacaaagtcatttatttggtgtatgcctcatggagaggttatttcctctcatagctgaagtgtgaatcggccttatgttccttgtctccagaccctattttcctgcctcaccaccacttacccaaagtcaaccaatcagtgctacagtctgtttcctgggggatctcctcagtttygtcccttcctcgttgccagaaagatgttacccagaaaggggtcccaagccagaccccaagagagggttcct

SEQ ID NO: 597418 - DNA, 579 bp, Homo sapiens
tggtgtgcggtgacgtgatcatagctcactgcagccgtgagctcctgggctcaagcaatcctcctgccttagcctcctgagtagctaggaagacaggcatgtgcaaccacacttggctaggtcttgctatgytgcccaggttggtcttgaactcctggggtcaagtgatcctgccatctcagcctcccaaagtgctgggattatacaggcgtgagccactgcatctggccttcaatctttctgaatgagaatactctatctaactctggtaggaatctgcactgggactcaaagatgtcatacttattcctctttcctggtcttgtccatttccgctgcctgtaatgccctcatatttccaaatctcatccatgctttagagatagatagaccaggtaccattggctccacaaagctttttggaatcactcttgttcacattggttgttccctactcttcccctttatagaacttactttcctgttagttgtgggccagaaaatattttaggcattatagtctctagaaactactgaactctgtggctatagtgaaagtagtcatggataatataaaca

SEQ ID NO: 597419 - DNA, 579 bp, Homo sapiens
tggtgtgcggtgacgtgatcatagctcactgcagccgtgagctcctgggctcaagcaatcctcctgccttagcctcctgagtagctaggaagacaggcatgtgcaaccacacttggctaggtcttgctatgttgcccaggttggtcttgaactcctggggtcaagtgatcctgccatctcagcctccyaaagtgctgggattatacaggcgtgagccactgcatctggccttcaatctttctgaatgagaatactctatctaactctggtaggaatctgcactgggactcaaagatgtcatacttattcctctttcctggtcttgtccatttccgctgcctgtaatgccctcatatttccaaatctcatccatgctttagagatagatagaccaggtaccattggctccacaaagctttttggaatcactcttgttcacattggttgttccctactcttcccctttatagaacttactttcctgttagttgtgggccagaaaatattttaggcattatagtctctagaaactactgaactctgtggctatagtgaaagtagtcatggataatataaaca

SEQ ID NO: 597420 - DNA, 605 bp, Homo sapiens
tacgctatttaaaacagactcattttaagtataagacagaggttaaaaagtaaaggttgagaaatgatgtacaatagtctcccccttatccatggaagacatattccaagacccccagtggatgcctgaaggtgtggatagtactgaaccctatatatacttttttttttaatctgaaaactgagaccagctactaagtgaccaactggcaggcagcctgtacagtgctgatatgctggtcaaggggtgcttcacatcctgggaaggacactatgagacttcatcatgctatgagaacagcatgccrtttaaaatttaattgtttatttctggaattctccatttaatatttttgaaccactattggccatgggtaactgaaaccatgaaaggtgaaactgcagaaagtgtatcatgtaaacactaatcataagaaaactggagtggcaatattcgtaatagtaaacaaagtagacttcaagataaggtctattatcagagataaatatcatttcatgtgacctgagtccatgagtaaggttgaaaaaaaaaaaaaagaccagttcataatgataatagctttcattcatccagaagatataata

SEQ ID NO: 597421 - DNA, 530 bp, Homo sapiens
gacctgagtccatgagtaaggttgaaaaaaaaaaaaaagaccagttcataatgataatagctttcattcatccagaagatataatattcctaaatgtgtatgtatctaatcacagagctttgtaatacatgaagcaaaamcatatagaactaaagacagaattagacaaatccgcaaccatagttggaaattttaatacccttgctcactaaaaagtagaactgtagacaagaaaaaaaaaagagaatttagaagacttcaacaactctactaaccaaattgacctaattaacacttatagaacattacatacaactgcagagttcacatttgggtatacaagtagtcctagcttttgcatggcaccatattaaataaaacctgtgcatatcaaaacctttgcatggttctgacatgcacgagtttcagttaagatggaactgtgcaaaacaaaggtttctttttcttttcttttttttttttttttcagatggagttttgctcttgttgcccaggctggagagcaatgg

SEQ ID NO: 597422 - DNA, 447 bp, Homo sapiens
tcaaactaaaaagcttctgcacaacaaaagaaacaatcaatggagtaaagagacaatctacagaaggggaaaaaatatttgcaaattatccatccaacaagggattaaaaaccagaatatatagaaattcaaacaactcaatggccaaagaacccccatataataccaattaaaaatgcgcaaataaactgaatagatttttctcaaaagaaaacatttaaaatcaataattttaaraaatgcccacaggcatatgaaaaaatactcatcatcactattagggaaatgcatatcaaaagcataatgagacatcatctcaccccagttaaaatggctattattgaaaaggcaaaaataacatgctgacaaggacacaaagggaatgcttgtgggaatgtaaattagtacaggcactatggagaacagtatggagggtcctcaaaaaac

SEQ ID NO: 597423 - DNA, 632 bp, Homo sapiens
agacaatctacagaaggggaaaaaatatttgcaaattatccatccaacaagggattaaaaaccagaatatatagaaattcaaacaactcaatggccaaagaacccccatataataccaattaaaaatgcgcaaataaactgaatagatttttctcaaaagaaaacatttaaaatcaataattttaagaaatgcccacaggcatatgaaaaaatactcatcatcactattagggaaatgcatatcaaaagcataatgagacatcatctcaccccagttaaaatggctattattgaaaagrcaaaaataacatgctgacaaggacacaaagggaatgcttgtgggaatgtaaattagtacaggcactatggagaacagtatggagggtcctcaaaaaactatatagatctactgtatgctccagcaatctcactgctaggtatatatccaaaagaaaggaactcagtatatcaaagtgatatctgcaagcctatgtttattacagcattattcacaagagccaaaatatggaatcaacctaagtgtccattaatggattaataaataattaatatacatagaatgttattcagacataaaaaggaatggaatcttgtcattggcagcagtatga

SEQ ID NO: 597424 - DNA, 351 bp, Homo sapiens
cctttccccactacccctcaacaacatgcattctctagcttcaaatagaaaatatgactcaggttcactgaatcagaacatttaaactattaaaactattaaaagttctgattatattattataactttccctgaaagttatgattatttccctaaaagtttccctaaaagttctcattatattattatacctttccctgaaagttctgattatttccctaaaagtttccctaaaagttctcattatattattatacctttccctgaaagtaccaagatycttaccaatatcaccttcttttgaactcagatccaatggcttcagctccactaagcccactgttttgtgtt

SEQ ID NO: 597425 - DNA, 528 bp, Homo sapiens
tgcctgtctacatctatctgcagtcatgtggctacatttgagggtctgagggtgaataaatttatgaattcgaagatttactgtgggcctgtctgctaggcactattctacgtgctcttggataaaaatataaatcacagccgggcacagtggctcacacttgtaatcccagcagtttgggagacagaggtgggtggaccacttgaggtcgagttcgagaccagcctggccaacatggtgaaatctcatctctactaaaaatacaaaaattagccgggcatggtggtacatgcatataatcccagctactcaggaggctgaggcaggagaatcgcttggacctgggaggcagaggttgcagtgagccgagattgcatcactgcaytccagcctgggtgacagagcgagactttgcctcatcgacaaaaaatatgtatattatatatatacttatatattatacatattatatacattcatataatatataaatgactggggtgggtggggaaaaatatatataaatga

SEQ ID NO: 597426 - DNA, 609 bp, Homo sapiens
agtggcatgatcttggctcactgcaacctctgcctcccatattcaagcaactctcctgcctcagcctcccaagtagctgggattacaggtgcccgccaccatgcctggccaatttttgtatttttagtagagacagggtttcaccatgttagccaggctagtctcaaactcctcacctcaggcaatctgcccgcctcggcctcccaaagtgctgggattacaggcgtgagccaccgcacctggctaaaattagaaatttgctggtggatagtgctgtctatctccaacaagatcagagcaagatttaatattaaactatggaatggaaggktaaaattagttttaaggaacaaaagataccacaactgaagaggatgtaaacacattggaaaaattgataatgaaaagaatagcctttccttgttaccacagagattctttttctttaaatttcccacactacacagatgtacagagattcttatttttcacgcatgacataggtatgttcttactcagaagcaagaggctagaagtgatagccttctgcacaacctgtgaaacttgtagggatgtgacctcccatcttccttacttgaattttcccaa

SEQ ID NO: 597427 - DNA, 609 bp, Homo sapiens
agtggcatgatcttggctcactgcaacctctgcctcccatattcaagcaactctcctgcctcagcctcccaagtagctgggattacaggtgcccgccaccatgcctggccaatttttgtatttttagtagagacagggtttcaccatgttagccaggctagtctcaaactcctcacctcaggcaatctgcccgcctcggcctcccaaagtgctgggattacaggcgtgagccaccgcacctggctaaaattagaaatttgctggtggatagtgctgtctatctccaacaagatcagagcaagatttaatattaaactatggaatggaaggttaaaattagttttaaggaacaaaagataccrcaactgaagaggatgtaaacacattggaaaaattgataatgaaaagaatagcctttccttgttaccacagagattctttttctttaaatttcccacactacacagatgtacagagattcttatttttcacgcatgacataggtatgttcttactcagaagcaagaggctagaagtgatagccttctgcacaacctgtgaaacttgtagggatgtgacctcccatcttccttacttgaattttcccaa

SEQ ID NO: 597428 - DNA, 609 bp, Homo sapiens
agtggcatgatcttggctcactgcaacctctgcctcccatattcaagcaactctcctgcctcagcctcccaagtagctgggattacaggtgcccgccaccatgcctggccaatttttgtatttttagtagagacagggtttcaccatgttagccaggctagtctcaaactcctcacctcaggcaatctgcccgcctcggcctcccaaagtgctgggattacaggcgtgagccaccgcacctggctaaaattagaaatttgctggtggatagtgctgtctatctccaacaagatcagagcaagatttaatattaaactatggaatggaaggttaaaattagttttaaggaacaaaagataccacaactgaagaggatgtaaacacattggaaaaattgataatgaaaagaatagcctttccttgttaccacagagattctttttytttaaatttcccacactacacagatgtacagagattcttatttttcacgcatgacataggtatgttcttactcagaagcaagaggctagaagtgatagccttctgcacaacctgtgaaacttgtagggatgtgacctcccatcttccttacttgaattttcccaa

SEQ ID NO: 597429 - DNA, 249 bp, Homo sapiens
tatttatttattattttattcatttatttatttttgagacaggggcttgctctgttgcccaggctgaagtgcagtggctcaatcatggctcatcgcagccttgaccttctgggctcaagygatcctcccatctcagcctcccaaatagttgggatcataggtgtgcgccatcatactcggctaatttttaaatgtttgtatagatggagtcatgctgtgttgtccaggatggtctcaaactcctgagct

SEQ ID NO: 597430 - DNA, 590 bp, Homo sapiens
ccacttacccattctcaaagtctatgttctggtttgtctcaggcctttctgatcttggcctacatattargtgaaatcctatgagagatttattggaagtcttggccaaagtaaaggaccaatttggaccaaggcagaaagagtggactcgggaaataagtgcatataaagagaccaggctgtcacaaacatggggtgagggtgggtggaggagagtaggtaggactcttggacacaaaattacctttcattccataataggaaaagcgctcgcagaattcattcaccacaatgaaggcaatgctcagtggatagttggagccacagattgtctattcaacaagaaggcaatgattcaagcatgagctgtttttccctgtttcaacaattagatttcttcaaaactgaaaaattcatttatttcaaatcatcttggtaggtaatggagcaatggtctctactcttcatgacacacctattaggtaacactaaaagtgcttatattactgatttagaaataatagaagctactctgaatattattttgtttcttatttattttacatggacttgctcaaatattccttgga

SEQ ID NO: 597431 - DNA, 590 bp, Homo sapiens
ccacttacccattctcaaagtctatgttctggtttgtctcaggcctttctgatcttggcctacatattaggtgaaatcctatgagagatttattggaagtcttggccaaagtaaaggaccaatttggaccaaggcagaaagagtggactcgggaaataagtgcatataaagagaccaggctgtcacaaacatggggtgagggtgggtggaggagagtaggtaggactcttggacacaaaattacctttcattccataataggaaaagygctcgcagaattcattcaccacaatgaaggcaatgctcagtggatagttggagccacagattgtctattcaacaagaaggcaatgattcaagcatgagctgtttttccctgtttcaacaattagatttcttcaaaactgaaaaattcatttatttcaaatcatcttggtaggtaatggagcaatggtctctactcttcatgacacacctattaggtaacactaaaagtgcttatattactgatttagaaataatagaagctactctgaatattattttgtttcttatttattttacatggacttgctcaaatattccttgga

SEQ ID NO: 597432 - DNA, 590 bp, Homo sapiens
ccacttacccattctcaaagtctatgttctggtttgtctcaggcctttctgatcttggcctacatattaggtgaaatcctatgagagatttattggaagtcttggccaaagtaaaggaccaatttggaccaaggcagaaagagtggactcgggaaataagtgcatataaagagaccaggctgtcacaaacatggggtgagggtgggtggaggagagtaggtaggactcttggacacaaaattacctttcattccataataggaaaagcgctcgcagaattcattcaccacaatgaargcaatgctcagtggatagttggagccacagattgtctattcaacaagaaggcaatgattcaagcatgagctgtttttccctgtttcaacaattagatttcttcaaaactgaaaaattcatttatttcaaatcatcttggtaggtaatggagcaatggtctctactcttcatgacacacctattaggtaacactaaaagtgcttatattactgatttagaaataatagaagctactctgaatattattttgtttcttatttattttacatggacttgctcaaatattccttgga

SEQ ID NO: 597433 - DNA, 611 bp, Homo sapiens
gttttcaacgagcacctctagcaattcttacgctaggaatttgggaaacactggtcataaattctctcctattctatttcagaggaactcagaagggacaaagcaaggactggaaccctaggctcccaaggcatagtcttgagccatttatataatattaagatggctcttaaatcctattattttgctaacatcagatagaaggagaaagagaagagataaaaagaaagcacctcccagacagaaatgagcaccaactattctgagacaaacaataaaagtgaaagaatctaagtatcagtgatgagtaaagaatatttgtgtccttagtgattacaacaycagaaaacatttattatgacatatgataaagttttagttatatatacacaaaagtagactgctgctctaagttaatagaatctaatatagtcagagagaagaggaaaatatgaaattaaaagggaacatatatttaacaagttctctaaattaaaatacacaaaaataaattgtatcaaacatcagtcacaaagaaatagaaaagggaaatctaaggaatacatttatatatttatttatataaatagatttaggaataaatctaacaa

SEQ ID NO: 597434 - DNA, 461 bp, Homo sapiens
caaagataaggctagataggtaggtaggggccagggcagatagggcactgttgatcttattatggagttggaagtttatccttaaagtagggagcaatgaagggttgttacgcagatgagctatatattaaaatatatcasattgataacagctttaagaaaaaatagattaagcataaaaggttgttgtaaaaatctagagatataatggtgattttgatagtggcaataggaaaggatagaagtggacagatttgaaacctatttagtaggtaggtttcaagacttgttactagagtcaatggataatgcctatgttcctaatttggaaaatgggtagacggtattgaattttgaaccatataatcgtactcttgtgatattctcctgcagttccaggcaccccagaaagagcaatagaaataatatagatttgtgtagtggtacagattagcagaaat

SEQ ID NO: 597435 - DNA, 518 bp, Homo sapiens
agatcttgcaggtagcatttttcaaggcatatttaagtgtgacatatagcttagtctgaggaygattgagttatcttaggtaaaatggaggtcatggaatttcaaaagaggtcaaagaattgtgagtcctggatgttaatggtttctgttaatggatgtgggaaacaccaaaagtgattgtagaagacagaaaaagattgagagtcagatactacaattagaaaaacacaaagcttttgatagaaaatttctgaaaattgaaaaacttttgagctcattgatggcaagaattgtgtttcattcatccttgtcttttttgaatatagcacatctagaacatagcaagtgctcaacaaatatttgctggttgaactgactccattgccttttattcctcagaaatgtgtatttgcccatgatatgctagatagctatttcaaatggagagatcaggtgatgaagaggtgatctaagaactgagtgacaataagagtcaacccaagatcagggtaaagaat

SEQ ID NO: 597436 - DNA, 586 bp, Homo sapiens
atgtttgcataatgacaaaattgcctaacaatgcattcctcaaatgtatccctgtcattaagtgataagtgctagaatgtaagcccacattatgatgtagtttccaaaaacaactcatgttaccttacactgcattaacagaagtgcattgtttgaagaaaggcaggtgmtagttcttccagtcagactactttggaatgttatatttgactccaggcatttcatattaagatatcttaatattaattgctgtatttcagataaagaatgtttttcagaagacagaaagtaggatggtaaaaggacaaattatgcctggtgaggaaccattacaggaaccgagaatctttaccttgaatacttgatgattagggaagagccatgaaagttctccccaaatagctaaacatctgccacatgaaaaagggggtatacatattcttttctttttttttttagatgaagtctcactcttgtcccccaggctagagtgtgatggcgtgatctcggctcattgcaacctctgcctcccgggttcaagcaattcttctgcttcagcctcccgagtagctgggattacaggcac

SEQ ID NO: 597437 - DNA, 586 bp, Homo sapiens
atgtttgcataatgacaaaattgcctaacaatgcattcctcaaatgtatccctgtcattaagtgataagtgctagaatgtaagcccacattatgatgtagtttccaaaaacaactcatgttaccttacactgcattaacagaagtgcattgtttgaagaaaggcaggtgctagttcttccagtcagactactttggaatgttatatttgactccaggcayttcatattaagatatcttaatattaattgctgtatttcagataaagaatgtttttcagaagacagaaagtaggatggtaaaaggacaaattatgcctggtgaggaaccattacaggaaccgagaatctttaccttgaatacttgatgattagggaagagccatgaaagttctccccaaatagctaaacatctgccacatgaaaaagggggtatacatattcttttctttttttttttagatgaagtctcactcttgtcccccaggctagagtgtgatggcgtgatctcggctcattgcaacctctgcctcccgggttcaagcaattcttctgcttcagcctcccgagtagctgggattacaggcac

SEQ ID NO: 597438 - DNA, 614 bp, Homo sapiens
tcaccatgttggccaggctggtctcgaactcctgacctcaggtgatccacctgtctcagcctcccaaagtgctgggattacaggcatgagccactgtgcctggccggctgttatacttattcttgttagctacaggggaaaaaaaacaatggtaggaggtttcagagaggaagctcagcacttacaaggaagaactgctcaacagttttttccaaaccaatgttctgcagcgtacatgttaatttaaacaaggtatcttgtgtctttactgcaggatatctcagagtctttaatatgcaaatgttaagaaaaggatacagtatgccacatttcccaaacttatttgtccatagacacttctatttacagaactgtgttaatgtctcttgaaacaatggtcatagaacagtttgggttaaagctatttaaaaatgaacaggctgtcttctaaaggagtagggtcaggttcacatcaagatatctggaaaaactggttggtctggctgccgctcttatayttctgaaatgcttgtcattaaaactgaagtatataaagtttgggcacttagagcaatttctcttacctgttaacagtaacattatctgttaatatt

SEQ ID NO: 597439 - DNA, 460 bp, Homo sapiens
agaatgatctccattatacgtgtgtattttcatggtcatttggagacaccaggccagctccagcaacactgcacaagttttaatgagttcactgatggacgggcagacatagagtctctggggccttgtttaaagatgtactggaaaaccagtcctggaacttctgtcattggagaaaggtggaggagatcagctctgatatgctgctatctctcttgtctaatccagtagaagaaaaaaaatgcttcaagacagggccaggaattggggtcaggacagaatctaggragtcatcagagttttgtcttcttggtctctagtttgatcatgttcccctggatgtgaggaatgtgcttatctgctggaccccgcatatcctctgtctttacaggaacatagtagtagcccatgatggagaagatcaggcagatcaccagcaggaggcaggaaaacaaaatga

SEQ ID NO: 597440 - DNA, 432 bp, Homo sapiens
agaatgatctccattatacgtgtgtattttcatggtcatttggagacaccaggccagctccagcaacactgcacaagttttaatgagttcactgatggacgggcagacatagagtctctggggccttgtttaaagatgtactggaaaaccagtcctggaacttctgtcattggagaaaggtggaggagatcagctctgatatgctgctatctctcttgtctaatccagtagaagaaaaaaaatgcttcaagacagggccaggaattggggtcaggacagaatctaggaagtcatcagagttttgtcttcttggtctctagtttgatcatgttcccctggatgtgaggaatgtgcttatctgctggaccccgcakatcctctgtctttacaggaacatagtagtagcccatgatggagaagatcaggcagatc

SEQ ID NO: 597441 - DNA, 604 bp, Homo sapiens
tgaacacgggaagtctgactctgcagctcttcattttaatctttaatctctttcctagaaccccaaaatcatagactcccatgctgtactgtcatgacctggggagttaagatgttcaggtcatatatgttcagggtcataaataaggtacccaaggccaaaagagataacatacctatttaagtcagtgctagaattaaaattcattgtccttcaagcaatgyctcaatttctaccttctatttgcaaaaacttacctgagaataagaaaactcaagacctgtgacagagaacatgacctccccagctgtaaccagggcatattgtggtagctgccacgcaatggacattttgttggctggaatgtcttcaatcttccaggcctgaagaccctgattggtgttcttagggaaagagaaaatggaaatggacttgtcagtagtctcaagtaaatatttctaactacagcattctacgatcttatatccatcctttttgtattttcattcttcagccactttcaggaaattgagcatttctacacaattccagcttttcaaaacttcttttcgtaatattatgctcactcgcctagattcaatca

SEQ ID NO: 597442 - DNA, 604 bp, Homo sapiens
tgaacacgggaagtctgactctgcagctcttcattttaatctttaatctctttcctagaaccccaaaatcatagactcccatgctgtactgtcatgacctggggagttaagatgttcaggtcatatatgttcagggtcataaataaggtacccaaggccaaaagagataacatacctatttaagtcagtgctagaattaaaattcattgtccttcaagcaatgtctcaatttctaccttctatttgcaaaaacttacctgagaataagaaaactcaagacctgtgacagagaacatgacctccccagctgtaaccagggcatattgtggtagctgccacgcaatggacattttgttggctggaatgtcttcaatcttccaggcctgaagaccctgattggtgttcttagggaaagagaaaatggaaatggacttgtcagtagtctcaagtaaatatttctaactacagcattctacgatcttatatccatcctttttgtattttcattcttcagccaytttcaggaaattgagcatttctacacaattccagcttttcaaaacttcttttcgtaatattatgctcactcgcctagattcaatca

SEQ ID NO: 597443 - DNA, 546 bp, Homo sapiens
tggcctggaatctcattgacattcaaacctcacggttgtcatcccattggttgttytgctttctgtatcctttacctacaacagaggaaagtaaaaatcagtaacagctgatgaaataagacctatactcagaaaatttgatcatcaggcagatccttggtaagatgttgatgagacagtcatattactttgagatgacaactgaaaacacaggcaattcctcaaattaccatcatgctggagatactgttcccatcttcacgaatgacaagactgtaccagttcttctcctgcacagaatgctcagtgtagagagacaaattgtgatatttcaggtggaagtgaaaatcctggctttttgttttcaggtgcagtttggaatagtgtggtgttttctgtaaaatgaagaatataaaatgaaggtcacgtacaccttctactccatattggacatcacgatgtagcatctcagggtaggtgacctcatcagacactttcaacctagtaattcctttctttaacctagccattttatttcttggaatt

SEQ ID NO: 597444 - DNA, 546 bp, Homo sapiens
tggcctggaatctcattgacattcaaacctcacggttgtcatcccattggttgttttgctttctgtatcctttacctacaacagaggaaagtaaaaatcagtaacagctgatgaaataagacctatactcagaaaatttgatcatcaggcagatccttggtaagatgttgatgagacagtcatattactttgagatgacaactgaaaacacaggcaattcctcaaattaccatcatgctggagatactgttcccatcttcacgaatgacaagactgtaccagttcttctcctgcacagaatgctcagtgtagagagacaaattgtgatatttcaggtggaagtgaaaatcctggctttttgttttcaggtgcagtttggaatagtgtggtgttttctgtaaaatgaagaatataaaatgaaggtcacgtacaccttctactscatattggacatcacgatgtagcatctcagggtaggtgacctcatcagacactttcaacctagtaattcctttctttaacctagccattttatttcttggaatt

SEQ ID NO: 597445 - DNA, 644 bp, Homo sapiens
gatttgagtgggtacaaatattcaaactgcatcaaagacttttcctgatttgatcccaattactttccttttttaaatccatgtttccatgaccaattacttttcaagggatttcctagaactccccttcatacatgcttctttcttcttgttcttgagtcacattgaactgctcttctctgtgatacaccacatttacccacctccatctttgcttatgatggtttttctattcgctatgtcataacaccaaaaataatggcaatacaatcaggtttattgaacaaatrccatatgccaagtgctgtacatgctttacctcacattcctctgcagaaatctgttggctttggcaggggagggactttttcttttctacatctccttggcacttgatcttcccttcttaggacacttattttacctgtgtagtagttgtattatatatatatatatatatatatatatactctagcccctttactaagtaataaactgtttgagggaaatgtttttttttttttttgcttgatttatattttcatgacacttggtcctaaacttcccaacatttgctcaatgaacaaatgacaaagggccattttcatctggtaaagtggtcatcaaaatgaaattgctattaa

SEQ ID NO: 597446 - DNA, 644 bp, Homo sapiens
gatttgagtgggtacaaatattcaaactgcatcaaagacttttcctgatttgatcccaattactttccttttttaaatccatgtttccatgaccaattacttttcaagggatttcctagaactccccttcatacatgcttctttcttcttgttcttgagtcacattgaactgctcttctctgtgatacaccacatttacccacctccatctttgcttatgatggtttttctattcgctatgtcataacaccaaaaataatggcaatacaatcaggtttattgaacaaataccatatgccaagtgctgtacatgctttacctcacattcctctgcagaaatctgttggctttggcaggggagggactttttcttttctacmtctccttggcacttgatcttcccttcttaggacacttattttacctgtgtagtagttgtattatatatatatatatatatatatatatactctagcccctttactaagtaataaactgtttgagggaaatgtttttttttttttttgcttgatttatattttcatgacacttggtcctaaacttcccaacatttgctcaatgaacaaatgacaaagggccattttcatctggtaaagtggtcatcaaaatgaaattgctattaa

SEQ ID NO: 597447 - DNA, 644 bp, Homo sapiens
gatttgagtgggtacaaatattcaaactgcatcaaagacttttcctgatttgatcccaattactttccttttttaaatccatgtttccatgaccaattacttttcaagggatttcctagaactccccttcatacatgcttctttcttcttgttcttgagtcacattgaactgctcttctctgtgatacaccacatttacccacctccatctttgcttatgatggtttttctattcgctatgtcataacaccaaaaataatggcaatacaatcaggtttattgaacaaataccatatgccaagtgctgtacatgctttacctcacattcctctgcagaaatctgttggctttggcaggggagggactttttcttttctacatctccttggcacttgatcttcccttcttaggacacttattttacctgtgtagtagttgtattatatatatatatatatatatatatatactctagcccctttactaagtaataaactgtttgagggaaatgtttttttttttttttgcttgatttatattttcatgacacttggtcctaaacttcccaacatttgctcaatgaacaaatgacaaagggccattttcatctggtaaagtggtcatcamaatgaaattgctattaa

SEQ ID NO: 597448 - DNA, 310 bp, Homo sapiens
atctatggactctttgacagataaagagtataaaataacccaaatggtctgaaaggtaagaaaaacactggaagacaggacaggatagcagaggcagaaggagataataggcattatgtcagggtggaagagggaagaggaaagagagagagagagagtggcgggaggtgggggggagagagagaaagagagaaggagtgggggagaaaaagagaaactggaaaaaagataaacagttatagaagagrgaatggatacatgaagacagacaaaactgaaaactggaagcaaaactgaggaagccagaaat

SEQ ID NO: 597449 - DNA, 552 bp, Homo sapiens
tgtcactgctttctcataaatgcccatttatttttcaccactggtaatggaaagtatttaggaagagagggaatgatcagtcagggaaattcatctatagacattcattatgtttccttgcaatttgtcactttcccatttcatggaatctcaaaacaagatgctaaaatcatctctatactactcatcacctcccattgccaaagtgcttaccacatttctttctaaatacctcaagttagagtaaacttactacttccaattgtttgaagtttttccacccatcaagcaaaacactggcttcttggaggctttyactcattggtctcaggtttaatcactgacatccttccagcttctataagcagctatagtattctcctcaattcttgtccaggctaactatccctatttccttcaatctttcctcataagacataccttttagttcatctaccaccctggtctctttcctttgaaactgtttcagttttcctcactattaatggccagtatccagcattgaatacaactgctcagataagatctgac

SEQ ID NO: 597450 - DNA, 532 bp, Homo sapiens
ataaataaaaagcaaatgttgaaaatcagaatcaactactacatccctcaagaacagctgacttactgctttattttaccttaatatctgtgtaagctgggaaattgtagtccaaccaccctggattcgagaataatcttgactgaggaccaagaggcaatattgaatgagatcataacaatatatatcttgtttgattttcttcaactctgagcttcctaaaggtgtgatgtttattatttctaaggcaaaaggaaataagatatatttatttttgcttaatacatccrggagctatttgtatttttatatgttgaataatcactaaaaatatattagaaggaaaaattactgttctattatagtgttaagacctctctgaacaaatttaaaagaaatgttaaaattgtaccaacgatggaaccatttttcacttaaaatgctatctaatcacaaaaagattttcttaccttttaacttcaacagtataacagggacattctgctcagggctttttgcaacttcagcagct

SEQ ID NO: 597451 - DNA, 552 bp, Homo sapiens
tgtcactgctttctcataaatgcccatttatttttcaccactggtaatggaaagtatttaggaagagagggaatgatcagtcagggaaattcatctatagacattcattatgtttccttgcaatttgtcactttcccatttcatggaatctcaaaacaagatgctaaaatcatctctatactactcatcacctcccattgccaaagtgcttaccacatttctttctaaatacctcaagttagagtaaacttactacttccaattgtttgaagtttttccacccatcaagcaaaacactggcttcttggaggcttttactcattggtctcaggtttaatcactgacatccttccagcwtctataagcagctatagtattctcctcaattcttgtccaggctaactatccctatttccttcaatctttcctcataagacataccttttagttcatctaccaccctggtctctttcctttgaaactgtttcagttttcctcactattaatggccagtatccagcattgaatacaactgctcagataagatctgac

SEQ ID NO: 597452 - DNA, 627 bp, Homo sapiens
tagtactagttttactatttatatccagataaggcaatgaattgtgaaatcctaagtttgtaaatgacaccacttttttgtgtccttaaatgatgagctaatgagcagtgtgggttttggagttggttgaattcattcaaatcccggaaaataaactgatgataataattgtggattcttatgaaaatattggcattatgtgatgttacagttaaaataatcagaaaagcgataaacattggcagaaaaggtattaaatacaaagtagaaaatggttttctactcttcatgcaatataataagtaattccattgtaaacctgaaaaaattgcatagatgaaagaaatccagagagaataaataaatggtaaagttggtggtagggtttccaaaccaaggagaactgagaaatgaactatttagtctggaatcatagcaacttggaagagaatatgtttgacatttagaagcatacagaaagtatgaatatgagattawtcagcaaattctttaattctggaactcaaccacttgaaactcggaagttatatacttttaaaaaagtgtgtgaggacaaaagacaacactgcttgatataatgggtaataaagagtagagtttattaat

SEQ ID NO: 597453 - DNA, 607 bp, Homo sapiens
ggtaataaagagtagagtttattaatcctaacagtagaataattagaaatgtaaatagattcagaatagttttggcagatttattgattatgaattcatgtttatcattaagtaaagctaaagatattttgcatacatttgtctcttgcagataatctcatatactataggcatctatktagtcttcagggacctgtgaaccccttgggattgtacagtatttgatatgtatgttcatatatgtatttttctgtggagaggatcaatgattggtctataattttcatcaggttttcatagggatggatttatgattgtctctcatctcctaatactgctccccatacacatacatacaagttaagatctgtggatgtaagacaaacaggctatataatatgaggagataaattatgtggcttgagttcctgacttcatcatttattgacttcattactttagaggagttctccattagtaaaaggtgggcaaaatgttcaacccaaaattttttttgtgaagattaaaattgatagtatattgtaaagaaaaaaatcacttcataaacactaaaacagaggttatagattaatagcatataggctga

SEQ ID NO: 597454 - DNA, 458 bp, Homo sapiens
cactgcactccagcatgcaggacagagtgagaccctgtctcaaaaaataataataatwaataaagttgcggatcaacaaagtccactagtataggcacccacatagggcatgacgataacttatttataaatagtgaaagattttatgaggcagttacttcatttatactgtatatatccatattaaatgactttggttcttattttagattcataaatggtatttgatagcccaaactaaagtttttttctctctttgttgacattgatatatcttggccaacctttcatcttttttattctaactgggttttgcagttcgtttttctagctttagaaaacagttgcatgatcttgggcaaggaacttaatttttttccaccctcacttcccttatctgtaagatggggtattcactacttttcaggattggtgtgaagcttcaaagtaaaaatcat

SEQ ID NO: 597455 - DNA, 404 bp, Homo sapiens
cttgcctttttagttgaattaagtatttaaccattgtaaaaatttccatgtaattagatcacacacaaaaggtactatttttgtgattattatttaaagcaacgttttacttttccctcacttttatattacttttttttggcacagttaactttraagatgttatacaaaaataaaaaaaaattgtaacacatgactgggtgattatgccaaaattagaaatatttagtgtttgtttatatcttgacaatgaaaaccatatgatatataatttgttttgacattccaatctcaccaatataggagggccagagttcagtaagttattaccactacaaaccagaggaaaatatttctagtcttatttttaaattatggaaagatgttcaagcagcttcactctg

SEQ ID NO: 597456 - DNA, 612 bp, Homo sapiens
tggtgtgtccacagagagtatcataatgtctggaatgtaaaaggaggtacacagtttttctcctagtgtataacgaatgctacaaaaagaggttgaataagggaaaaattttcaggagatttttcaggaatggctgtatttaagaagtaatctttaatttgggccttatagactgtgtagtttttttaaggtattccattaaagagtcaataaggcaaaggaatatacagaaaatagcaatggtatctagtcccagtgtgagtaatctaatgtcacatcaatgctgaagawaagtaaagaaatattgttagatagaactagaaaaagtcaaagaaaatcagatttttgaagagccttactgccagacacaggtagacaatgcagaatgtagaaaataaacaataggaaataagcagataagtatagttatgaaggagtagaaaacagctagatatgttgtataagacagttacaaacttgaagagtatgagattaggcctaccagttaagaaattatagtatatttaagataagtggttataagttctgagaacctaaagcaatgcaatggcaatgaaaaggtaatcatgtgtaatgaaagttttaaactaa

SEQ ID NO: 597457 - DNA, 609 bp, Homo sapiens
cattatctgctcccataatgtcttatttcttcacaacctgctgagaaacacagcagggttgggagcagacccatggtcagaactttagtctcagttaggatctcttgataaaccaattctcaaacagagactagttacaggtatttctttatagcagtgtaagaaggaactaayacacctgagtaaaaagaaaaggcttggaagttacagattaaatagtaaaagatttatcttcaaagagtatgtgattatgttttaagttgaatgatgtgaaagacatgtcaaggattgtccacctggagatacttctcatatcttcccttggggacatttatttacactataaagtgtaaaaccccaggatttcttcttctcctcctaaggagatttgtttatattagcaaagtatggttttccactctccctctgatgggaagttttccgaataagctatcttaaggagtcatccagattcacaatgtcaagtttctgaattatagcagagaccccagaagtatttccagcaaagcatgactctcagcaaattgtcttgcaaaagggaaattgggacacaagggaattgccacaattgtttttgtatgctagtaa

SEQ ID NO: 597458 - DNA, 574 bp, Homo sapiens
cttcaatctctttgaattttctttaggaactagatactttgggaaatttcacctgtaaataatataagctaagaatatatattgcagaatcaactttagaaaaatgttgtgctcagtttttcttagataaaatttctctgcataaamtttcaaatgtaaattggtctcttacttgcttacatacccctttctatgcattaagaagaattatgcttgctgtggtaggcagtacccccccaccccatcccacaaatattttactttgcatgcctacatggtaaaagggactttgcagttgtgattaaggttaaggacctcaagatgaaggaattatcttggaatattctgctggccctaatctaatcatgtgggtccttaaaactgaagaaccagtttcagctgtggtcagagaaagagaatgaggattgaagagagtcagaaagaatgcatatgaccttcaggcattggaaaactcaagaaaatggattctccctagaacttccagaggagaatgcagccctgtcaacaccttgattttagcctagtaaacaccatttcagactgctgacaacca

SEQ ID NO: 597459 - DNA, 574 bp, Homo sapiens
cttcaatctctttgaattttctttaggaactagatactttgggaaatttcacctgtaaataatataagctaagaatatatattgcagaatcaactttagaaaaatgttgtgctcagtttttcttagataaaatttctctgcataaaatttcaaatgtaaattggtctcttacttgcttacatacccctttctatgcattaagaagaattatgcttgctgtggtaggcagtacccccccmccccatcccacaaatattttactttgcatgcctacatggtaaaagggactttgcagttgtgattaaggttaaggacctcaagatgaaggaattatcttggaatattctgctggccctaatctaatcatgtgggtccttaaaactgaagaaccagtttcagctgtggtcagagaaagagaatgaggattgaagagagtcagaaagaatgcatatgaccttcaggcattggaaaactcaagaaaatggattctccctagaacttccagaggagaatgcagccctgtcaacaccttgattttagcctagtaaacaccatttcagactgctgacaacca

SEQ ID NO: 597460 - DNA, 574 bp, Homo sapiens
cttcaatctctttgaattttctttaggaactagatactttgggaaatttcacctgtaaataatataagctaagaatatatattgcagaatcaactttagaaaaatgttgtgctcagtttttcttagataaaatttctctgcataaaatttcaaatgtaaattggtctcttacttgcttacatacccctttctatgcattaagaagaattatgcttgctgtggtaggcagtacccccccaccccatcccacaaatattttactttgcatgcctacatggtaaaagggactttgcagttgtgattaaggttaaggacctcaagatgaaggaattatcttggaatattctgctggccctaatctaatcatgtgggtccttaaaactgaagaaccagtttcagctgtggtcagagaaagagaatgaggattgaagagrgtcagaaagaatgcatatgaccttcaggcattggaaaactcaagaaaatggattctccctagaacttccagaggagaatgcagccctgtcaacaccttgattttagcctagtaaacaccatttcagactgctgacaacca

SEQ ID NO: 597461 - DNA, 455 bp, Homo sapiens
ctggtgattccttttatgtaattcatacagataagtctccaagaccgagggttgtgcaagcaaaagggagattgggtcagagggggttacatggtgtacatacagcacctaaaggaagctcagatcccctgaaactgtcacaaacctgaaaaaatactaagatgtatttgtcaactttgtaaggctttatgtttgttcytaacttttggctttgtttaatactatcatcagcagaaatataagctctgagcttgtcaagattcttttttttattttttattttatttttttattatactttaagttttagggtacatgtgcacaacgtgcagatttgttacatatgtatacatgtgccatgttggtgtgctgcacccattaactcttcatttaacattagttatatctcctaatgctatccctccccccaccccaccccacaacaggccccggtg

SEQ ID NO: 597462 - DNA, 455 bp, Homo sapiens
ctggtgattccttttatgtaattcatacagataagtctccaagaccgagggttgtgcaagcaaaagggagattgggtcagagggggttacatggtgtacatacagcacctaaaggaagctcagatcccctgaaactgtcacaaacctgaaaaaatactaagatgtatttgtcaactttgtaaggctttatgtttgttcttaacttttggctttgtttaatactatcatcagcagaaatataagctctgagcttgtcaagattcttttttttattttttattttatttttttattatactttaagttttagggtacatgtgcacaacgtgcagatttgttacatatgtatacatgtgccatgttggtgtgctgcacccattaactcttcatttaacattasttatatctcctaatgctatccctccccccaccccaccccacaacaggccccggtg

SEQ ID NO: 597463 - DNA, 591 bp, Homo sapiens
atattaatgaagtgactggtggtggacccctagagagcttcaggatatggaatggttgccagaggcaccaatcatgtgattagagggttaaaattttctccacccctttaccaggagaagagagaagctagaagctgagttaatttccaatggccgatggtttaaataattatgcctatatgatattctaatgaattaactcttggggagcttctagatagcttgaggatgggggctatttactgaaagaacaaaccacagttgaagcttggaatgtttagccyggactctcttcctccggggatggaacacctggagattaagtttgatcattcataatgcctatatgatgaagcctcgacagagatctctaaactgcagagttcacagaagtttcaggttggtgagcatagccgcatgctggaagggtggcacaccacagttccacatgacaatagctcgtgtgctcaggattcccctggacctcaccctgtgtacctccttgtttggctgttaatttatattctttacgatatcttttaaaataagtcagtaaacataagaaaagtgtttccataagttatgtgtacc

SEQ ID NO: 597464 - DNA, 574 bp, Homo sapiens
gatattctaatgaattaactcttggggagcttctagatagcttgaggatgggggctatttactgaaagaacaaaccacagttgaagcttggaatgtttagcctggactctcttcctccggggatggaacacctggagattaagtttgatcattcataatgcctatatgatgaagcctcgacagagatctctaaactgcagagttcacagaagtttcaggttggtgagcatagccgcatgctggaagggtggcacaccacagytccacatgacaatagctcgtgtgctcaggattcccctggacctcaccctgtgtacctccttgtttggctgttaatttatattctttacgatatcttttaaaataagtcagtaaacataagaaaagtgtttccataagttatgtgtaccattatagcaataattgaatgtaaagatcgggttgtgagagccccaggattgtagccaggtctgacagaagtgtctttgcccagagcaccccatagttaagactggtggctgaattgggggcagtcttgtaggactgagttcttaaccagtgagctctgaattaa

SEQ ID NO: 597465 - DNA, 670 bp, Homo sapiens
gaaaaactaaagaattctttcagatgaaaggaagctaaaaatgcatgatatcaaatgttgtgaatgatcctggattggatcctggacttcactggggtggagggaagcgtggtagaaaacagctataaattacattattgtggcagttgatgaaatttgaacatggctgtgrattaaatgataatattatatcaaggttaaattttccgattttggtagctatgttatagctctgtaacagaatactcttgttctgttaaaagaaaccatctccaaattattctcaaatgtttcagaaaaaacgtgcacacatgcatacaaatacatacatgggagagggaggaagagacagagagagacacaccccacacacacacacacacacacacaaggtgcggggggagagaatgattaaacgatgcaagatatcaataataggtggatccagataaatgataccggagtttcttgtactattcctgaaatttttaagttctcaaataaatcagcataaagggttacaaaaaatcagataaatgaaaccattgaaaatgcaaatgtgaaacaataattaaaagagaaatgagaaaagctggtatagtcatttaagtattcatgtgagagacagagctaacctaacaaggttgctgagggtgattaaggcctaacc

SEQ ID NO: 597466 - DNA, 670 bp, Homo sapiens
gaaaaactaaagaattctttcagatgaaaggaagctaaaaatgcatgatatcaaatgttgtgaatgatcctggattggatcctggacttcactggggtggagggaagcgtggtagaaaacagctataaattacattattgtggcagttgatgaaatttgaacatggctgtgaattaaatgataatattatatcaaggttaaattttccgattttggtagctatgttatagctctgtaacagaatactcttgttctgttaaaagaaaccatctccaaattattctcaaatgtttcagaaaaaaygtgcacacatgcatacaaatacatacatgggagagggaggaagagacagagagagacacaccccacacacacacacacacacacacaaggtgcggggggagagaatgattaaacgatgcaagatatcaataataggtggatccagataaatgataccggagtttcttgtactattcctgaaatttttaagttctcaaataaatcagcataaagggttacaaaaaatcagataaatgaaaccattgaaaatgcaaatgtgaaacaataattaaaagagaaatgagaaaagctggtatagtcatttaagtattcatgtgagagacagagctaacctaacaaggttgctgagggtgattaaggcctaacc

SEQ ID NO: 597467 - DNA, 494 bp, Homo sapiens
gacaaaaacaaatgagaatattcatagtccaatttcaaaactattccattgattatttgaattgaggctgttgatccattattcaaatgactgcctcaacatcattaatatatattgacatttagattaatagacagatattttgtctctaccaaatatctatatgacatataaatataaatatcctatataaatatatatgtgtatatagagagagagagtttacatacacatttcctatcttggaccaaactaatcaatgtttttgtggtatttaacttctccctcatcatcttaaaaattttgttgaaatgacctgtaattctttttgatttttcttaaaaataaaatayattttaacttttattttatattcagggaatacacgcacaggtttcttacaaggatatattgcatgatgctgaggtttggagttcaaatgatcctatcaaccaggtagtgatcatagtaccaaataggtactttttcaaccc

SEQ ID NO: 597468 - DNA, 604 bp, Homo sapiens
ctgactgttccccaggcagcttcccctgccacttcaaaggtctttggaggtcataggaactcctgcagatgggatcccagaggtctgcagtggaaatgtggtacccaggggttccttcactcaccctttctttaagtctcgtttgggtccktgggccagtcctgatgcccagtgactttaagcagccttctcagcttcctctcttttcaaccgtggtgtctgtgttgcctctgtatcaacattcagtaatttccctcaaaagatctgttcaaaccctgatagtttactcaatattttggttcctcttcattgaaaaggcatttctcagctgtctctagtcagccatcttgccaaaactcctcccagaactcttgaatagtacataagaactaattgcatatttatttgctaaataaatttaaatttaaatttatttgctaaataaatatgcaatttacagagaaacacatattttaaatgctactaaattaagtaccacaactgataaaatatgtactttgacaacaaaacttcttttcctttaatatattgacaaatattataacaaatcatgcttaaatccagtactgttcatttttaaaca

SEQ ID NO: 597469 - DNA, 604 bp, Homo sapiens
ctgactgttccccaggcagcttcccctgccacttcaaaggtctttggaggtcataggaactcctgcagatgggatcccagaggtctgcagtggaaatgtggtacccaggggttccttcactcaccctttctttaagtctcgtttgggtccttgggccagtcctgatgcccagtgactttaagcagccttctcagcttcctctcttttcaaccgtggtgtctgtgttgcctctgtatcaacattcagtaatttccctcaaaagatctgttcaaascctgatagtttactcaatattttggttcctcttcattgaaaaggcatttctcagctgtctctagtcagccatcttgccaaaactcctcccagaactcttgaatagtacataagaactaattgcatatttatttgctaaataaatttaaatttaaatttatttgctaaataaatatgcaatttacagagaaacacatattttaaatgctactaaattaagtaccacaactgataaaatatgtactttgacaacaaaacttcttttcctttaatatattgacaaatattataacaaatcatgcttaaatccagtactgttcatttttaaaca

SEQ ID NO: 597470 - DNA, 604 bp, Homo sapiens
ctgactgttccccaggcagcttcccctgccacttcaaaggtctttggaggtcataggaactcctgcagatgggatcccagaggtctgcagtggaaatgtggtacccaggggttccttcactcaccctttctttaagtctcgtttgggtccttgggccagtcctgatgcccagtgactttaagcagccttctcagcttcctctcttttcaaccgtggtgtctgtgttgcctctgtatcaacattcagtaatttccctcaaaagatctgttcaaaccctgatagtttactcaatattttggttcctcttcattgaaaaggcatttctcagctgtctctagtcagccatcttgccaaaactcctcccagaactcttgaatagtacataagaactaattgcatatttatttgctaaataaatttaaatttaaatttatttgctaaataaatatgcaatttacagagaaacacatattttaaatgctactaaattaagtaccacaactgataaaatatgtactttgacaacaaaacttcttttcctttaatatattgacaaatattataacaaatcatgcttaaawccagtactgttcatttttaaaca

SEQ ID NO: 597471 - DNA, 543 bp, Homo sapiens
atggagctgcacttggccagtggaaagaggaggaactctcaagcctgtgtctggattttcaggctcctcctcttcctctccatacacggttcctgttttcactggatgctgctgcccattcagcctacccactccaccctcaggagtagaagtcaaagttcatggcattggcccaggacctgtggccatggccacagacaattacttgggcctaggtgaatcaggtcatctttgtgtcctgtcaccatgtagtgatggtcaaagacccagcatgcatgaagcaggtctctcagaatagctctttatgaacctacacaagagtagagagttaagacccagcatctactgtggttgatactggctaagtgttggctattggctagagagcaaacttgttctgtgggcctcacccaccacccacytgaccagtgggttgcaagagtcttctttgggcagcataaatgtccatgaaatcttcacaatttatgttcagagattgcagtaaagacaggcataagaaattataaaagtattaattttggg

SEQ ID NO: 597472 - DNA, 604 bp, Homo sapiens
aaatatagataactgcttccattcgcaagacatgcagaaatgcaaggaacccayggataattgtttttcaacagtcaggatctgacttatattttaagcaattcatgatgattacactgtggagaatattgagaggaggtgagtgttatgcaggatgaccactgggatatcaccacataattatgagatgtgctttggtggaaggggagataattctggcctgaactaggcatatgcctattaagatggagaaaactcaacaagtcagtatgtattttggaggtaaaattggcagaatttataaatttttgcttaattgcataggtgaaataatttagaagtcaaaaatttattcagatagaaatgtttatgtggtataggaaaataaagtcatttttattgaagcaataaatagttcaattttgaatatgcgaggcttaaaataaatgtaaagtactgaatatgtacaagatggggctcagaagaaagatgtacgtgaaaatgatttttggagtcaacaagtagacaatgaatgaattcctgagaatgaatgaaatgacccaacactcactaaaaaatgatttaaagagagaagagtgaactc

SEQ ID NO: 597473 - DNA, 381 bp, Homo sapiens
tggttatttttaaatgcgcaatcaaattattattgaccatagtcacattgatatgctatcaaatactagagcatattcatgttttctaatttttgtactcattacctccattcctccaccacaccccacctccagtattcttctcaacctctgggaactgtcatcctactttctattcccatgcgttcagttgtttaaatttttagctcccacaaataggtgagaacatgagaagtttktcttcctgtgcccagtttatttcacttaacataatgatctccagttccatccattttgttgcaaatgacaggatctcactttttttttatggctgaatcgtgctccattgcatatggaacattttctttatctattcatttg

SEQ ID NO: 597474 - DNA, 505 bp, Homo sapiens
tagctagagcagtcagacaagagaaagaaataaaggacatccaaattggaaagaaataaatcaaattatgctgttttgcaggtgatataatcttatatttgaaaaaaaactaaagactgcwccaaaaaatgattagaactgactaaaaattaagttgcagaatataaaatcaatgtacacaaatcagtagcatttctatgtgccaatagtaacaatttgaaaaagaaatcaaggaataatctcatatacaatggctataattaaaattaaatacctaggaatagacttaaccaaagaagtgaaagatgtctacaatgacatctataaaacattgatgtaagaaattgaaggggacacaaaaaatgagaagctattccatcttcatagattggaagaatcaatattgttaaaatgtctgtatcacccaaagcattctgcagtttcaatacaatgcctatcaaaataacaataacattcttcacagaaataaaacaaataatactaa

SEQ ID NO: 597475 - DNA, 505 bp, Homo sapiens
tagctagagcagtcagacaagagaaagaaataaaggacatccaaattggaaagaaataaatcaaattatgctkttttgcaggtgatataatcttatatttgaaaaaaaactaaagactgctccaaaaaatgattagaactgactaaaaattaagttgcagaatataaaatcaatgtacacaaatcagtagcatttctatgtgccaatagtaacaatttgaaaaagaaatcaaggaataatctcatatacaatggctataattaaaattaaatacctaggaatagacttaaccaaagaagtgaaagatgtctacaatgacatctataaaacattgatgtaagaaattgaaggggacacaaaaaatgagaagctattccatcttcatagattggaagaatcaatattgttaaaatgtctgtatcacccaaagcattctgcagtttcaatacaatgcctatcaaaataacaataacattcttcacagaaataaaacaaataatactaa

SEQ ID NO: 597476 - DNA, 622 bp, Homo sapiens
cttctcacttgtaggatgagtgtaatgatagtctttcacaactttgtcatgaagattagcatgtagtttatcattaacatcatacctgttaagcacttaaagcagtatatagcacattgtaaatgctatagaagttaaataaaacataccacttccaataaaatcagctagattaaccgttcagtctaatcatattctattgtgagataaagtagaaaattgattattagaaataacaatataattaaaatatctttacttttatatctatccgttaaatttaattgtaatcatgtaccaaaaacacaaacacaacagttagaaaatcaggtattgagaaagaaagggatgtgaatgatatatggtagatcttcctacatggctttaatgacatataatattccatttctttrtgaaaatgtaatcaaatatggccaaaaatactagattttgttaaaaggcatagtgggaatatgactattgtatttatctgtactgtatatatgtttaaaatatttaataaaaaattaagatgacttaaggctcacacatgtttaatttcaatcctgtctttgccagttacaaactctacgactttgggcaagtcatttattctctctgt

SEQ ID NO: 597477 - DNA, 626 bp, Homo sapiens
attatatttttgtgataaatgttggtctgctgaaaaatgctaatcattctactacttcttttgctccaacttaatgttatgctttggcactcaactattacaatgcaatcaagaaatttactcagatttatttcccgccacctgtcactttacctccaattttktgtcagttgaactagtagcatgcttacatcctattgtccactactaattcccttataattaaagatttcattctattaattgttaaataaaaattataagaggtaattgttttggactgagtttctacactaggcctcagtaaactaaactaaaaataaaaatggagtcac[291 bp omitted]

SEQ ID NO: 597478 - DNA, 574 bp, Homo sapiens
agtcattttacagggctacaaggtctgttgtgtggcagcaaattacattataaaatagccataggtgtgtaccccatgaagttgtaaaatgtgatttgcagagatttgatggcagatctgtctctgtaaggttccatcccagggtgtgccctccatctgttccacaggtcttcatctggttgcatctaaaggaagtaaaatatcttcatcttcaggtctaatgcagtaatataaaaatgaattaatttgataaagtaaragggaatttaacacacttactttgattaaaatatcaataaagtctgttacttatgaaattaatttaaaaatgcttcctacttattctacagtaatgtgaacctgaataccattccaaatacaaatcagcctcattggttaaagccaatattagtaacatttcctctacatgatgaattagcgtagtttttgttttaactctttatcttgccttttcaatggaaacatgaaaacaaaattaaaattttctttcaagtatttaaggaggttatttacttgacattttcctgccttgatctttctattgtgaaattcc

SEQ ID NO: 597479 - DNA, 501 bp, Homo sapiens
aaaatctatgagaacttagaatatatttgtctacataagacaaaagtgaaggcaaaaatagaaaatagccaataaattggaaacctcagtaatttttaaaaatagttcaagaaatagaacacttgaagaatttaatttcaacacagcatttctccatggaattatatcctctacatgactgtattcattgtacaggtaaacctacatgtaactgtgtggaactctataaagaaaacaatattctatgtattttatgatcactttgaagatattttgaaggaataaactattttctgttttctcatctgctagccacccattaaagcaataaycccaatatccaaattctttttataactggtctttctcggcctcttctctttcaaatcctgaatctctctgccctttactgcacaatttagtgaaagagtacaattctctaggcctaaaaatatcaaaataacttgaaaagttattggaggagtatagtactacagtttg

SEQ ID NO: 597480 - DNA, 655 bp, Homo sapiens
ttcagaatgctagtgcgtaaaacccataaaagtaaatcatgttttcatacatgaatacatttatgattatgtaatagaaagtactttttgttaaaaatcttgcaaaagtacatttggtaaacatttttgaagtaagcaagtatagtatttatctattttttatatatgctttatatttggaaatctgatttttgattatgattattacgtaaacaaatcaataaattagacagtaagcttatacttactatattgtccacttttcatacccatcatttgtgtgaatcaattatcrttgattgtcaattactttctaaattgcactgcttataacaggcttctggtttatgttttgctatagttgattttgattataaaccattatactcaactttaatagacttaagacaatgctctctatctagagcagttagtttctcttttctctagaccaagtgaactaattcaaagaatctaggctctcaagaagtgaaaacttagagataaacctaaataaatagattcaatgacagaatgaaattatgatggtataaaggcaatgttacagggatggttaacatctcttggagattgtgcagatattcaaactactattacgacttgggacatctttccttacaagtaataacagttt

SEQ ID NO: 597481 - DNA, 433 bp, Homo sapiens
tgactttttacccttggcatggtcttagcatgagtgtagtatcattctcagcctctcgacttggaggttgaccatgtggcttgctttaactaacggtatgtagtcatccatgaccgtgtgcttttctgaatctaagtcttaagagtctcatgtaattctgtgtattgccttgtgcttttgacatcactatgataagagcatgccctgctgayctgctaatccaaggaggatgacatacatggagagtggactagaactcacagacctgcagtgtggagaaaaatggtacatctaaacccaacctggagcagatgacccctaggtgacctcagtttcatgaaaaaacagttaaaatcagaagaccttgtaaagctgagccctgccctggtcagccaactcacagttggctgataatgcctcagggcattagcag

SEQ ID NO: 597482 - DNA, 637 bp, Homo sapiens
  misc_feature 32: n = A,T,C or G
taatatttttaattagttattaattaaaggtntgtgatatgaagttaataaacattgagcagattataatgacctaaatgtaatctatagtmcggtagctaatattagcaatgttgctagacgcttttaaattaaactgcatattcaactacaggtttcaatcatttcagagtaatttatatttgacatattcttcctctgaaaacaactataaaaccaagaaaaaatatgtatatggagattcttttcaggcattgaacaacagaaatgcatgactgagattccttagggaatgggcaaacatgaagtgactctgtctccttggcctcctttctgcagacattctcctggcatgtcatatatacatatgaagaactacgagagggcagttctcttagccaagaattgggaagaacacttatgccagccacatttgcatgtgctacttcaaactgtccgcttataaggctgccagttttgactggggaccaatagaagagcatactcggtaatgaggtgaggtttcagtacaagctgctcttctttgggatcttatggtgcagcaaattcaataacgttcaatatgtttttgaaaatagggatgctttatggtatatctgacaaataacagtgggag

SEQ ID NO: 597483 - DNA, 637 bp, Homo sapiens
  misc_feature 32: n = A,T,C or G
taatatttttaattagttattaattaaaggtntgtgatatgaagttaataaacattgagcagattataatgacctaaatgtaatctatagtccggtagctaatattagcaatgttgctagacrcttttaaattaaactgcatattcaactacaggtttcaatcatttcagagtaatttatatttgacatattcttcctctgaaaacaactataaaaccaagaaaaaatatgtatatggagattcttttcaggcattgaacaacagaaatgcatgactgagattccttagggaatgggcaaacatgaagtgactctgtctccttggcctcctttctgcagacattctcctggcatgtcatatatacatatgaagaactacgagagggcagttctcttagccaagaattgggaagaacacttatgccagccacatttgcatgtgctacttcaaactgtccgcttataaggctgccagttttgactggggaccaatagaagagcatactcggtaatgaggtgaggtttcagtacaagctgctcttctttgggatcttatggtgcagcaaattcaataacgttcaatatgtttttgaaaatagggatgctttatggtatatctgacaaataacagtgggag

SEQ ID NO: 597484 - DNA, 637 bp, Homo sapiens
  misc_feature 32: n = A,T,C or G
taatatttttaattagttattaattaaaggtntgtgatatgaagttaataaacattgagcagattataatgacctaaatgtaatctatagtccggtagctaatattagcaatgttgctagacgcttttaaattaaactgcatattcaactacaggtttcaatcatttcagagtaatttatatttgacatattcttcctctgaaaacaactataaaaccaagaaaaaatatgtatatggagattcttttcaggcattgaacaacagaaatgcatgactgagattccttagggaatgggcaaacatgaagtgactctgtctccttggcctcctttctgcagacattctcctggcatgtcatatatacatatgaagaactacgagagggcagttctcttagccaagaattgggaagaayacttatgccagccacatttgcatgtgctacttcaaactgtccgcttataaggctgccagttttgactggggaccaatagaagagcatactcggtaatgaggtgaggtttcagtacaagctgctcttctttgggatcttatggtgcagcaaattcaataacgttcaatatgtttttgaaaatagggatgctttatggtatatctgacaaataacagtgggag

SEQ ID NO: 597485 - DNA, 332 bp, Homo sapiens
ttgttgacctcctattatgaagtaggcagagatttatcatcatcactgaaatagacatgcactggggacgtttttctttcttgcccacaataatttcaccaacaccaacatttctggtctcacaraatatcttatcgactattatggtgtttcatagagtgttgattctaatcgagggactcattttattgcaagggatatggagcaattagcacatgcccatggaagatttttttccatgataattctgtctttactaaattgtaatgtattttattttaatcaaataatatcccttcacagaatatacactaagaaatgacttttcctaa

SEQ ID NO: 597486 - DNA, 512 bp, Homo sapiens
tctcttgccatggtattgctttattaatggctatttgaaaactatggtgagagggatatggtatatacatggattcaacatcttaccaaagctgatccatctaccacaactattgagttcagaagttaccaagaacatgagaccctgacatggccccctttctttgagatcagccagttaattttgttgacctcctattatgaagtaggcagagatttatcatcatcactgaaatagacatgcactggggacgtttttctttcttgcccacaataatttcaccaacaccaacatttctggtctcacagaatatcttatcgactattatggtgtttcatagagtgttgattctaatcgagggactcattttattgcaagggatatggagcaattagcacatgcccatggaagatttttttccatgataattctgtctttactaaattgtaatrtattttattttaatcaaataatatcccttcacagaatatacactaagaaatgacttttcc

SEQ ID NO: 597487 - DNA, 590 bp, Homo sapiens
ggaattttacagctgggacgccaggggtgacatcacatattggtaggaygtgatggctgcctgagtctcagaccagcaagtttttatgaagggtttcaaaaggggaggggacataaaaacagggagtaggtacaaagatcacatgcttcaaagagcaaaaagcagaaccactaacaagggtctaacaaagatcacatgcttctgagggaacaggacaaaggacaaaagcagaaccactgacaagggtccaacaaagatcacagggcaaagggcaaaagcagaaccactgataagggtctatgttcagcagtgcacatattgtcttgataaacatcttaaacaacagagaacagggttggagagcagataactggtctgaccataaatttaacgagtttttccaaccctagtaagcctgagggttctgcaggagaccagggcttatctcagtgcttatcttaactacacaagacagacattcccagagcggccgtttatagacctccccctaggaatgcattcctttcccagggtattaatattaatattccttgctaggaaaagaatttagcgatatctttcctacttgc

SEQ ID NO: 597488 - DNA, 590 bp, Homo sapiens
ggaattttacagctgggacgccaggggtgacatcacatattggtaggacgtgatggctgcctgagtctcagaccagcaagtttttatgaagggtttcaaaaggggaggggacataaaaacagggagtaggtacaaagatcacatgcttcaaagagcaaaaagcagaaccactaacaagggtctaacaaagatcacatgcytctgagggaacaggacaaaggacaaaagcagaaccactgacaagggtccaacaaagatcacagggcaaagggcaaaagcagaaccactgataagggtctatgttcagcagtgcacatattgtcttgataaacatcttaaacaacagagaacagggttggagagcagataactggtctgaccataaatttaacgagtttttccaaccctagtaagcctgagggttctgcaggagaccagggcttatctcagtgcttatcttaactacacaagacagacattcccagagcggccgtttatagacctccccctaggaatgcattcctttcccagggtattaatattaatattccttgctaggaaaagaatttagcgatatctttcctacttgc

SEQ ID NO: 597489 - DNA, 590 bp, Homo sapiens
ggaattttacagctgggacgccaggggtgacatcacatattggtaggacgtgatggctgcctgagtctcagaccagcaagtttttatgaagggtttcaaaaggggaggggacataaaaacagggagtaggtacaaagatcacatgcttcaaagagcaaaaagcagaaccactaacaagggtctaacaaagatcacatgcttctgagggaacaggacaaaggacaaaagcagaaccactgacaagggtccaacaaagrtcacagggcaaagggcaaaagcagaaccactgataagggtctatgttcagcagtgcacatattgtcttgataaacatcttaaacaacagagaacagggttggagagcagataactggtctgaccataaatttaacgagtttttccaaccctagtaagcctgagggttctgcaggagaccagggcttatctcagtgcttatcttaactacacaagacagacattcccagagcggccgtttatagacctccccctaggaatgcattcctttcccagggtattaatattaatattccttgctaggaaaagaatttagcgatatctttcctacttgc

SEQ ID NO: 597490 - DNA, 618 bp, Homo sapiens
tatatattatatagagagagcttcttaatctgaggttaagaagctctagcgccactctttttctcccatgatctttctcttcgtatgaaatacgcttgtctagctcttgtatagattttgaacaattgctttcatacattctgaaaatagcaataatgtttatccagtttataggtcatttgtctacaatacaaattatcagacttttgagaattaaagcaaaagtcaatgaccgaatcacacagcatgtggcaacttcatattaaagaaggcttcaggtatctccttttttcccattaaaatgttctaatgtactacatatattaaagtaattagatagatagttttaagtggataaaataaagggagttgggtgacagactagattgttctaaattttaaatgagctgctgcataaaaaactctaggaaaaatacttataataaacaattgtttaacaaatataagttgtaaaaacattgtgaatgagatttggaayggaaagttaagtcacgccatttaaatccagagaaaattacataagattcaggaacacactcactttgactttatggaagaaaaatgaaaacaaatgtgactagtatcaatagcaaccct

SEQ ID NO: 597491 - DNA, 584 bp, Homo sapiens
acttcacattcaataagctggagtataagaaatgattaaacaaaaatgtattgataataatccaaatgccgttaaatctaaagaaaaaatctttaccggtaacacttctctaactatatttacaaagactaaactcatccttgattgttttacttacatgagctaacacatttcatatctctcattttctagctagtttgaaataagtttctatcatctcaygtgccaagtttaaaacacacacacacacacaaacaacagcaacacacacatgcaaaatgtgaataaaactttattatgagttttttgttttgttttgttttttgttttttgagacaaggtcttgctctgttgcctaggctggaatgcagtggcatgatcatggctcactgaaacttctgcctcctgggttcaagtgattctcctgcctcaatctcccaagtaactgggattacaggcgtgtaccaccatgcccactaatttttgtatttttagtagaggcggagtttcatcatgttggccaagctggtctcaaactcctgacctccagtgatctgcctgccttgacctatcaaagtgctggg

SEQ ID NO: 597492 - DNA, 601 bp, Homo sapiens
cttgcaaatttatggattcaagtactaaatacagtaaatctttttgtttacctaatttacttaagattgagattcataagttttagaattcagaatagggaacagattaatttaaataygccattaaaatatatcaattaacattatttacagtatcaaagccattggtgtagaaggcattttgaaattgagattttcctatttaaaactcctaaaaatccttgtatctcagaatttataccattaaagccacagcaggtgtggttgttgtgaaccataacttcttaacattagtataatgatatttacaactgatggtgtttataaagcatcatgtagtcataagtcatgtagagtgtgattccacagataatttttatataaatctccattgagtcacatacaatttgttcaaggtacagcaatgctgttataaaacattcatgttcttcaggatgcacatagagcctacaaaatgcaaaatattcatttttcaaagacaaattattcttcctaaattatccaatgactcttttttcccccttacttcgtaccaagaaaattatagctaagaactttttaccataaggataaggggagg

SEQ ID NO: 597493 - DNA, 601 bp, Homo sapiens
cttgcaaatttatggattcaagtactaaatacagtaaatctttttgtttacctaatttacttaagattgagattcataagttttagaattcagaatagggaacagattaatttaaatatgccattaaaatatatcaattaacattatttacagtatcaaagccattggtgtagaaggcattttgaaattgagattttcctatttaaaactcctaaaaatccttgtatctcagaatttataccattaaagccacagcaggtgtggttgttgtgaaccataacttcttaacattagtataatgatatttacaactgatggtgtttataaagcatcatgtagtcataagtcatgtagagtgtgattccacagataatttttatayaaatctccattgagtcacatacaatttgttcaaggtacagcaatgctgttataaaacattcatgttcttcaggatgcacatagagcctacaaaatgcaaaatattcatttttcaaagacaaattattcttcctaaattatccaatgactcttttttcccccttacttcgtaccaagaaaattatagctaagaactttttaccataaggataaggggagg

SEQ ID NO: 597494 - DNA, 601 bp, Homo sapiens
cttgcaaatttatggattcaagtactaaatacagtaaatctttttgtttacctaatttacttaagattgagattcataagttttagaattcagaatagggaacagattaatttaaatatgccattaaaatatatcaattaacattatttacagtatcaaagccattggtgtagaaggcattttgaaattgagattttcctatttaaaactcctaaaaatccttgtatctcagaatttataccattaaagccacagcaggtgtggttgttgtgaaccataacttcttaacattagtataatgatatttacaactgatggtgtttataaagcatcatgtagtcataagtcatgtagagtgtgattccacagataatttttatataaatctccattgagtcacatacaatttgttcaaggtacagcaaygctgttataaaacattcatgttcttcaggatgcacatagagcctacaaaatgcaaaatattcatttttcaaagacaaattattcttcctaaattatccaatgactcttttttcccccttacttcgtaccaagaaaattatagctaagaactttttaccataaggataaggggagg

SEQ ID NO: 597495 - DNA, 631 bp, Homo sapiens
tacaatagatataaattgtaaaacacagaaacaattaaaacttaacattatctacacttaaatagaatttgttgatagaaggtaaacaaggttctaaccaattgtaaaatgccattttccttattatttgtcaataatggtaatagtgtagtttagataatttacattgtttttaaagctgttttatttaaaaagtctttatttcaatgcttacagacatacccacactagaaaatatgggacataatgttatacttctccacccatactcatcacattattgttccataccagctaagagaaaaaaaattcaaaaatatcaccagtcatctttattccctagcaatgtgttcaatgctttgattttgccaayagcattaagtagcttagtagataaaatagcttagtcatcgttttgtaacttatgtgcctgtttaattttttttgtacactatctccacatgtcaccatatgggcttgcagacaatacaaatccatcaaagaaaacctctagatatgaaatagggctatgaatccaggcaagctctgtccacttgtgtacttgagtctgattacaaatatgagtagtagagcctgtgtggaaacagcagggcaatgttttacaaaatgg

SEQ ID NO: 597496 - DNA, 598 bp, Homo sapiens
caatatcaataaggaataagggatatgactatggattttagagatattttaaaaaatcaaaaaggaatcttgcaaaaaaactaatgccaacaaattttaaaattaaaaagtaaaaactcgtataagaataaagacataacaataaaaatgtcagaagaaaaaagggacattctgatttgaactgttacatattaatgtaacagaatcttgacctgaaaatgaagccacaaagataaattaaggttaaggtattagagtaggtaacaatttcaaatagaagaaataaacaatggccaacccayatgaactatttcagagaagacattcagtattcctcacaatacagtctttctaaggacagtatttccttgataaaaaaaatctgaagacatcatttaaaaattattttattatcacaagcatagttacaaaatccaaacaaaatgtaaattaaatatactgacaaataaaatgcacaacacacaaaaattgccttattcaagaaatgctaggcaaatgctattctatagatagcataatattacagcaaacattactctgcatgatgaaattatgaaatcatttcctctaagattag

SEQ ID NO: 597497 - DNA, 582 bp, Homo sapiens
ggactatattcatagttgtctgtcatattttgcatcttaatttctattctcctttctctttaagtcaggaagatgtctctaatacagtcaaaataaaactcatttagaattggcctgaaaagttattcccaaatttaactgaaatagtgaatttaaagaactttataactgatcacatataactcttccacaaaactaaattattgtaacttcattcctcaaattaagttaaatgaaaaaatatatattagaaagccctgggcaaggagtcaatgactttggtatatcctgcttcctgatttaatcagttactttttccatgaccacaggaaagtatttcgagttctgattctctttttctttatcttgaaaatatgataaaagggattattggattgtttgtgtcacacacaagcaagatgtctaagtatgttgtttacaaagaggacatagtggcaatgaataaattcatggactctagaaattgagggaagtaagagaggtattttaaaggcgttaaaatgacacttamattttaaaagattattctccaaacaaataaaaattaatcaaaagatttta

SEQ ID NO: 597498 - DNA, 561 bp, Homo sapiens
aaagtataccacagctttcctgatttttatatagatatctactcttatttcaggtctactttgggatttatacaaatagagtaaagatgatgataaaaatttataattacatggatcatttggttttcacttatattcacatattttaaaagggaaccacctaagttaaagaggaaagctgcctttaaaatarcatgtttacaggaacaaaagctatgctttaatatcaattagtgtttatgttgttgtgatacctagcttctctttgttttgtctaacacatgtgtccctgatttattacgtgaatcaggtaggaataactttgtgtactaaaggtaagatctacatagatcttgtacttttcttactgttttgtccttagtcaaaacaaaaactgatgatatttgatttaaaatattttgagtaagaaaactttatcttctaagaaaccctgtgttccaatgaaacattactaagaaaaaggaaatatccattgatttggtaacttccttgttaatttaaaaaaattaattttttctttcctaaaacatcctgctgata

SEQ ID NO: 597499 - DNA, 596 bp, Homo sapiens
ctgttttgtccttagtcaaaacaaaaactgatgatatttgatttwaaatattttgagtaagaaaactttatcttctaagaaaccctgtgttccaatgaaacattactaagaaaaaggaaatatccattgatttggtaacttccttgttaatttaaaaaaattaattttttctttcctaaaacatcctgctgatatggtttgactgtgtctccacctaaatctcatcttgaattgtagctcccataagtcccacacgttgtgggagggatccagtaggagataattgaatcaaggggcggtttaccccatacggttctcttggcagtgaaagagtctcacaagatctgatggttttatgaagggaaacctcattcacttggctcttattctctcttgtctgttgccatgtaagatgtaacttttgccttctaccatggtcatgaggcctccctactcacgtggatctgtgagtctattaaacctcttttctttataaattactcagacctgggtgtgtctttatcagcagtgtgaaaatggaataatacagtaaattggtaccaggagtggggtgcggctgatgagatacccgaaat

SEQ ID NO: 597500 - DNA, 596 bp, Homo sapiens
ctgttttgtccttagtcaaaacaaaaactgatgatatttgatttaaaatattttgagtaagaaaactttatcttctaagaaaccctgtgttccaatgaaacattactaagaaaaaggaaatatccattgatttggtaacttccttgttaatttaaaaaaattaattttttctttcctaaaacatcctgctgatatggtttgactgtgtctccacctaaatctcatcttgaattgtagctcccrtaagtcccacacgttgtgggagggatccagtaggagataattgaatcaaggggcggtttaccccatacggttctcttggcagtgaaagagtctcacaagatctgatggttttatgaagggaaacctcattcacttggctcttattctctcttgtctgttgccatgtaagatgtaacttttgccttctaccatggtcatgaggcctccctactcacgtggatctgtgagtctattaaacctcttttctttataaattactcagacctgggtgtgtctttatcagcagtgtgaaaatggaataatacagtaaattggtaccaggagtggggtgcggctgatgagatacccgaaat

SEQ ID NO: 597501 - DNA, 596 bp, Homo sapiens
ctgttttgtccttagtcaaaacaaaaactgatgatatttgatttaaaatattttgagtaagaaaactttatcttctaagaaaccctgtgttccaatgaaacattactaagaaaaaggaaatatccattgatttggtaacttccttgttaatttaaaaaaattaattttttctttcctaaaacatcctgctgatatggtttgactgtgtctccacctaaatctcatcttgaattgtagctcccataagtcccacaygttgtgggagggatccagtaggagataattgaatcaaggggcggtttaccccatacggttctcttggcagtgaaagagtctcacaagatctgatggttttatgaagggaaacctcattcacttggctcttattctctcttgtctgttgccatgtaagatgtaacttttgccttctaccatggtcatgaggcctccctactcacgtggatctgtgagtctattaaacctcttttctttataaattactcagacctgggtgtgtctttatcagcagtgtgaaaatggaataatacagtaaattggtaccaggagtggggtgcggctgatgagatacccgaaat

SEQ ID NO: 597502 - DNA, 590 bp, Homo sapiens
ttggatcatatggtaccatttgccaatcagtatgctgagcttgtctttagaattccagccctcattcaacaccaatggcaatgcgctgcgaatgcccttctggcaggttaattgtgtcacttggctttcctagccctgccctttcatgttatttaggctttagcaggaagcttccatcctcttggctctcaaygtggccctatgcctcgaggcagaagcagtgggccagagccaaagctgctcagacaggaggaccctggcagtggagccaaagggaagctgccaggagcagctccctggggatggactgtgccccttttatgtatctgcctgtagtgttgaaagagaggccaatctgccacacaacacactatctgagctaatgaccagcccaaagtagggaggacaaatgaaaaaatagaacacatccagacacacaactccttcagccttctcctcacatccctgccactgtcgaaaagtaaaaatagcaataaaaatagcaataacaaagtcctagcaaactaatgtcactcttaaaaattcaggccagatgttgtttcctgaagctggtgtctgtggggaaggtt

SEQ ID NO: 597503 - DNA, 588 bp, Homo sapiens
cattttggggtcaaaagagccaccaagaatttaactgccacccagaacaaaaatcagtaccactaaaaagaaggtggcataatccagattccccacaayatattattcacagtgactagcataaaccaaaacttagggggtgcagaaagaatttgaagaatgtgacccataataataataaaatgtcagctgaaacaaaacccaatattacccagatgttggaattaacaggtcagaattttgaaaaaactattacaaatatattcaaagccaaaaagtaaagattataagtgaagagatgaggtagaaaatctcatcagagtaatgaatctataaagaagaaccatataaaagtcttaaactgcaaagttcagtacttaaaacaaaaaaattacctggctgggcttttcagcagattaaaaaccatagaagattaatagaaattttcccatgtgagagacggagaaagaaaagatttaaaaaaatgaaaaagcctatgggacaatttccaggattctaatatacttgtacttggaatcccagaaacagaagagagagaatggggcagaaaaagaatttaaagaagta

SEQ ID NO: 597504 - DNA, 588 bp, Homo sapiens
cattttggggtcaaaagagccaccaagaatttaactgccacccagaacaaaaatcagtaccactaaaaagaaggtggcataatccagattccccacaatatattattcacagtgactagcataaaccaaaacttagggggtrcagaaagaatttgaagaatgtgacccataataataataaaatgtcagctgaaacaaaacccaatattacccagatgttggaattaacaggtcagaattttgaaaaaactattacaaatatattcaaagccaaaaagtaaagattataagtgaagagatgaggtagaaaatctcatcagagtaatgaatctataaagaagaaccatataaaagtcttaaactgcaaagttcagtacttaaaacaaaaaaattacctggctgggcttttcagcagattaaaaaccatagaagattaatagaaattttcccatgtgagagacggagaaagaaaagatttaaaaaaatgaaaaagcctatgggacaatttccaggattctaatatacttgtacttggaatcccagaaacagaagagagagaatggggcagaaaaagaatttaaagaagta

SEQ ID NO: 597505 - DNA, 588 bp, Homo sapiens
cattttggggtcaaaagagccaccaagaatttaactgccacccagaacaaaaatcagtaccactaaaaagaaggtggcataatccagattccccacaatatattattcacagtgactagcataaaccaaaacttagggggtgcagaaagaatttgaagaatgtgacccataataataataaaatgtcagctgaaacaaaacccaatattacccagatgttggaattaacaggtcagaattttgaaaaaactattacaaatatattcaaagccaaaaagtaaagattataagtgaagagatgaggtagaaaatctcatcagagtaatgaatctataaagaagaaccatataaaagtcttaaactgcaaagttcagtacttaaaacaaaaaaattacctggctgggcttttcagcagattaaaaaccatagaagattaatagaaattttcccatgtgagagacrgagaaagaaaagatttaaaaaaatgaaaaagcctatgggacaatttccaggattctaatatacttgtacttggaatcccagaaacagaagagagagaatggggcagaaaaagaatttaaagaagta

SEQ ID NO: 597506 - DNA, 588 bp, Homo sapiens
cattttggggtcaaaagagccaccaagaatttaactgccacccagaacaaaaatcagtaccactaaaaagaaggtggcataatccagattccccacaatatattattcacagtgactagcataaaccaaaacttagggggtgcagaaagaatttgaagaatgtgacccataataataataaaatgtcagctgaaacaaaacccaatattacccagatgttggaattaacaggtcagaattttgaaaaaactattacaaatatattcaaagccaaaaagtaaagattataagtgaagagatgaggtagaaaatctcatcagagtaatgaatctataaagaagaaccatataaaagtcttaaactgcaaagttcagtacttaaaacaaaaaaattacctggctgggcttttcagcagattaaaaaccatagaagattaatagaaattttcccatgtgagagacggagaaagaaaagatttaaaaaaatgaaaaagcctatgggacaatttccaggattctratatacttgtacttggaatcccagaaacagaagagagagaatggggcagaaaaagaatttaaagaagta

SEQ ID NO: 597507 - DNA, 556 bp, Homo sapiens
aatcccataatcagtctggaggaaactgttccacttctattctagacgttattaaaaacactgttttctttattgtctttgttggtttataaactatccatagatcatgaactttgctcagaataaagtgagggctttataaaaattatgttacagaattatctttacttgctcttccctcttacaggtatatatgccttcttgcatagtgcagcggagggagaccttggagcacagtaattgcttctgctcaagatgatgacatggttctctaggtgaaataagagagctactgctctggcctagagcatcatttccccaaaaagaatgctaaatccatgcaaaggacagttgagcaggtgtaaatgtgaattaagcatacttctattaacttgtatcaaactgtgctatttcatttatcttatcagctttaataaggtttttttctggttcacaatcttattagcttacgggggtaaactgtgcattgaaaaacattacatttgcctcttwaagtcagaggagaggaatatatgaaaagagaaaacatgagagt

SEQ ID NO: 597508 - DNA, 609 bp, Homo sapiens
ttcagaaaacaaatttactgttgctctagagaatggtagtctaccatgcactccatgtacaatggcgccaaagtgctgctccaggatgtagtggtgcatccagtcactttctgtcacaaacattctcctacctggctagattcctagagctctgagacccaagctcagaaaagtcttcagagtattcaagtgaaataaatatgtttgaggggaagaggacacatttccatattactgatgatttttcacaaggctgtgtcacaggcagcttaacccagcctgaccaacatggtgaaatcccatctctactaataacacaaaattagccaggagcggtggcgcatgcctataatcccagctacttgggaggctgaggcaggagaattgcttgacctcaaaaggcagaggttgccgtgagccgagattgagccattgcactgcagcctgggcaacaagagcgaaactccgtctcaaaaaaacaaacaaacaaacaaacaaaaactcaatggaatctaaattgagttcatctccctttgccttcacactttcctttctgtttcctctttcarttggaggtcccacagcttgcccagccaccagccacaaacc

SEQ ID NO: 597509 - DNA, 558 bp, Homo sapiens
ctgtttaacataatactcttatttgaatcagcaaatgttaagttttttatttttcaaaatcactgtaatattgatttatgctgaattattgcagcattgtagtactctgtgtagtgttttcttttctttctagacaatcccttaacaattcttatttacagaatattagtgtgatttattatattttcctatatataatgccatgaaccatttattcaatgttttcaatctattcagtttcagtgataactacatttgtctggattattttgtttttcttactgattaatgagagctacttatattgtaaggaattgaccttttgttgtcatgtagtaatatttacaatttattctttggctcttacttttttgtttatgattatttttgttttgctgaagtttaaagcttctttgttgttgtatctattgatcgctcttttgttatttcttccattgcttttgtgcataaataatgcttttccaacataagaacagttaaatacttatctcaatttyttctttttattttaattgtttctttttttatattgaattc

SEQ ID NO: 597510 - DNA, 481 bp, Homo sapiens
atggtagaattctgcaaatgttcgttgcggcactgttcagaatagcaaaaacatggaatcaacctaagtgcctatcaatgacagactggataaagaaaatgtggtatatatacaccatgaaatattatgcagccataaaaaagaacaagatcatgtcttttgcaggaacgtaggtggggctgtaggctatcatccctagtaaactaatgcaggaacagaaaaccaaataccacaggttctcacttataagtgggagataaatgataagaacttatgaacacaaagaaggaaacaacagacactgggktttatttgagggtggagggtgggaggagagagaggataagcaaagataactactgggtactaagcttaatacctgagtgatgtaaccctatgtacaacaaacccctctgacgtgtttagctatgtacctccaaacctaaaataatttttttaaaaaagaagctctctagaatcc

SEQ ID NO: 597511 - DNA, 597 bp, Homo sapiens
accaagactgcactgacttaaataaytcataattttaaaatggagacaatgtagcaataaagattataaatactaagtgattataatataaaagaagtttatttttaaaactaacaaataaaatttcttgaaataaaaactgtagtcaatacaattaaaaaatctatgcaaaaattcaactacagattagacacagctgaaagtaaaattaataaactggaagttgtatctgcgaaagtcatataaaatgtagcaaatcaaaataaaggcatattaaatattcaatgagtaatattcctatatatttttatatattctataaaagatacaatgtatgatggttaatttatggtgtctatttggctaggctacagtatttagttgcttggttaaacaccagtccagatattgctgtgaaggtattttttgggggggatctgattaacatttaaatcagtagactttgaataaaatagatcacccttggacctcattcaatcagttgaggccttaacagaaaagactgaggtcctccaaagaaggaattctgcttccagactgcctttggactcacaactacagcattaatgcctgctg

SEQ ID NO: 597512 - DNA, 390 bp, Homo sapiens
ctgcaactaaaagcttcagctccttaccttccttgctcctagctttagttcttttcacacctgacctctggttggacccctgtctgctatcttggtgtcattctcttgctcttgtgcrtgtctgttctcctcatcttcattcccttgacccagaccctaatcttagtttggtaatggttgacttctctggattcataccaaattgtagaccagttaacactatgacagcatctacatgatcagattatctcccctcacccttgcttctttgcacacattcatatacaaatggctacatgcacacacagaagtagaaatggatgttcagggcagggtaagaacaccgaggtagtagaacacagaggtggtaaacccacaggaactgaattc

SEQ ID NO: 597513 - DNA, 601 bp, Homo sapiens
attcataattttaaaatggagacaatgtagcaataaagattataaatactaagtgattataatataaaagaagtttatttttaaaactaacaaataaaatttcttgaaataaaaactgtagtcaatacaattaaaaaatctatgcaaaaattcaactacagattagacacagctgaaagtaaaattaataaactggaagttgtatctgcgaaagtcatataaaatgtagcaaatcaaaataaaggcatattaaatattcaatgagtaatattcctatatatttttatatattctataaaagatacaatgtatgatggttaatttatggtgtctatttggctaggctacagtatttagttgcttggttaaacaccagtccagatattgctgtgaaggtattttttgggggggatctgattaacatttaaaycagtagactttgaataaaatagatcacccttggacctcattcaatcagttgaggccttaacagaaaagactgaggtcctccaaagaaggaattctgcttccagactgcctttggactcacaactacagcattaatgcctgctggaatttttagactgttggcctcatctgc

SEQ ID NO: 597514 - DNA, 588 bp, Homo sapiens
gtgcatgtgtttcctaagctataaaacgaagatgatcatagtatctaccttgtttggcactcgtaatgtttaaaagggttttaaaaaaacatatagagcaatgcctggatctaatgtgtccaatattttcgaagagcttcagggtttttyttctgcaacacaggagtagtaggtacttcctcagattgttgtaactattaaacaggatatatttggagtacacagtgagctctggaagatcctgatacatttttatttccatatccttccataattcaaatcttggtcattcattatgtagaaaacccatttttgggatcaatccagcaactcccagatattgtggctcaatccaatctttgcttattaataggcattttcagggaaacccccttttaggggcttgagctgtcttgcatctgatagccccttggtcccctctggttagcaattggcctcttctagcccacagaatttaaatcaagagcaggatgatgcagcatggttatagtgcaatggtgtaaattgaggctctaatgccatctctggaacacttttaaaggatttttgggatacctgtgcataggc

SEQ ID NO: 597515 - DNA, 560 bp, Homo sapiens
caacagaatataataaatctgaagtgaaatgtagccaaatgaaaactttaaattatatccaaatacatttgaccaggttaataaaaaaacactgacaaatataaacatagtggaaaatttaatgtaccttcacttaaaacttgtagatgcagaatacaaaaaaaaaaaaaagtaaggtgatgatatagagtattttattttgttttgtattgagacaggatcttactctgtcacccaggctggaatgtagtggcaccttcatggcttactgctgcctcatcctcctggactcagatgatcatatcacctcagctccccaagtagctgggacctttggcatgcaccaccatgcccagctaatttttaaattttttgtwgtgacaaggtctcactatattacccaggctggtcacaagcaatcctctcgcattggtctcccaaagttctagaatcccagacatgaaccattgcacccagcctaatataaagtatttgaacaacagagttaatgagcttaagtggaagcatatataaagccctgcacaaagcaattggaaaat

SEQ ID NO: 597516 - DNA, 514 bp, Homo sapiens
gtctcactatattacccaggctggtcacaagcaatcctctcgcattggtctcccaaagttctagaatcccagacatgaaccattgcacccagcctaatataaagtatttgaacaacagagttaatgagcttaagtggaagcatatataaagccctgcacaaagcaattggaaaatatatattcttttcaagaaggaatggttcatttaaaaaaaatgaccacataaaatgtctcaaaagtaactgataaaaatgcaatgacttccccacttccaaattttatctgcctggaatctaaaaaacacagtttaaatatagaattcgtcagagcaaaatttatcatcaaaaacttggaatatwtagacttcatgaaaacactttataccaaatgttttagtatggcactaaagagagtctagaaggaaattctagcaatattacaaataaatatatttttaaaataagattgaaaattgatcagcctagtatttagttatagaaagtagcaaaggagg

SEQ ID NO: 597517 - DNA, 598 bp, Homo sapiens
ataatcaagtaaaacaaagacaaggcaggaaaatcactgctaggtgaaaggggtcatagttaaaatacagtagacttttaattttgtgaatatatagtagrtgtatacatttatggggtaatgagatattttaatacaagcatacagtgtgaaataagcacattatggagaacagcgtattcatcccctcaaacatctaccctttgagttaccaataatccaattacactctaagttattttaagatgtacaattagttattattgactatagtcaccctgttgtgctattaagtagtaggtcttattaattctttctatttttgtgcccatttagtagaaattttaaaacataagagtgtcaaataaacaactctatgcaaacatatttgaaaacagataaaatggatatttttagaaaaaaatggcaaaactgatacatgatgaaatgagaaaatttttttaatcattttttaatcacgttattcagaaagtggtcaataggaactatgcctgtaaggcgtttctaacttactgaaaaggcaaaaaggaacacttggagggaatacgaatgctatccaatatccatgcttaaatgt

SEQ ID NO: 597518 - DNA, 598 bp, Homo sapiens
ataatcaagtaaaacaaagacaaggcaggaaaatcactgctaggtgaaaggggtcatagttaaaatacagtagacttttaattttgtgaatatatagtagatgtatacatttatggggtaatgagatattttaatacaagcatacagtgtgaaataagcacattatggagaacagcgtattcatcccctcaaacatctaccctttgagttaccaataatccaattacactctaagttattttaagatgtacaattagttattattgactatagtcaccctgttgtgctattaagtagtaggtcttattaattctttctatttttgtgcccatttagtagaaattttaaaacataagagtgtcaaataaacaactctatgcaaacatatttgaaaacagataaaatggatatttttagaaaaaaatggcaaaactgatacatgatgaaatgagaaaatttttttaatcattttttaatcackttattcagaaagtggtcaataggaactatgcctgtaaggcgtttctaacttactgaaaaggcaaaaaggaacacttggagggaatacgaatgctatccaatatccatgcttaaatgt

SEQ ID NO: 597519 - DNA, 553 bp, Homo sapiens
acaaacaataaatacattatatagatataatgtagttatatattatagataatatatttttatatataataagttatattgtatataactacataatgttaaactttggaaaaaaattaaaacaccagttcctcaggtgaaccctatcctgaaataacagcacaggatatgaacgaggacacaaactttgtgaaaagttgtggttcagccatcgtaatgtagcagcctaaagggctgatatcaccttcaatctgccttaataaaaaagtagcacccgaattgttgttattcagatgaaacctgatgtttctattctactagtgaatatcactctgtaacaggccatagtcaaattggaatatattctaaggagaatgactaaaatgatgagaggattttaaactatgttttaagtcatgagctgtcttcaactatctgaagggataacatgcagaataattaaatatgtataatatggtccctaaaaagaaaactaagatcaatgtatgaaaattataaatgartggtctgtcattatgttgagctaacattc

SEQ ID NO: 597520 - DNA, 481 bp, Homo sapiens
ttttgtgtcttttatcacatgcatttgtaacttgcagaaatttgaagggatcttggtaacattttggactrataaaaccatctctgcttattatgcccctttgctagtttgtgaaaagtaggccataaattctacaagaaccacagacaagatactgtaaccccatagaaaactctgtctacagggacaatgctcccctctctatactgaaatgagtcatagagtgcctggctagcaaaagaacagagagcagtttgttgtctctagctgcatctttcccattcccccaaagcaggcatcacgagaagcattacaggtctaaaaataagcctcatgtgtgctataatatattgatctggatatgcctttaaggaggaaaataaaggcccctaggttgacgatgaaagacttaggcaatacaacttgcaatgaatctggcagcatctacttggcaattaactagctcatttgaccaatgaag

SEQ ID NO: 597521 - DNA, 481 bp, Homo sapiens
ttttgtgtcttttatcacatgcatttgtaacttgcagaaatttgaagggatcttggtaacattttggactaataaaaccatctctgcttattatgcccctttgctagtttgtgaaaagtaggccataaattctacaagaaccacagacaagatactgtaaccccatagaaaactctgtctacagggacaatgctcccctctctatactgaaatgagtcatagagtgcctggctagcaaaagaacagaragcagtttgttgtctctagctgcatctttcccattcccccaaagcaggcatcacgagaagcattacaggtctaaaaataagcctcatgtgtgctataatatattgatctggatatgcctttaaggaggaaaataaaggcccctaggttgacgatgaaagacttaggcaatacaacttgcaatgaatctggcagcatctacttggcaattaactagctcatttgaccaatgaag

SEQ ID NO: 597522 - DNA, 607 bp, Homo sapiens
atttcttattttgagaggtctaacctagtgttcagggaccatttgtgtctacccttttgtgtcttttatcacatgcatttgtaacttgcagaaatttgaagggatcttggtaacattttggactaataaaaccatctctgcttattatgcccctttgctagtttgtgaaaagtaggccataaattctacaagaaccacagacaagatactgtaaccccatagaaaactctgtctacagggacaatgctcccctctctatactgaaatgagtcatagagtgcctggctagcaaaagaacagagagcagtttgttgtctctagctgcatctttcccattcccccaaagcaggcatcacgagaagcattacaggtctaaaaataagcctcatgtgtgctataatatattgatctggatatgcctttaaggaggaaaataaaggcccctaggttgacgatgaawgacttaggcaatacaacttgcaatgaatctggcagcatctacttggcaattaactagctcatttgaccaatgaagatagcaaatccaaacatttcagaccactgtatctgttgtggggatgaagagatacggttaaaattttgaaga

SEQ ID NO: 597523 - DNA, 383 bp, Homo sapiens
tatattatatatgtatataatgctcaatgtataattttagtagacagtgcaaatttctggatcactattatgatcaccatagtctctggtggattcttactgaaaatgactcaacaacaaccatagattgctttggctgccacctgccaatgaattcaataatattaaaccaagctaaaatggaaaaaaaaaaaagtcaatttacgtaaggtaagacttcagcaactagagccattactctgtagcacatttctttggcaatgcatgaaattaaattaaacagaaaataaraacatattgatttttctataaattaaatacatgcttctgaaagtgttttatcttcactttgtgactgatccctactcattgctgcatctact

SEQ ID NO: 597524 - DNA, 596 bp, Homo sapiens
ggaatgctatgtctgtacaccaggaayaccaaggatcgccagctgctatcggaagccagaaaagacaaagaaggattcttccctaaaacctttagaaccttgccaaaaccttggttttggatttctggccttgatatttttgagaaaacaaatttctcttgttttaagccaccaagtttgtggtattttttatggcagtccctaggaaactaatgtaatgagctaaataaactcattgtttggtggtgtggtgattgaatgagtgactttgacattatgatattcttacttggtaccatagcacccttacattacttcatatattatactctgatcttccttctgcaagtgtagagacacatacgtaggcacagaaggcaagacacatgcacacatgaatgaagactgagaaaataataagtgaacaagtggataagaaggggtgataccatcaggaatggaaaaaatggcagaaaagagaaaagcaaagtaggatttttaaagcaacttttgaaactgggagggcagatgtttaaaagaatcaaagatctggaatagatatattaataaaggccaaaacctgtggcttatgatat

SEQ ID NO: 597525 - DNA, 601 bp, Homo sapiens
ccttggttttggatttctggccttgatatttttgagaaaacaaatttctcttgttttaagccaccaagtttgtggtattttttatggcagtccctaggaaactaatgtaatgagctaaataaactcattgtttggtggtgtggtgattgaatgagtgactttgacattatgatattcttacttggtaccatagcacccttacattacttcatatattataytctgatcttccttctgcaagtgtagagacacatacgtaggcacagaaggcaagacacatgcacacatgaatgaagactgagaaaataataagtgaacaagtggataagaaggggtgataccatcaggaatggaaaaaatggcagaaaagagaaaagcaaagtaggatttttaaagcaacttttgaaactgggagggcagatgtttaaaagaatcaaagatctggaatagatatattaataaaggccaaaacctgtggcttatgatattcccaatacacaagcgaattaataaatttaatgcagcaatcacagattaacccagggactttgaagtcattagagttatagcattttgttcttttatgatgcctgggttgaca

SEQ ID NO: 597526 - DNA, 472 bp, Homo sapiens
aacatcacagggtaattcaagcacatgtattttgggacatatgtattccagggccaacataaactataaactcattcactgaagcaagccaagacataattactaattgtttaaaaatttaaaagttattctagtttcagagaaataaaagtgctaaattattatgagatgtaagagagagaactaaagggaaaaaggagagaataagaaaaaggagacatttgttaagaaaaaaacgagagaaaagattggctgagactactcgccaccttaaaaatttgtggacttttcattcatgagaagttcacragaaacatgttatgtggtggaagattatatttctcattagtgctcaagtccttacagtacctgtttcacaaaggaaagatgaatcaacatggcttattacaaataatccctcaggggtggagcagtgggaggaaggccacttgaccttttgcattttctttat

SEQ ID NO: 597527 - DNA, 574 bp, Homo sapiens
ttggagagaatgaatcacagagaagggcacatctgagatagattttgtatagtaagcaggagcttgccaaacaagacattttaaataaaaaggaaaaaccagatctagaaagggtgagattgaagtctgaataaagcataaaattcatagcaaaaggagtgtaatgtcaagagatcggggttggaaagctaggttaagtgaactgatgttttactaatctatttggatttttacaggtaaaaagaccacgaacatttaaataagatgagtacatgatcaactttaygtatgtacattctgttcactatgaaagacagatggaatagctgtgggtaaggggatacaatatcgcagaccaaaacaccagttggaaatctacgtagtgatgctggtaacaaatgacaaggcactgaacaaaggcagtggaagtgacgatggagagtagaggtcaatttatgagaataacaaaggtggtgtgtgctaaaaatttgtttaaataattttttaaaaattagaaaaaatgtaaaataatatatgactacataagacacatgaagaaaaagaaggaaataag

SEQ ID NO: 597528 - DNA, 574 bp, Homo sapiens
ttggagagaatgaatcacagagaagggcacatctgagatagattttgtatagtaagcaggagcttgccaaacaagacattttaaataaaaaggaaaaaccagatctagaaagggtgagattgaagtctgaataaagcataaaattcatagcaaaaggagtgtaatgtcaagagatcggggttggaaagctaggttaagtgaactgatgttttactaatctatttggatttttacaggtaaaaagaccacgaacatttaaataagatgagtacatgatcaactttatrtatgtacattctgttcactatgaaagacagatggaatagctgtgggtaaggggatacaatatcgcagaccaaaacaccagttggaaatctacgtagtgatgctggtaacaaatgacaaggcactgaacaaaggcagtggaagtgacgatggagagtagaggtcaatttatgagaataacaaaggtggtgtgtgctaaaaatttgtttaaataattttttaaaaattagaaaaaatgtaaaataatatatgactacataagacacatgaagaaaaagaaggaaataag

SEQ ID NO: 597529 - DNA, 560 bp, Homo sapiens
ttgaaaccgtgtctcctaaaaatgcaaaaattagccaggtgtggtggcatgcacctgtattcccagctactcaggagactgagctgggaggattgcttgaacctgggaggcagaggttacagtgagccaagattgtgccattgcaagccagcctgagcaacagagtgagactctgtaccccaccccccacccccccaaaaataataattctgtggatactagcttaaatttatagatgaattagagttccattaactgataacagggaatttagaagaagaaccaragtaaagtggaagatgatgagtttcagctcaggacatgttgaatttgaggtaccctcaaatatctacatggagcagctgagtataccatttcagatttcaattatattaaatgtaaataaaaccaacactgtattaggagtgctctgtgagatcaggagaaaagtacaatcctggagaaaaacaatgtataaaagtgtgcatggagaaagaggagacaattatggaaattgagaaattgtgagagagttaggaagagaaacaagaaaatgaaaa

SEQ ID NO: 597530 - DNA, 490 bp, Homo sapiens
agcattacttcacacctaagtaacgtgttaacagcacagagtgtctctcccttggtggctaggctccagtgcctgtattttatggaggcaccatgcaccatcttgaaaagctggacagcttccagtagcattagggtttggaggaagagctgttgctccttaraactttacttctcttgggaatattattgtttcaatttattttaatgcaatgagtgggagagaaggtgggaataaaatgcctacacagaagcctctatctaacagtcctgctgggtggggcattacaaagagaggccacaggaaaacctttgagagtttggagcctgctgcgtgagagagataaaagtagaaacagcaattggctgcaatacgaatggcaggtgcatttgttcactggaggcaagtttggcaatttagttttcaatgaccagcttgtctctttaaggttcacctttcaaagtcctcctttttgccctcaacatacatc

SEQ ID NO: 597531 - DNA, 490 bp, Homo sapiens
agcattacttcacacctaagtaacgtgttaacagcacagagtgtctctcccttggtggctaggctccagtgcctgtattttatggaggcaccatgcaccatcttgaaaagctggacagcttccagtagcattagggtttggaggaagagctgttgctccttagaactttacttctcttgggaatattattgtttcaatttattttaaygcaatgagtgggagagaaggtgggaataaaatgcctacacagaagcctctatctaacagtcctgctgggtggggcattacaaagagaggccacaggaaaacctttgagagtttggagcctgctgcgtgagagagataaaagtagaaacagcaattggctgcaatacgaatggcaggtgcatttgttcactggaggcaagtttggcaatttagttttcaatgaccagcttgtctctttaaggttcacctttcaaagtcctcctttttgccctcaacatacatc

SEQ ID NO: 597532 - DNA, 589 bp, Homo sapiens
aagaaaaaacaaaaaacaaaaaaacccaggctgccatttctgaaaaagctttgtagcaaatgtcagacgttttgaaaataggatcattccatatacatgggttgcctgaggtaggcttcacaaaggttcttagctttaaaatggaatacataaataagcagtakggtattgaaggattatgagcagcataaagacagttattgaaaatgttcaaaaggatcgtctaacctaagcaagatgaaactccaaatataggcatgtagaataaaagagaagaaatttaactactttcttcaagtgcctctaaattctgcactttattatctttaccaatcatttattaatttttattatgagcattggtcctattttggggacaggtatttatttcctcaacataaaagtttatagaagatcacaatgaatgtctttgaagggaatgtggcaggaaacaagtagggaatgaaggcagtagtggtagtggttagaggtttcactgtcatattttggagagtcagcaaacctgggaaaagatgataagaaaaaaagtatataaccacagacagctcaaaaatatttttcattgggt

SEQ ID NO: 597533 - DNA, 422 bp, Homo sapiens
ggcagtagtggtagtggttagaggtttcactgtcatattttggagagtcagcaaacctgggaaaagatgataagaaaaaaagtayataaccacagacagctcaaaaatatttttcattgggtggaggtggtaaaaaaaaaaaaaaaaaaaaagcctaaaatggctgattaggtcagagtttttcaaatcatctccaattgcaaagcagtgagaaacaagccctgttttataaaaagtgagaattcttcataagttggatgttacttaggtgtctctgagaacagaatgtaaaaattaatgattatatgcctatcatttattgagcatatactatataacaggccttgttttaagaatgttttatttaattaccagattcttccttgagatgtagatattattatgcctactttacacataat

SEQ ID NO: 597534 - DNA, 609 bp, Homo sapiens
tctgtcctagctttaatgggatttactgggctttgctatctctgctttctgccaaacagaatcagaargcatcagtgttggtaatttaggagcagtttttggccacataagtggctgttagtagaatttatggacagtaaagcttgattcagggccagcctgtagcaaaaccagggagcaagccattcatcttcagtagtctctaccttcttaagtgtgccatttttcccagtgacaattagttgggaaataaactatttgaaaaattccagtaattaattgcaaggtgttggttgcatctgtcacctgttcctccaatgtcacccaacaaaagatatttgcctttcaaactctgtgtttgtagggtagttacaatggcgattacaatagggtggttacttacataatatggtggttacctttgctgactactcataaagttacaattttgttttgaatggatataagaggtctctagctgcctcatgtatgacgctacccatatgttcctggatcaattaaacatttttttctgaaggatagttctggatttataagaatctatttataatatgaattataagccctcagaaattagagaaaaatatg

SEQ ID NO: 597535 - DNA, 634 bp, Homo sapiens
aattatcttcatgtagagttgtctttcacttttatctgcgtagcatcttttcttcaaagaattgtagtcacttggtgtggctttttgtcatacaacttgacctcccttgatatggcattggtcatcaaactagtcaatcagattactatgtcccttagaaagagtacttggytaatgagtgagcattgactaaatcagagccagtcagattatttctttcaacaaactgaaatggctgaaaaaagaggaagagagaaggaaagggggaaagacagaggagagaggttggctcttttttcttctgagatctcatatattatctagtctggaatttccagggtcatctttcccattgtatgcagaagcacttaggtagagagaaaaacataattcttatgacgtcatttgaacttccagattcaatcatgcctgaaattaaacacccttgtgttttccagttacatgggggcatactttcccctttctacttaacttatttttatacatttttgccattgaatcattcactccaaaaaattaaaagaccatgacttgtggtttgaattcccttcagcttgaagtttggcactatatagtagctacacacacacacacacacacacacccacacaca

SEQ ID NO: 597536 - DNA, 634 bp, Homo sapiens
aattatcttcatgtagagttgtctttcacttttatctgcgtagcatcttttcttcaaagaattgtagtcacttggtgtggctttttgtcatacaacttgacctcccttgatatggcattggtcatcaaactagtcaatcagattactatgtcccttagaaagagtacttggctaatgagtgagcattgactaaatcagagccagtcagattatttctttcaacaaactgaaatggctgaaaaaagaggaagagagaaggaaagggggaaagacagaggagagaggttggctcttttttcttctgagatctcatatattatctagtctggaatttccagggtcatctttcccattgtatgcagaagcacttaggtagagagaaaaacataattcttatgacrtcatttgaacttccagattcaatcatgcctgaaattaaacacccttgtgttttccagttacatgggggcatactttcccctttctacttaacttatttttatacatttttgccattgaatcattcactccaaaaaattaaaagaccatgacttgtggtttgaattcccttcagcttgaagtttggcactatatagtagctacacacacacacacacacacacacccacacaca

SEQ ID NO: 597537 - DNA, 553 bp, Homo sapiens
tgggagttagatgccatacatttaatgtggtattatctacaatgaatatattttactttttaaataaagaaaggagtgaaggcagctttattatggaagcaaaacagggaaggtctgggttttatcttcacttctgatacaagctagctctttggtataggcaagtcattgtaacattttaatcctcagtttcctcctttgtaaagtaaagagcagtgggtctcccactagactcttgtgatccctagatgtttcatgtaacaccacaagaagtggaatatgagaggtggaatatgagatggaatgtgagatatccaacctgttttytaaaccagaggaacacttaacatatttgctctatctacaaagcttgaatgtcagtttccaagggtttctgtagtataaaattttgaaaaaaaaaaaaaaattaaaaagttttttaaaaatggggcttgataattcctaagtcctttttagttttaacactctttgaagttaatccccaagtcaaagtttctactagaaatatagtaatttactcacagaaaatagt

SEQ ID NO: 597538 - DNA, 640 bp, Homo sapiens
cttctccctctaacaaacaagagactgtcgttgtcatggccttttaaaaaatagaccttaagcgggtacattggggtgaaatgtaatataagatgtaaaatattaaggctaacttggatgttagcttttttaaaaatccccgtggttattgtgctggaatgaaggatagacctgaataaagaagagcctgaggtggttttcagtcaaattattaatctcacccaaaatgatcactatgcagctaatacatagttaactatarttacaataaataataataatgatatcaagaattgctaatactgcaccaagaactttgcctacgtattattttaattttcaggataatatatgatacgtattctatttttaaatgtattttaaacatagactacttggaatggtggcaaaaagtatttgaaggagtgagatgttgagagatgtggactctgtatttctgttttactaggccacgtacaaagtttctgattaagttattgcctctccccacccaaggttccaccatgtcttggagcattgatgtccaaactagttccccaagaacacatctaggctgattcacttctcttcaggcagagtgctctgggaatctgatgacacgtgtgtagggtaggagtgg

SEQ ID NO: 597539 - DNA, 604 bp, Homo sapiens
caatactaacattaatcaatagaaagagtagctatatttcagacaaagctgacttcagagcaaggagagttatcagggaggaagaggggcattacataataataaagtggtcaattcttcaggacgacataacaatcctcaacaggtatgtgcctaactacagggcatcaaaatatgtaaagcaaaaacttgtagaactgcatggagaaataggtaaatccactattacaattaaaggcttcaatagtcctctatcagaaatggacagatccagcaagcagaaattcagtaaggacatagttgacctcaaaacataatcaacaaaatataattgatatctatatactcttycattgtaacaacagcaaaatacacatttttctcaagctcacatagaatattcacaaagatgggccacattctgggttatacaatatgccttaacaaatttaaaagaagagaaatcatacaatgtctaagtttaggccacaatagaattgaactaaaaatcaataagagaaagataactggaaaattcagaaacacatggcaattgaacaacaaacatctacatagcacatgaatcaaagaagaaatctcaaga

SEQ ID NO: 597540 - DNA, 586 bp, Homo sapiens
tacagttattgttgaaaaggtttttccttaggggatggataacatcccttgatggtgttttgggaagctgatctgctggctattttgctgccttcttttccataagttttcctctatgagatctaagccctrgaagtcagattgttagtccttttgtttttctagcagcaactgcttccttgaactgtcatttcagtgccagcagtgtaatcttgatctttgatgttatgcaaaacatatcagccttttaaattgcctgatccaaatctcatttgccatgcgttttccaccctttgatccgtctctgcattgctgtttatcaatatcaaaaagacagctgaaaagtgggcaaattcaaaggtacccagcattgcttttggcctggaatctataaaatcaagtctttcacaggtctggtgtgttttctgtaactggacagcatgcatcacaagagcacgactctctattttgtttactgagtcatgtaaaggattgaatgaagtttgtcttgaaaataatgggtaactttcccctctaaccatagcacacagccacttagtcatccacatgagatccttttcaaaat

SEQ ID NO: 597541 - DNA, 615 bp, Homo sapiens
aaatcctgtgcccacaatttaccagtcatgtgacttcaggtgggaagctgctctgatccttagtctctttacaaaataggaaataaaaaccaattactcagttttcacattgaacctttaggagatttttagtattctgtagtacctaattttgaacatcagccctcactgcaaaatattaagaaataaacttagaaggttttggagattatatgcatgcctgaaatttttgcatttcaaaataactgttgtcactgcaggtatttttcatagtaattcccagaagccagaggtttttactataaaatgagaatgacagagaaaagagtggaatggctgaattcaatggtggtatatgtgtaacatttaagaaactgccaaattttccaagtgagtgttcaaattgcattactgcgctgacataatttggcatattttaattgtatagatccactctttattgccatcgccaaaattctgtatcttaagctttgttctgcattttgcaattgttctaagagtctgtttctcagacacacacccacgcgcgygcacacacacacaaacacacacgcacgcacgcacgcaagcaggcaagcaatacctcttgagtat

SEQ ID NO: 597542 - DNA, 540 bp, Homo sapiens
ctcagagtgtcatgaaaacctcaattatagcactgaaggagaggtagactttggttctgaagggaccagagaagaaggagcttctcagaggtgatcaacaatgtaaccatcaccatcccttgggttgtacaactggggaaactccctggcctggtaccaggagggaggtatggaatgctgcccctgaacccttgtgttagtctattctcatgctgctaataaagacatacctgagactgggaaatttataaaggaaagaggtttaatttactcacagttccacatggctagggaggcctcacaatcatggtggaaggcaaaggaggagcaaagtcacatcttacatggtggcaggcaagaaagcttgaacaggggaactcccatttataaaaccatcagatcttgagagacttaktcactaccgtgagaacagtatgggggaaaccaccccataattcaattatcttccacctggccccatccttgacatgtggggattattacaattcaaggtgagatttgggtggaaacacagccaaa

SEQ ID NO: 597543 - DNA, 471 bp, Homo sapiens
tttttctgttcctaaaggacatcaaataaatcacactgccttgcaccactacccagtcttctttcagtccttcaagagcttcatgcttttgggcttctgacttctcaccattgggtctccactgcatggacactctccacactcctyttcatgaggccagtgagtcttgttcaggtctcagggtaaatatctcttcctcagaggagccctgggaccacgtcaggttccccaatatgatgctcaaccattagagttaattgttaggttggttaaaaaaaaaaaaaagtaattgccattactttaaaaaaaaaaaaaaatggcaaaaactgcaattacttttgcaccaacctaatattcttgagtaactattctttccattagagtgtaagtttcatgagagactttgtcttgtttttagcaaaatgcctggaatacagcagtacgtactcaaaaatgtgtgtcaagtaccca

SEQ ID NO: 597544 - DNA, 603 bp, Homo sapiens
aggtctgttgctcaggctagaatgcaggggtgcaatcatagctcactgcagctttgaactcctagtttcaagacatcctcctgccttgacttcccaaagtgctaggaatacaggtgtgagccaccgtgcccagactattttatgtattttcaaattttatttttatttttatgtctttttaagagatggggtctcgcyatgttgcccaagctggcctcaaactcttggggctaagcaattttcccacctcagcctgccaagtagctgggactataggcatgctgttccatcatcctggttttttaaaaatttaatttgttaatattattaatatagtgttattccagagccaaaactacaggaggcacatcaagagaggactcagttttccattcttgtctcctccacgatgttccttctcctatacaagttttctaatttgtttttggtttatccatttagtgtttctttttataaatattagcaaacacaagtatctttatatcccccccccacaccctttctttcatccattttaatggtaaatagtctattggtgaatattgccgtttgagaatgactttttttttttttaaaccataa

SEQ ID NO: 597545 - DNA, 515 bp, Homo sapiens
agattccttgctgtctctgacttctaggggtaggcttatttttattttatgtggctccaagggtgcaggtaagtttcagggccctctctgtctggactattgcatcagtcacttacctgactccagcttgctgcctttcactcccttctttatttccagagtgatctttctaaatgcaaatctgagtctatcattcccygtctaaaaactgtgtatggcttcccatcctaatcaagataaaattcaggctcccttgtgtggcatacaatgttatctcagacttagttttccccatgttttccaggcttgtgtccagcttctctgtgccttgcagcagatattggacttctccacatccatggttccatgtacttaccgtgcagagtcacacctccaaacctgtgcttaactcgtttactcttctataacaccctatctacttttctgtgcttggttaactcctgctcattgttcaagactaatttcctttaggaagctgtatacattagaattca

SEQ ID NO: 597546 - DNA, 553 bp, Homo sapiens
ctttttctctctttgactttcaggagcccacttggatctcttccaagggatctttctttcttctcttattaaggcaggtgaggatgtcatttgatatgagcttttcattcatttgttaatttcacaaatatagagctcctctccacacaagatagcatggtgagatgagtaaracagagtccttgacttaaagatacatacaaatccccataccttttcgttcacattctcaggataattgcttagtttcctcaatgtgagtgactaattacagaaagggacatgaggccaggcaccatggctcacacctataatcccagcactttgggaggccaaggtgggtggatcacctaaggtcaggagttcgagaccagactgggcaacatggtgaaacccggctctactaaaaatacaatagccaggtgaggtggtgggcacctgtaatcctagctacttgggaggctgaggcactagaattgtttaaacccaggtggcaggggttgtggtgagctgagatcacgccactgccctccagcctgggcaacaaagtgaa

SEQ ID NO: 597547 - DNA, 611 bp, Homo sapiens
ttgtgaacacaacagcctattgtccataaactcctcaattattctccaaaagcaaattattttcaactctttcatctgttgtatttacctctacctctaaataacatgcttacagtcctacttcctgattgtaagcattacccactggcttcctacatggaagatgatgaacattcagctctctttcacctcccatcaagaccttgcttacatatttctcctatgcctgtcccrccaatattctcctctcacaacttgagtaggtctagtccatgttaatactatgaaggaaaacttggcagaatctaacaaaatggaaaaatgcacttaccaggcatcaataagaattcatgtttagctcaagagataacacaatcacatataaaaatatttataaatatatgtacatacatgagttagtccacacacatgcatctccttaatctgtcaactgagagggcctagaagcagtgacaccccaagtagcaataagcactctttgtgctcaactcttggtttctaataccactctcctttaaagacaaccagggctccttggagaaatggctcattataggattggaacagaaaatatacacaatgaacatgga

SEQ ID NO: 597548 - DNA, 594 bp, Homo sapiens
  misc_feature 391: n = A,T,C or G
ttttgaaatgtgaagatatgagatttgggagcggtcagaggtggaatgatatggtttggctctgtgtccccacccaaatctcatcttgtggctcccttaatttccatgtgttgtgggagggacctggtggtagatgattgaattatgggagtagatctttctgtgctgttcttgtgatagtggatgggtctcatgagatctgatggttttraaaatgggagttgccctgcacaagctctcttctcttgtctgccaccatgtgagatgtgctccaccatgattgtgaagcctcctcagccatgtgaaactataagtccagtaaacctctttcttttgtaaattgcccattctcaaatatgtctttatcagcagtgtgaaaatggactaatanagcatgatatgctgctggtccatgtaccactctttgagttagcatcatttttttcccccagatcctgtgcccaggagacatttaataaaggtgatgatggtaaaatatttttgttgtagtcgggactttagacaagaaaaattatattccaagtaggcctgaaatctaggatctttgcccaagtttattcattacatttcatc

SEQ ID NO: 597549 - DNA, 545 bp, Homo sapiens
ttgatgcatgccagtacctcttctactccatctgttatcctgacacatttccagccttgaatgggggcttttgggtctccaatcattcttcgtattactccttgacttaaatctggtttcacaacattctgtttctgtcctgggttgttacttgatcccaatgcctggatatttccttctttaacaagttcttcctggggatttctgaaattatgctctggattaatacagtcataatacatctttcagaaggaaaggcctgagtctcctatactccgtctacttgaattcatccagtttagggcctatagcatcaacttttcccattttaccagtttctttccttctgtcctagagaggcatgctcacgatcaatcatgcctgttatcattatcaaataaaataaagcgaaaaccctcaaagctctcccttaaatgtgaatcctctttattagcaatcatccagtcggtacytttatctccttatccaaacttgttggaaatggtctgcgtttgctgtctccactttcccattcactctgtaat

SEQ ID NO: 597550 - DNA, 604 bp, Homo sapiens
tcagcctcacttgtcaacagggaaatacaaattaaaataataaggtagtactttcacccattagaatggaaaaaaacttgacaatgttaagaattgacgaggaaatagaataattgatactttggtwtatttttggttatagtgtaaaatagtaaatctactttgaataacgggtcacttcttatcaagttaaacatgttgcttccttgtgacctagtaatttcactcctaggtgtttacccaggagaagtgaaagtgtatgtccatagaaagacttatattagaatattcatagcaactcttttcacaacagccaaaagttgggaacaacccaaatgctcatcaacagattaaaatgggtaaacaaattgtggtatactcatagaataccatatggtgatccggaggatgatgcgggcccacaatataggtaaatctcaaaacatgctgagcaaaacaagttaaatctcaaaacatgttgagcaaaacaagtcagacacaaacgactatgtaccttgtgattccatttcagtgtagttctaatactggtagaactaagctctaatgagagaaattaggaatgtagatggctgtgcctagaaaa

SEQ ID NO: 597551 - DNA, 524 bp, Homo sapiens
cctgtcatgaccccagatctccagaagtccttagctgcatgctagtggattctgttaatacattttccttacaatttcccaagagtgttgaactcaaaagacagggactttagtttaaggcaacataatttctccctttagctcacgacatgtaatatttattttaagggcaagttcccttaaaataaatattctcctaaatgtatacacattccctatgtcattttaatgtagtacatgctccttttaacactacagtcattgytttaaatcaataaaattggactaggtttgatccacacaaccccaaataccagttttggttaaaatacacacattttactcaaggttttctagataagttctagaacttatctagttagtagataagttagtagattacatatgaacaaacctactcctgcatagcaaactgaatatgtacaaaagacagtctatttgcatgcatcataagccttcaaaaataaaaatgaacatattaccttttacttttttactttcac

SEQ ID NO: 597552 - DNA, 579 bp, Homo sapiens
  misc_feature 140: n = A,T,C or G
cctgtagtcccagctactcgggaggctgaggcacaagaatgtattgaacccaggaggtggaggttatagtgcgccaagatcataccactgcactgtggcctggatgacacagcaagactctgtctcaaaacacaacacancaaaaacaaaacaaaacaaaacaaaacaaaacaaaacaaaacaccacgtaccactggacccctccccagaggctgagtttcaggaatggaggtgtctgggagtcttgggtaacttgcatttccagcaagttctcaggtcatgctgatccaggcccaggaaccacactttgagaaccaccagcttaaggagttatgtgggcatttttactttattctgaagataagcaaccaacctctctaacggaagtaatgtatgaaaactaatggctgtttctccattacttacccaggaattacctagcaagccatggccaccatccctcytaccctccacaattccaggtaggctacacttgactatcagttcaatcctgcaaatattatcatattccttatatcctattagattagaaaccagctttgatattaggataaaact

SEQ ID NO: 597553 - DNA, 559 bp, Homo sapiens
tggaatatgaaatacagtcacattccacataaaaaatagtacatccatgtaaacttgtgtgctgcttcctacacaagaatatcttgtttctgcgtattttcctttcccrtatgctttccttttgctttatggcaaaactagaaatattgatagacttgattttgccagtctatggacttcctatagaaggaatgagtaccccaaatcacttcctccacaaaacctttcactagcactattcttcctcttccctgtagccttgtgtgcttggctctgggcatgatgggtttgtactcatttgcttctttgtaggtcttctatcgcctttctccttatgagcctgtttcatattttaaaagataagggagggggagcacattttccatttttagctgtctactgtgactaagagtctgtggctggtaactaatttgtctggtaactgtctcttgacagttagatgcattttggtttaaatgccagtcttgcagagcttgagagaatgcatgctgctgtattcccaggtctaatttggtttcccagtcctaagccacacaac

SEQ ID NO: 597554 - DNA, 608 bp, Homo sapiens
tcccaggtcttatcctcactgttcaatctcccctttttgttcttgcctctgccttcaaactaaattagatgcaacaacagtctatgacctcaattccctcaagatggcaagtcttattctctcttcagccacattgcttctggctgcctaaatctaacacagccctggatattactggacaccaaaaccttcttcctttggctccaaaatgatttatgtctatccctttaatggaagccaatcatctctgatactcactaaaagtgtataatgacttctactctataatgacttctaccttatagggcctatcgccttgaacaaattattcaacccgctcaggttcagtttcccaatctataaaataaaagtwcctgcctcacagaatcgtgaggattcagtgaaattatgtgagtgacacaccaagaatagtgccaggcacataataagagttgtaaacatgcaggccgggcgcggtggctcacacctataatcccagcactttgggaggccgtggtgggtggatctcctgaggtcaggagttcaagaccagcctgaccaacatggtgaaaccccatctctactaaaaatacagaaaattagccagg

SEQ ID NO: 597555 - DNA, 587 bp, Homo sapiens
gtttaattttaggttccttattttttttwaaaggtatttaagaagttttcacctccattagtgccctcaggctacaggccttatagaaagccataatgactgatttacataagatcaaattcagtttaatgaagcatggcccattttctttcatcagtcaacatcaggagtgagttataattaagagcctgactctatttctaatgtttgtctgctgatgactttcaagtgtcaccatttgcccttctcctgtcccacatgtgagcacactaataagaaagctcgagtattccttcctttggccccagcaggaagttcagaccacataagcctgctccagtgagatgtcactttaccccagcccccaccgcccccatcacaataaaaaccaagccagtctcctttcccctgctttcacaaactattttcagacctgcctgagagcctgccttactcttcttagaaagcttcaatgtgtcagtaataaaccacaacagtttcaatattatattccgattctctactgagcttggagtcttacctaaaacttctacctcaaaagcaataattaaaatgaaagagtcctt

SEQ ID NO: 597556 - DNA, 587 bp, Homo sapiens
gtttaattttaggttccttattttttttaaaaggtatttaagaagttttcacctccattagtgccctcaggctacaggccttatagaaagccataatgactgatttacataagmtcaaattcagtttaatgaagcatggcccattttctttcatcagtcaacatcaggagtgagttataattaagagcctgactctatttctaatgtttgtctgctgatgactttcaagtgtcaccatttgcccttctcctgtcccacatgtgagcacactaataagaaagctcgagtattccttcctttggccccagcaggaagttcagaccacataagcctgctccagtgagatgtcactttaccccagcccccaccgcccccatcacaataaaaaccaagccagtctcctttcccctgctttcacaaactattttcagacctgcctgagagcctgccttactcttcttagaaagcttcaatgtgtcagtaataaaccacaacagtttcaatattatattccgattctctactgagcttggagtcttacctaaaacttctacctcaaaagcaataattaaaatgaaagagtcctt

SEQ ID NO: 597557 - DNA, 587 bp, Homo sapiens
gtttaattttaggttccttattttttttaaaaggtatttaagaagttttcacctccattagtgccctcaggctacaggccttatagaaagccataatgactgatttacataagatcaaattcagtttaatgaagcatggcccattttctttcatcagtcaacatcaggagtgagttataattaagagcctgactctatttctaatgtttgtctgctgatgactttcaagtgtcaccatttgcccttctcctgtcccacatgtgagcacactaataagaaagctygagtattccttcctttggccccagcaggaagttcagaccacataagcctgctccagtgagatgtcactttaccccagcccccaccgcccccatcacaataaaaaccaagccagtctcctttcccctgctttcacaaactattttcagacctgcctgagagcctgccttactcttcttagaaagcttcaatgtgtcagtaataaaccacaacagtttcaatattatattccgattctctactgagcttggagtcttacctaaaacttctacctcaaaagcaataattaaaatgaaagagtcctt

SEQ ID NO: 597558 - DNA, 587 bp, Homo sapiens
gtttaattttaggttccttattttttttaaaaggtatttaagaagttttcacctccattagtgccctcaggctacaggccttatagaaagccataatgactgatttacataagatcaaattcagtttaatgaagcatggcccattttctttcatcagtcaacatcaggagtgagttataattaagagcctgactctatttctaatgtttgtctgctgatgactttcaagtgtcaccatttgcccttctcctgtcccacatgtgagcacactaataagaaagctcgagtattccttcctttggccccagcaggaagttcagaccacataagcctgctccagtgagwtgtcactttaccccagcccccaccgcccccatcacaataaaaaccaagccagtctcctttcccctgctttcacaaactattttcagacctgcctgagagcctgccttactcttcttagaaagcttcaatgtgtcagtaataaaccacaacagtttcaatattatattccgattctctactgagcttggagtcttacctaaaacttctacctcaaaagcaataattaaaatgaaagagtcctt

SEQ ID NO: 597559 - DNA, 531 bp, Homo sapiens
ttgcctgttattggttttgttgtctgtgcttttgaggttattacccataaaatctttgcctagatyaaagtcctggagtgtttaccctatgtcttcttctagtagttttatagtttttatagttctctttaaaaaaatctgggataatttctgactcccctctttctttcacactatccttctgatccaacaacaatcctcttgtctctgtcttcaacataacttcagaccataacaacgtttccccacctccactgcttccctcctggtccaagccctcatcatctctggtctggattgcttaaataggcttttaatttgtctccttgcctctttccgtgctccttgtccttcactccagtcctttctcaccaaggctgtcctagttatctttttaatacattagttatattatgtttctcttcacctctaacccccacagtggtctctcatctcactgggaataaaaagtcacaaacatggaaatggctttgaaggttctatgtgatctggccttctgctccaattcta

SEQ ID NO: 597560 - DNA, 426 bp, Homo sapiens
agcagtggcaaggcatatcaaggagaagtacttagtacagtgctatgaagataaaaaattaatctaatggttagtttgatgtggtcagacaggtcagggagagcttctctagaaattggaattttgagcagcatggggaataaaaaaacttgcctggcaaaaatgagagcctatgtgctatctctgtggagggaggttgtctggcatgtagggagaagtgaaggaaggctaacraggctgcagtggagagagctcatggcagggtataacatgaaagggggtaccagggactaaaccaggctgggctctgtgtatcatgttaaggtgtttggtctttcccttcagagcaatggaaaatattaaagagttctaagcagaagtttccaaggtccaatgtgtattaattcctgtttaatgtcaattcca

SEQ ID NO: 597561 - DNA, 454 bp, Homo sapiens
aaaaaattattgaactattgaaaaagagacaatttatttgtgcttttcttagctcatgtgtgttagtcatctgtaagttgctcatacagaagaaaaaaaggtaagacctcagcattaaaataagcatagtctcaatattaaatctcttaaaagtcctggggtggttaaaacttttaattcttgaatgttagactgtaataagtttggctaatgctattttttttttgatgagagaattagatcattaatttctgtaaaactattttctgaactgcaccccaaattttatgccttttttggtataaagaaagtttaattctaaacaaaaatgaattaaggaaaatatgtaacagtatggtcatgatcacttgcttttaaatagtggaagagaatgtcatcacaagtcaaatttgcttraacaattacaattgctatagactgattctacttgaca

SEQ ID NO: 597562 - DNA, 316 bp, Homo sapiens
caaggatatgaatagatctcaaaaaaatatattgagtgaaaaaagacaaaaaagagaacacactgtatatattccatttttataaaatcctagaaaatgcaaactaatctatagacacagaaagtagatcagtggttgcctagggaggaggaatgattttctaaagggaatgggaaagagagattaygaagagacacaaggaaacatatggaaatgatggaaatgttcattattttgttgtggtgatggcttaataagttgtacagatgttaaatttgtacaccttaaatacatgcagtttaacatatgtaaatta

SEQ ID NO: 597563 - DNA, 589 bp, Homo sapiens
gttggatttaatttaatggactcttggaagtgaatgatgttttgaagaagaaaaaataggatcagatgctttaaggagattattctggcaagagaaaggagaggcaggaggtacggaaaacatcaggtggctatttcaggcaaaatgtactcaaagcctgagttaacgtgatggtaatgggaaagaaatgagttagaagattcaaggggcattgtggagctaggttctacatgtctaggcttctgactgtgattgcagagtaagaaataggagtcaaagtttactacaaggtctctaacttaaatgaattgaataattactgccattaatggaaaaataattaatgacattaataaaaaaagtcttgttttaaagaacacgatgagttccattttatatatatatatttttttaagtcacccagagatagcttatcgcctctattttatagatggtagttaacatggtaactaagattcaaaggtaaaagtgattatgtyagatataacttacatgacacccctgatactccaggccccatttgtctcttgagccattatccaattgagacagttgaatcttcactttg

SEQ ID NO: 597564 - DNA, 414 bp, Homo sapiens
tgatcttaggctatggccatctcagtcagggcagggtagttgaccatgaccggaccagcaggcggggcccctcctagaactgcactggttttgtcagagttagaaaatsaaccacacagcaaagtgtatgagaacagaaacaactgctgagcagaaagttttgctctgaggtctgacttgtcctactgatctcatcaaaaagtttgccatatgtcctgtaggtattcaagagtgacaaaacaatgtatccaaacatggaagttacacaagtcagggaaagaagaggaggaaaacaacaacagtggttaggatcagtcttgatacctctttcacaatgttctacatattcttgagatgaaaatacgattcttctaagggatagctaatgtaataacttataagtgaatatggatt

SEQ ID NO: 597565 - DNA, 576 bp, Homo sapiens
tgccatgggctcatgaagtggtgtcacccagatacaggagccagcctgacagtctcactgaacagggatgygttaatacaacatcaacaaggataatgactgcaatggattagaagactcagggtacatcaaaagccatgaaacagtcagaaatgaacatgtggccattattacctaccttagagaaataaaaggattataagacaatactatgagcaattatatgtcaacaaattcagaagcttagatgaaacaaattcctagtaaaacacaaactacaataactgacacaagaagaaatagaacatttgaacagacttataacaaggaaagagactgaattctaatcagaacctcccaccaaagaagactagaggacaaggtggcttcactggtaaacagcacaaacatttaaacaaacacccaaaattatttgctttgtaatggtcttctagttttttaggtatgtataccctgaaatagtaccttgaaggagaagaggaaaggaatctaacaaattcaaaatatactacatgatgaagttttataactaacatctccatattcttcacaatt

SEQ ID NO: 597566 - DNA, 587 bp, Homo sapiens
tttcagatccaaggaagtctgattttattgacacttgagataaagctcaaggcctgtcttaattgagctttccagttatttataatgcatacatatttactattcattgtctttatacttagtgaggttcaatgtgattagtaataaagatgtggttataactttataaaattaacaaccccagaatattcatattgtaatcaggagatggcatccactcggaagcttttttctgtgcacctctcatccygtcgtcctttcttaaaaatgtattactcttcctgggcttcgtgtcatccttcctccatatttctgctggatcttcaggactggctcaggtatggccacagattggccccagcagggtctgcagaagtaaactttacctcctaggccaggccctatttttcttacttcaccaaatactaagtatcggtataaaaaaaaaaaacaaaaacaacctggccacttgcctaagtcgtccctaaatcaggaagctgttcttaatgtgaagaggcctttagggaaccctgttgttttctcatcccttacctcttatataaaagtccgtgttgaggcctgaagat

SEQ ID NO: 597567 - DNA, 594 bp, Homo sapiens
gggttattttatttaatattcatcacattcaccttgtgaatgacagcataaaggattaaaaaaaagttacatacctgttgttatataattagcaagcagcaacacataaaagatttaaactcaactctgattcttgagcccagatttttccactacttccagtatttcctatacttgaataatgtgcaaacttcttgaaaaaaaatcctaaggattctctctcattggaggatctctccaaaaatccaagtatgagaaatactgatttaagaaattaaagttttaacctatggaaatgcctttcaatatgaatattgctacacaagagaagttttagatttttaatgcggtaagctgacttgttaaaagattccctcratataaaaacacaaactatacaaatctcacctcttcatgaatttgtctgcagagttgggtttataggcagtgacagaacccagggactatctctacccctgtagtagacactatggagcatagtccagatcctgctttcagaacaaagacccttattcccctgagaaccagaagtgtccagtgctgagagttcacaactgattccttccccaagaa

SEQ ID NO: 597568 - DNA, 576 bp, Homo sapiens
gtgtttctgttctttgggaagaagtatcactttggagtctcctagccttttagatagaggagctaaaaaaatagacttaacagaaaaattaagattactgtatgttctgatgttagtacaaataagtattatggtttataaataaatctggggttagactttccttctcagagatggtataattaagttagatgtctttttttagacaatcacacatgcaattatacagatgggaagtagcttttgaatcagaatgaacgagttcccaacagagtatagrggattcttactaaatctttccttagggcaaaggctcctttctttctgttagaaagaaaggcttagaagtataattatacttggtaaaaagttccaattggttgatacgataattttcttattctttcatattcttagtttcctcatctataaaatagtgatcataatatctctaataaagctgttgtaagaattaaatggaataatctaagctgattttagcacagttcttggcaaatggtaagtacaacgtaactatcagtgttatcactcttcttcctctgtcatattattatc

SEQ ID NO: 597569 - DNA, 560 bp, Homo sapiens
agaaatatccgttttggtggtgcagattgctggtgaggaggatggcataaaggctgaccttggagatggcagctccttgatcatggcgggtgaagcagctgctttggaagtgcatttctgcggtaggatcttgkgagttattcctggaccctctgtgcaaagtttactaagttagctgtcctaattactctgtaagccttttttaaatacctgggaactgtagcaatccattttcatttaaataagtcaatatgaattttatcctttataactgagccttaacttacacattggtttctcccagttacaacgttcagtgttgaaattccatggcacaacttcattttttgcatcttttctgtatcttgtgttggccacatgccacttccctccttaaatatttcctgatttccctagctaatgtgcactctcttttctttgatccactaagtttttgttgtttgtttgtttgatggtttttgtcatattctgctttgatttcaagttactcttactttattcaaattcaagctctttgagggattataaaattaaaatat

SEQ ID NO: 597570 - DNA, 428 bp, Homo sapiens
atcctaacctatttggtaggatggtgccaagcatcaatcttgatgctctaaagctcatggaatcttacacattcctgtgtcttttacaactaccaatgtgttggtgactatgaagtctatggctttggcccawtctctttcttgagctccagatcaacacatttaattgcctataggtaagtccacaaagactacaaacttagcatgtcagaaactaaattgaactcatcatttcctaatatactcctcccaaaaacatcctgattctatctctattatccattttagtaggtgatagacgtaattatccacctgatttctcaagaccaaaagaaacaaaaagccaaaagaacttggagtcatcttaagagtcctactacttcaaatcttatatctattgtttcaaatctgaggaaacataaatcaca

SEQ ID NO: 597571 - DNA, 602 bp, Homo sapiens
ataaacattttccaaaaaatgaagtaaaaagtaacttgagagagggtactcttttctaatttgtacaaaagttccacatgggctatcagcagccttgggtttccctgattctagactttctctctaagctattcatgcatttctgccrtggtgatctttccaagtgcaaactttattgtggttttccttcaataaagtacaaacatctacatatctgcttcagcctacctgctgatgtgtactccctatgcttcagccatcctgagcttcttacattactcaaatgtatcattgcacatatttcacatgtgcaattctctcagctattgattccaatccactccatccctactgcattctatctgaaaaattcataatcttccttctagaccagcacaagtgtttctttctttgaaggctctctgctacctccttctctaccctggaaaagccacctattctcatttatgccttcaaccaacctctatgtcaattgatcacactgcattacaattatttttttaattcatctcttatagtaagccaggagctccttggtttagtataatcatgcactatttaacttttcatttcctatggtg

SEQ ID NO: 597572 - DNA, 590 bp, Homo sapiens
gttcattgctctgcttcctcccttctaatagaaacacgatttcatatggacagcaaaatgcctatttgaaaagattctcctccttggatgtcctgcagctagagtggcacgtgagcagacattttatgtctagtacttcctygaaagctagtgttttcctggcaaagagctctttggtgtcttttgccctttcttcctgtttaaaatccaaccttgaagcttgcgtgtgaagtagccaccttgcagccatggggataagaggcctgcactgtgctgctgcatatggccacactggttgtgcacagtgactatagagttgaatcagtcagggtcctggcaggatacagacagctccctccaatagggtaatggtggagactttttaaaaaggcactaattgaaaaggtgtaatcactgtcagggaaacatggttaagagatgatgcagtaccctggggctagcaatagcagggagttattaccaccccaaactctgaagggcaacaagagagagtggtttccaggacctggagagaggatatggagagggtggccagcaagagcggccctcccactgggatacagccaacc

SEQ ID NO: 597573 - DNA, 590 bp, Homo sapiens
gttcattgctctgcttcctcccttctaatagaaacacgatttcatatggacagcaaaatgcctatttgaaaagattctcctccttggatgtcctgcagctagagtggcacgtgagcagacattttatgtctagtacttccttgaaagctagtgttttcckggcaaagagctctttggtgtcttttgccctttcttcctgtttaaaatccaaccttgaagcttgcgtgtgaagtagccaccttgcagccatggggataagaggcctgcactgtgctgctgcatatggccacactggttgtgcacagtgactatagagttgaatcagtcagggtcctggcaggatacagacagctccctccaatagggtaatggtggagactttttaaaaaggcactaattgaaaaggtgtaatcactgtcagggaaacatggttaagagatgatgcagtaccctggggctagcaatagcagggagttattaccaccccaaactctgaagggcaacaagagagagtggtttccaggacctggagagaggatatggagagggtggccagcaagagcggccctcccactgggatacagccaacc

SEQ ID NO: 597574 - DNA, 590 bp, Homo sapiens
gttcattgctctgcttcctcccttctaatagaaacacgatttcatatggacagcaaaatgcctatttgaaaagattctcctccttggatgtcctgcagctagagtggcacgtgagcagacattttatgtctagtacttccttgaaagctagtgttttcctggcaaagagctctttggtgtcttttgccctttcttcctgtttaaaatccaaccttgaagcttgcgtgtgaagtagccaccttgcagccatggggataagaggccygcactgtgctgctgcatatggccacactggttgtgcacagtgactatagagttgaatcagtcagggtcctggcaggatacagacagctccctccaatagggtaatggtggagactttttaaaaaggcactaattgaaaaggtgtaatcactgtcagggaaacatggttaagagatgatgcagtaccctggggctagcaatagcagggagttattaccaccccaaactctgaagggcaacaagagagagtggtttccaggacctggagagaggatatggagagggtggccagcaagagcggccctcccactgggatacagccaacc

SEQ ID NO: 597575 - DNA, 604 bp, Homo sapiens
agatgcaagtaaccattttataaattcaaagtcagttctcaaggagggtaatatggtgtgagctggggtaacagggtctggggaaaagatcacaagtaactcaaaattgcagttaaaacttttcaaaaagagaacataatgtaaatatagttgtaattacatctaatatttagaaacacacttattgctctatagccaaaaataatacaagttccatagtttggaaatattgaacatcatataaattgcttgatgagaaacaaccaaaaggataatatgagaaaataattatggttgcttaacatcttaggtgaaatctggtgttttggaaacatgacaatgggaccaaggacttcaacatctactatgcaaatctacatctacgcctacattcaactacgacagacaatttcaagcagaacrgccctccccgcagaaccactagagaagctgaaggagatacctgagaaactatttaaagacatcagatagatacccagcaaccaggatttcaagaggcaagattccagagagaagggaagctttgagaagtgaaccctaccttctcctgttgcctttcccccttaaagtgtttgctgattct

SEQ ID NO: 597576 - DNA, 561 bp, Homo sapiens
taatatcactgactgatgaaaatgctctttctggaaatgaggaactaacagtcaaaattaaggtaagtgtaaggcagtttttctttcttttaaaggaaaaggaatccttaaaggtagaggatccctatcagtcaagataggctagattattttgcagtggcaaaaaaaccccaagtctcagtggcttgaaagtcatcaaactatggccaaatctaacttgacttgtttttctaagtagttttattggaatgcagccatgcccatttgtttattatctgtgactgcttctgtgcttcaacagcagagtcaagttgttttaacagagaacataartctcccaaagcctaaaatatttactgtgtggccctttacagaaaaagtttgccagcccctggcttaaatcattgatcacaggctgcctgtggtctttgctctgcctcatcctcaggctgggacagaggcgtgggcagccacctggagtgtgtagccggttgccatggtgcagagcaagcttagagggtctcatactattataattaaaggctcagcctgaaaacagag

SEQ ID NO: 597577 - DNA, 580 bp, Homo sapiens
ttgctcaggctggtctccaactcctggcttcaagtagtcctcccaccttggcctctgaaagtgttgggattacaggtgtgagccactgtgcctggctccatttgtatttgcacttatgttttatttttattttttgagacacagtctcactctgtcacccaggctggagtgcagtggcacaatctgagctcactgcaacctctgccttccgggttcaagcaaatctcatgcttcagcctcctgagtagctgggattacaggcatacaccaccatgcgtggctaagtttttctattttttagtagatatggtgtttcactgtgttggccaggctggtcttgaactcctggcctcaagtgatccrcccgcctctgcctcccaaagtgctggggttacaggcatgagccactgtgcctggcccatttgtatttttaacatcagttaattgtcactacaattttgaaggtgttatttctgttttcagatgagaaacaggttgagaagagtgaagttgatttctcaaagtcacatagcttagtgagacgatttgaggatctgaagcccaagctttctgtttggta

SEQ ID NO: 597578 - DNA, 555 bp, Homo sapiens
tgagcactaacttaagccaaaaatactgctctctgccaaaaagttccccctggacagaatgaaggacaaatgcacactggagaaatgtggcagaaaggcttatcaactgtaccttcttcatcaatgctccatccttgcagtttctttaggaattatctgctccattatttggattcattgtaccaactggtgcctgagccaaagcattaaaatgttggctatgggaaactatttggtgcctaacaaaaatagtaaacatcacaatgctggcagaatggaacagaaatgatactgccttcgtccattccataagcagctctgatcaagccacgcctattcctagaagaaaggaaatgtctgctttcctaatgccatgactcagaattccatttcaaataaggattgttttagccaagtgtatcagcttacctctccccaagtgggacagctgygagtgaccagcacactagtcacaagagaagtatcgggagattacatggagtgtcacaatggggatattacagagaataccgccatgttttacttgaacgtagg

SEQ ID NO: 597579 - DNA, 578 bp, Homo sapiens
agtgactgctatattggtcagcacagatatagatcatttccctcattgctgaaaatcccattcctgccacctagataaaaatgtagaaaatgtgaaaatttctgaatatttaaaatggaaaataatatgatgaaaatggatattggcataggctaggcattaaaagcattaactattttattattttgtataatgcctagttcaatgttttacaagggaagcctattgaataagactttagctttgtagacaggccacctgagttcaggttctgccttcaccattttctgcgtgatcttaacctaggctttgtttccttaactataaaatagttttaatgaatttcttaagatgatcattaagctcgaatgaaataatgcttgtaaaagtatttagcacaatgtctgacacatatragttgttaatataaacataaggcattattgcaattatttggagaaatgtaattattagctccaaagtactaattgcagaatacgtgcataaacaccaacacaatataacactttattaaataaattggacttgttaaaaagcaaacagaaagcacagataca

SEQ ID NO: 597580 - DNA, 603 bp, Homo sapiens
caggttcaacatacagaaggccatcaaatatgttaatttcttttcaagaatatttaaaataatcttgaagaatactttacaaggaagaatgtctaaaaatataagaaacattaaagaaaagaaagaatctggagagtcttacagggagttagccatttaaaagagctcattagcatttcataacctttccagttaacaaggtgctgttctgaagattctatcattatatgatacacaagttgcaattaatgaaatatggagaaatgaaaactctattagaaaattgccagttagcaggacagggattgtaattattcctcaaataattgtaatttgaggaaaagcattaataattaaaaggtcaagatggtccaccccttargaacctaagtagcagggagtttataatgcaaattatagtttttattaggtatgtgaggggaaaacttcacctctgagcacaaaaactctaaaagaggacagactatcttttttacttacctgaacagtttcctattcttcttttgtttggtctagacattaccatcacctttctaagacgttcattgaatgttataggtcccaagaataaaaaaagtgtaa

SEQ ID NO: 597581 - DNA, 539 bp, Homo sapiens
aaggcagcaagcaaaccatgaggtaagaacaactaagataaaggaaaatctgaaactaaaggtcagagagaataaaagaataatccaaacaagctaaagtgatagaaaagagagtaaacaatgatttcaaagtccaggaggttaacyagtcaatattgactaaattaaaaatcagtagcacaagttccaaagatcaactgagagagtctctttagctaaggcccaaaagccgcaaataagttttttcttctgtggcctgggatccacgggcagctgtcccctcagcaggttaggggcctgactttcactccgcacctcttctctctgattctggtatcttctctcctgggttcagttgcagacaggctcctgagtctctaccacaggaatgtctgtgctagccatctttctcagctgtgactctaccctctggctgttactgatagaggagagggaagcacttggcccaagttggatcaatcagagtctcttttttgaaatctggatttgttatcaagactcactcatttagggatggc

SEQ ID NO: 597582 - DNA, 552 bp, Homo sapiens
tgttcatgaccatatcatactgcagcaagctatgcctgatgtgtacattacctagcaatttggctttctcacatctatcacccctgtgttactccagatgcaaattggagagaacttccatttacctgttcttctattttcacaacttggcattcacttgccctggctcccatgtctgattaaggagcagacaccaggcgagcacagcwagctgatgcaatgggtagagctgctgctcaccaggaaatgaaagaattcctttccataactgtcagacaagggaagggaagggccatgctcagctggtcctagcccattcctgtgtggtgggtcacacccttcttgcagatggcaaggcctactctcttcctcatctgccacatctaccttttcttcagagacacttctcaagatacttgtgtagttttcattggctacaccagccttctctgatctttgacttccctggtttctccagcatgttttgccaggttctgttctccatgaacacctacctgatcactttgaaggttgtctcagttagaatgcatc

SEQ ID NO: 597583 - DNA, 501 bp, Homo sapiens
tttgccaggttctgttctccatgaacrcctacctgatcactttgaaggttgtctcagttagaatgcatccagttaccatatcagaaaacacaaattaaactggcttatgccataaagaagatttgttggctcacataactggaaattcagaagtgtataggtgtcaggattggtttgatccagtcacaaaattgcatcaccaaggacttggtttctgtccttttctctgatactcagtggtgagtgatgcagctttgtgccaaagctgctatgcttttgtcccaacatggctgccaacaactcccaggtctacacccactgcctgaaaaacctgttactatttgacccaaaacctcaggcaaatgctccctcctgccttgcagcccaaatatttgtcttgggccagatggtaaaaatactctgattttttaggccctaagagcatgctttatgtgtggagccagcctggagtcagcatcccctgtcctcttggtttgcctc

SEQ ID NO: 597584 - DNA, 349 bp, Homo sapiens
gtgacctcgggcaagttcctaatttctctgtgcccgtttcctctctgataaagcaatgtgatgggcatatatctggtatratctagccttgttcacttaggcagacttgtttccttccatccagtagttcgcactgtcatttgttcagtgcatttgttcattcttgctcttacccattcacaccattcgttactacattcattcaggcatcagttcatttgttcctgcatttgtcaatgcattaattcacacacacatctgggcatgatcaaccccactgttcagcctttttccagcctgtgggcagacagaccaggccccagaaagggctctgaacatggctggtaga

SEQ ID NO: 597585 - DNA, 486 bp, Homo sapiens
cacctggctcctccctgacgcacttctttctgtttctgcccttcaggctttgtgtctgtctgaatctgcgtctgtttctctgtgttttatatttggaactcaggagcgaatgacgatactttatagagatgaatggaggtgggaacagagatgtcctgggggcaggaccccagttgggggtcacacagctaatgacagtcagagacagaattcaaacccattaattaacacactaattcatgtaatgaatgtttatcaaagtgcagttctgtgccacagcttggaaggcctgaatttartaaaatccaacattatctaagggtgtcgtgtgaactgacttggcacctgtgcatgggggcattgcctggcctgttgcccaggctggagagcagtggcacaatcctagctccctgcagcctcgacctcctgggctcgagtgaccctcctgcgtcagcctgtgttgacttggtaagtgtgggtttcctt

SEQ ID NO: 597586 - DNA, 550 bp, Homo sapiens
caaacaaacaaacaaactataggaaactacagaaacaacaacccaaccttacagagtattattcaacatatttggtgggtactgaagaccgagaactttctaaagttgaaatgttgtraagttgtcactttgtaaagaaagaaagagtcagtagggcctgtaccagtagggatggaggtggcctttgtccctgatccccccgggaatcctcctgcactcccaggaagggtggtgacgaaggtctctgtgactggccactgtagtggagctgggggctgcacgatagcattgacccccttggatttgtcttggctgcctggagataatggtttttcccccaaagcccttgcattctccagaagggaccttgtctagttgtcccctgctggtccccaggctcagcatggtgccaagtagtgtgcagtggacgaatgaataagtgcaaaatcctttaccttttccctgacactcactcaagtacgcatgcagggcaggggctatatagcaaattgtacaaggtttacacagcacccacttaggactggaactc

SEQ ID NO: 597587 - DNA, 550 bp, Homo sapiens
caaacaaacaaacaaactataggaaactacagaaacaacaacccaaccttacagagtattattcaacatatttggtgggtactgaagaccgagaactttctaaagttgaaatgttgtaaagttgtcactttgtaaagaaagaaagagtcagtagggcctgtaccagtagggatggaggtggcctttgtccctgatccccccgggaatcctcctgcactcccaggaagggtggtgacgaaggtctctgtgactggccactgtagtggagctgggggctgcacgatagcattgacccccttggatttgtcttggctgcctggagataatggtttttcccccaaagcccttgcattctccagaagggaccttgtctagttgtcccctgctggtccccaggctcagcatggtgccaagtagtgtgcagtggacgaatgaataagtgcaaaatcctttaccttttccctgacactcactcaagtacgcaygcagggcaggggctatatagcaaattgtacaaggtttacacagcacccacttaggactggaactc

SEQ ID NO: 597588 - DNA, 577 bp, Homo sapiens
agaacttgccacctttatgtccagtgcccctgggctggacagagaggccacgttctctgccactgcagctctgtgcgcttcacggaggggtgaggaggccggtgggggcagggtgggagttgtagcccctcctcagtgtcagaactgagttgttctcctcacctcaggggtgtgaaccccagcttctaaaagcaggaggcccccatggcccatcccrcccagagagtggctgaagggcctagcctggcctggccgagacttctctgttgccaacctggccccgaggcctccaggaagtgaggcttttattttgagcctagagcatcagcctggaaccaggacttcgctctgagctcactgtgaggcgagcgttggtttcccaggggaccccaccctgccaagggaagtggcacaaagcaccccctaatgaggcaggaagcaaagccatgagctgcactgcctcagccctgcacaggggctgcttgggacaaggcacccgtcccccagcctcaatttcctccctggtcaagtgggattcagtaactaccatttgtggcactggaaaaatggcagctgc

SEQ ID NO: 597589 - DNA, 517 bp, Homo sapiens
tgaggcgagcgttggtttcccaggggaccccaccctgccaagggaagtggcacaaagcaccccctaatgaggcaggaagcaaagccatgagctgcactgcctcagccctgcacaggggctgcttgggacaaggcacccgtcccccagcctcaatttcctccctggtcaagtgggattcagtaactaccatttgtggcacyggaaaaatggcagctgccacgggggcctccattttacagatgaggaaacaggctcaggagggcaagtgactctgcagcctgtgttagataaagaacccgagcccaggtgtctgctccaggtggaggcagggaaggcagccttcctggcagccatgggatgggggagggggtcagctctgccatccccagagccttgttctgagaagcacagagcccatgtgtaaagagctgatttcaattttacctgcaaaatcagaaaaatatgggactcatgttagaacctgtctctcaagactggcgcgaggttgacacgagag

SEQ ID NO: 597590 - DNA, 585 bp, Homo sapiens
gccaactgctgccatttactgaggcctgctgcgtattcagcacatggatgacgccaaatcacagtttactaagaggaacgtcttgccgtttcctgaatgcgtctcatgcacactggcctctgctcatgccctttcctctgcctggaacactttttccattgctctttcggggaatcttcttcaagatccacctcctctgagaagcccgccctgacccctacggttggaccctgagctctgggtgtkgacccagagccctgtgtgctgggtccctgggagtcgtgccctctggcctggatgctcgtttgggtcttgacccagcctgattcatcttcatgatcccgtggaacctggcacaggaggtgccagccaatctctatttgatttttgcaaaccttttcttgatgtataatttacctacagaaaagcacagctatcttaagtgcacaccttggtgggcttctacaaggtgaacacacccatgtgacctccacccaaactaagaaatcagaccagcacccagaggcccctagagcccccgcctcgccactgccccgcccccactgacttctgcctgtctatgta

SEQ ID NO: 597591 - DNA, 478 bp, Homo sapiens
gtgtgttcccccagccaactgctgccatttactgaggcctgctgcgtattcagcacatggatgacgccaaatcacagtttactaagaggaacgtcttgccgtttcctgaatgcgtctcatgcacactggcctctgctcatgccctttcctctgcctggaacactttttccattgctctttcggggaatcttcttcaagatccacctcctctgagaagcccgccctgacccctacggttggaccctgagctctgggtgttgacccagagccctgtgtgctgggtccctgggagtcgtgccctctggcctggatgctcgtttgggtcttgacccagcctgattcatcttcatgatcccgtggaacctggcacaggaggtgccagccaatctctatttgatttttgcaaaccttttcttgatgtataatttacctayagaaaagcacagctatcttaagtgcacaccttggtgggcttcta

SEQ ID NO: 597592 - DNA, 552 bp, Homo sapiens
ggaacctggcacaggaggtgccagccaatctctatttgatttttgcaaaccttttcttgatgtataatttacctacagaaaagcacagctatcttaagtgcacaccttggtgggcttctacaaggtgaacacacccatgtgacctccacccaaactaagaaatcagaccagcacccagaggcccctagagcccccgcctcgccactgccccgcccccactgacttctgcctgtctatgtagttctataatacatacatctgtagaattacgtagaaatgaaattctgcagcgcgtgttcttttgtgagcacttctttctcccaacgttatgtttgggagcttcgtctgtgtggttgcgggtagctaactcattttttccattgctgtgtatactccattgtatgaatctaccacaatgcatttgcctgttttcctgcaaaataacatttggattgattccagcttggggctgtyacaaataaggcagccatggccaccaggctccgtgctgggtgtccacacacaggcacctgtgctgctcagttgatcttt

SEQ ID NO: 597593 - DNA, 470 bp, Homo sapiens
agatctgcttcccaggctggcgcaccggcccatccccagctggcaggtgtcagctgcccatgggccacacctatgctcttctytagaagatcattttggctgacagggaccacctaatccactaatacctgggaggttacattccctcccctaggggcagcttgaaaccaatgactgatgcaggggaactcgccctaggtgagactgcctctgtggtcatttgcaaatattaccacacattctttgagacgcctcccttctaaaggtggtgtttatttcctctccccttgagtgtgggctggacttagcaactcacttctaactaacagaatgtggcagaagtgatagaagtcttaaaagacactgcctttcctccttgcttatctcttacatcactcccgcaggggaagccagcagccatgtcaggagagcactcaagcagcactactacaagtccacaggatgaggaa

SEQ ID NO: 597594 - DNA, 496 bp, Homo sapiens
caggctggcgcaccggcccatccccagctggcaggtgtcagctgcccatgggccacacctatgctcttctttagaagatcattttggctgacagggaccacctaatccactaatacctgggaggttacattccctcccctaggggcagcttgaaaccaatgactgatgcaggggaactcgccctaggtgagactgcctctgtggtcatttgcaaatattaccacacattctttgagacgcctcccttctaaaggtggtgtttatttcctctccccttgagtgtgggctggacttagcaackcacttctaactaacagaatgtggcagaagtgatagaagtcttaaaagacactgcctttcctccttgcttatctcttacatcactcccgcaggggaagccagcagccatgtcaggagagcactcaagcagcactactacaagtccacaggatgaggaattaggcaaagagcccacgccctgtgagtgagccaccag

SEQ ID NO: 597595 - DNA, 419 bp, Homo sapiens
gaaaagcatacaaatactggtgaacgttaaaccttgttaaattaagtaggcatcttaaagcagctaggataaccacttggagaatagataggtctattctcctattatcctatagaccgaagtcctgaccagcataaagtacgttccacaagtatcaaaggatttgtacacagtctcagatcacaaaacgattaggttacaaatgaatttagaaagcaaaaaatgcttatgtggttagaaattacaacatattcctcaacacttcaaaataaaagtagaaataataatggaaacrtttaaatacacagaaaaacaataatgttgctacaaaacattaaaatttgttggatgcagtaaaagtgatatttagaagattatagccctaaatgctcacactagaaaagaaaagcactcaaaat

SEQ ID NO: 597596 - DNA, 419 bp, Homo sapiens
gaaaagcatacaaatactggtgaacgttaaaccttgttaaattaagtaggcatcttaaagcagctaggataaccacttggagaatagataggtctattctcctattatcctatagaccgaagtcctgaccagcataaagtacgttccacaagtatcaaaggatttgtacacagtctcagatcacaaaacgattaggttacaaatgaatttagaaagcaaaaaatgcttatgtggttagaaattacaacatattcctcaacacttcaaaataaaagtagaaataataatggaaacatttaaatacacagaaaaacaataatgttgctacaaaacattaaaatttgttggatgcagtaaaagygatatttagaagattatagccctaaatgctcacactagaaaagaaaagcactcaaaat

SEQ ID NO: 597597 - DNA, 596 bp, Homo sapiens
aaaacctacctacattgtacattatgacacaaagctcatagctttccatttgaaatcaggaacaacacaagggtacctgctagtatcactgctaggaaagttagaaagaaaaaaattaaaggtataaggagcaaaaagaaacaaacctgtcactatttggttgtctatgtggaaaatgtgaaataatctacagataagtaaacaataaagaagtttaacatgtttactggatacaaaatcaatatatatattgaattaaatttccatgcatcagtaaattaaaaaaacaccatatacaacagaaaaaaaaaagcaagtataaaatatctagcaatgactccagtaaaagttacagaagctgtttccagagaaaatgaatactacrtacacaacctgtttagcacagaccttggcatgttgtagctcttggtttgtgcgtccttctttttccactcccttacagttcaggcatttattattgtcaatctgaagtggaaaaacactaccaatatgtcacaataatttctgtttatcagatgtcattgacatgttactttaaaaagaaagcttaacatttgcttcatacttttgagttt

SEQ ID NO: 597598 - DNA, 677 bp, Homo sapiens
cctctttgtgtctggttctttttgcaaagtggcctcagtttctcccactgcacctgggcatgccccatgaggccagggcaggtgatcccaagcatctactttgagctccatgactccaaaggcaaaaggaagtgtctcccatcaactccagcagaaaatcccagggaagcctggattggcccatcctgaaccagttactrtggcttagggatgcaggactctgattggccaggcctaggtcacatgcccacccctgtgatgtaagtgggctagagtggggcggaagagctgtaattgacagaataaacatggaaagaccattaccagatgaaggaggaggctcggtaaacagggtgaaaatcagcaacaaatagccagcaaacacataaagaaaaaccaaacagatgttctaggtataagcactcatttgttctttaggacaccactgttatcacctataacaggaactttcttggaccattcctgcaagacactgtcagaactccccttgtgcatccccctagaattctgcacttacctttgtcacagcccttgtcagctggtacaagcgtatctcccacactgaactgcaactcctgagggcagaggtctttctgagccaccagcctagcataagggaggtgctagcaatggctggtagttgaacaacttaatgc

SEQ ID NO: 597599 - DNA, 512 bp, Homo sapiens
atctgtcaggactccaggccacagcaacagaccccagtccagcagctgaggcctttagaagtgggatgattggccccagtgctgaacaagaggctctgatgtaaaagaaaagtctgccagaatcagatcttagtgccccgggattttctctctacccatctttcctctttgtgtctggttctttttgcaaagtggcctcagtttctcccactgcacctgggcatgccccatgaggccagggcaggtgatcccaagcatctactttgagctccatgactccaaaggcaaaaggaagtgtctcccatcaactccagcagaaaatcccagggaagcctggattggcccatcctgaaccagttactgtggcttagggatgcaggactctgattggccaggcytaggtcacatgcccacccctgtgatgtaagtgggctagagtggggcggaagagctgtaattgacagaataaacatggaaagaccattaccagatgaaggaggaggctcggtaaa

SEQ ID NO: 597600 - DNA, 677 bp, Homo sapiens
cctctttgtgtctggttctttttgcaaagtggcctcagtttctcccactgcacctgggcatgccccatgaggccagggcaggtgatcccaagcatctactttgagctccatgactccaaaggcaaaaggaagtgtctcccatcaactccagcagaaaatcccagggaagcctggattggcccatcctgaaccagttactgtggcttagggatgcaggactctgattggccaggcctaggtcacatgcccacccctgtgatgtaagtgggctagagtggggcggaagagctgtaattgacagaataaacatggaaagaccattaccagatgaaggaggaggctcggtaaacagggtgaaaatcagcaacaaatagccagcaaacacataaagaaaaaccaaacagatgttctaggtataagcactcatttgttctttaggacaccactgttatcacctataacaggaactttcttggaccaytcctgcaagacactgtcagaactccccttgtgcatccccctagaattctgcacttacctttgtcacagcccttgtcagctggtacaagcgtatctcccacactgaactgcaactcctgagggcagaggtctttctgagccaccagcctagcataagggaggtgctagcaatggctggtagttgaacaacttaatgc

SEQ ID NO: 597601 - DNA, 579 bp, Homo sapiens
ccttgtctattcccaaggatggtaatcagcacatgtgctagacttcacatctgtgtccacaccccagccccgtgcactgagcccagactcatatacccagctkcctcctggataccggccctgggtgacccctgggaccctcagactctgagccagatgtgcctagggtgggtagggcaagagctggtggggcaggagctagctccaacctagagaccaggttctgacttctgctcctgaaaatgttccctgcataagctctagaaatgttttatcaaatgtagaaaaatggaaagggagatctcaggggatggagaggaactgacagcagagtaggaagtgagtgtgggaactggggtagcagctgccatgcttcaggctgtgttagcaaggttaacactcttgaaaccatccttataatctttataacattaatcagggaagacgagagggaaagaaagaaaaataaactgagcctgcagcatgttcagccttaacctgctaggtcagctgccctctgacctgcttccttgaagttgtttgctgcttggtgcctcagaatcacatggaccctgttac

SEQ ID NO: 597602 - DNA, 583 bp, Homo sapiens
gagtacaatgcaaggagttgtataaagctgggagcattaaagggctgaacctcagtgatagagtataccagaaaaatagtttattcccaagatctgggaaacaaaaggggagcttgtcagtttctgcttggcctatgagaggacagagaacctccttgggttatagtgactacaggrtttacttgtggctttaatttatattacagatttttttttttgacagtgtcttgttctgtcacccaggctggagttgcaatggcgtgatctcctctcaccacaacctcctcctcctgggttcaagagattctcctgcttcagcatcccgagtagctgggattataggtatgtgccaccacacctagctaattttttgtattttcagtagagacggggtttcaccatgttggccaggctggtctcaaactcccgaccttgtgatctgcctgcctcccaaagtgctgggattacaggtgtgtgccaccgtgcccagcctacagagttttttttgtaaactcccaaactaggcaatttacctataattggttataggctggtgaaacttctgaggcatctggtagaagcc

SEQ ID NO: 597603 - DNA, 408 bp, Homo sapiens
cttctcactgcctaggaatccttctgtctctttgtttttggcctctttggatttcataattttgtgccagttcattgatgcctttaaaaggattaaaaagaactttatccagcattgaggttgtttgcatggggagagttgtttagggtatctggttgaccacactgccaagaacagaagttcaggtgggacatctgagctgggctttgaaggatggatgggagttttccaagtaaagaarggagtggggagaaagcgaagcctggaaagggaatagcagggtgaaaatgaggcatgggggcaggaaactacacagcgtcttctggaaagggcaaatgggtcgagacttgtcttatagcaggtgctcagaaagggtttgtggttatctgactgtgagtgcatttggct

SEQ ID NO: 597604 - DNA, 614 bp, Homo sapiens
gtctatttttatttatatatttgttgcatgtagatgtccagctcgtctcgcactatttgttgaaaagttgatctttgcttcattgtattgcctttgcttcttcaacagatatcaattgactatattagtatgggtctacttctgggctctctattctgttccactgattattttcccattttttcaccaaccccacactgtcttgattactgttttgattacatgacttacttcatgtaggtcataaagctgtgttgtgtcagtcctccaattttgtacttcttcaatattctgttggcaatttaggtcttttgactcttcatataaagtttaaaattagtttgttgatatccacaaaataacttcctggattttgattgagattgctctttctaaaaaaaattatttggctcctctgcttctccctyccctatgcccaaacttgcaatataaataagaattattcttcaatattacacttgtttcttctatctgtggcagggatataaactctcgtgaaactgggagagggagtggtcttgtgaaacaaataatgatttataaattttatggtaaaattatgaatttggcaaataataagttgttatatgtaa

SEQ ID NO: 597605 - DNA, 614 bp, Homo sapiens
gtctatttttatttatatatttgttgcatgtagatgtccagctcgtctcgcactatttgttgaaaagttgatctttgcttcattgtattgcctttgcttcttcaacagatatcaattgactatattagtatgggtctacttctgggctctctattctgttccactgattattttcccattttttcaccaaccccacactgtcttgattactgttttgattacatgacttacttcatgtaggtcataaagctgtgttgtgtcagtcctccaattttgtacttcttcaatattctgttggcaatttaggtcttttgactcttcatataaagtttaaaattagtttgttgatatccacaaaataacttcctggattttgattgagattgctctttctaaaaaaaattatttggctcctctgcttctcccttccctatgcccaaacttgcaatataaataagaattattcttcaatattacacttgtttcttctatctgtggcagggatataaactctcrtgaaactgggagagggagtggtcttgtgaaacaaataatgatttataaattttatggtaaaattatgaatttggcaaataataagttgttatatgtaa

SEQ ID NO: 597606 - DNA, 583 bp, Homo sapiens
  misc_feature 550: n = A,T,C or G
agtgaataatgcagtggcacattcactgtttccccataaactgataatgcattctcttcctattaactggaaaaagaaaaaatatgtatcataatattccttcaaaatattcagcaacatggtcctatgtagacaatcttactgtgcatttacaacatggtcatcatgttatgagtaactattgaaactataagatayagcattgcaaaaacagtttatctggatttcttttatttatttactttctgagatagggtctcactctgtcaccccggctggagcgcactaaagcaaccatagctcacttccgctttgaccttcctggttcaagagatgctctcacctcagcctccagagtataatttatttagaattctaataagccaggtccttcatctgttactgagagttgtagtaattaaaagtcatgataccagtgattaccatgagagctattacctgtttttgtgcacttaatatgtgccaagtgtggtgcttagtattttcctagagcctatcactcaaaattcacaataatcttgcaatgtangtgctgcagataaagaaattaagacatctagag

SEQ ID NO: 597607 - DNA, 622 bp, Homo sapiens
taatatattcataataagaataaaggtattatatgatcatagctaacatttatctaatatttaaccatgtactaggcattattccttcttttagtctagctaagtgactttcctcttagcaaaagaattgctgtgtacatgagatatggagtaaaagtacacgtatatgtaacacaaaaccatatagaccatgttttggggccaagtatgctacattaagaattttttcaccgtgcatttttttcatgtcacaagttgactttggaagctactcaaacaaaactgygtctcaaatataaactgaaaattattaagggtcactgaaataactgaagataaaagacaataaaaataattatgaaaacacttaaatgtacatattacttatttctcagttcttgaaaaatgcatgtaaaacggcatggctcacatctgtaatcccagcactttgggaggccaaggcaggtggatcacgtgaggtcaggagttcgagaccagcctgaccaatatggtgaaaccccatctctagtaaaaatacaaaattaattttgtaatcccagctacttgggaggctgaggcaggagaaatgcttgaacccgggaggcagaatttgcagtcagct

SEQ ID NO: 597608 - DNA, 620 bp, Homo sapiens
atatattcataataagaataaaggtattatatgatcatagctaacatttatctaatatttaaccatgtactaggcattattccttcttttagtctagctaagtgactttcctcttagcaaaagaattgctgtgtacatgagatatggagtaaaagtacacgtatatgtaacacaaaaccatatagaccatgttttggggccaagtatgctacattaagaattttttcaccatgcatttttttcatgtcacaagttgactttggaagctactcaaacaaaactgtgtctcaaatataaactgaaaattattaagggtcactgaaataactgaagataaaagacaataaaaataattatgaaaacacttaaatgtacatattacttatttctcagttcttgaaaaatgcatgtaaaacggcatggctcacatctgtaatcccagcactttgggaggccaaggcaggtggatcacgtgaggtcaggagttcgagaccagcctgascaatatggtgaaaccccatctctagtaaaaatacaaaattaattttgtaatcccagctacttgggaggctgaggcaggagaaatgcttgaacccgggaggcagaatttgcagtcagct

SEQ ID NO: 597609 - DNA, 622 bp, Homo sapiens
taatatattcataataagaataaaggtattatatgatcatagctaacatttatctaatatttaaccatgtactaggcattattccttcttttagtctagctaagtgactttcctcttagcaaaagaattgctgtgtacatgagatatggagtaaaagtacacgtatatgtaacacaaaaccatatagaccatgttttggggccaagtatgctacattaagaattttttcaccgtgcatttttttcatgtcacaagttgactttggaagctactcaaacaaaactgtgtctcaaatataaactgaaaattattaagggtcactgaaataactgaagataaaagacaataaaaataattatgaaaacacttaaatgtacatattacttatttctcagttcttgaaaaatgcatgtaaaacggcatggctcacatctgtaatcccagcactttgggaggccaaggcaggtggatcacgtgaggtcaggagttcgagaccagcctgaccaatatggtgaaaccccatctctagtaaaaatacaaaattaattttgtaatcccagctacttgggaggctgaggcaggagaaatgcttgaacccrggaggcagaatttgcagtcagct

SEQ ID NO: 597610 - DNA, 618 bp, Homo sapiens
  misc_feature 335, 356, 359, 377: n = A,T,C or G
taatccagttctttaagggaattctggaatttccaaagactaggacagatcatctgtttctggctgccttttatcaaaaagtccagaagcatttgatcactttttacctggagttggctctttactccctccccaaacacactgtgacttagttattctaaagctaatgttgggttgaaatggcacagcactgccttaagggtattcattcttccattcatacacgatctctatagtaaacacagtacttcccaggtagagtaccatcctggccggttgaggtataaaaagatagccattcacttctctctcaaatacaaaagtttaaaaagttntccctctgcatgtccattggntgnttgtctctactgataagngtccatactacttcagtatctcacagtatcttcatgttttaggttactggttcacctcttttctttcatgcttcagctttcaagcaaatgactttggtggcacaccaccaacctattagggtgtaccttatttctctgtctctaggggaatctcctgaacacagaatataaggtgmagcctgtgtgctttcagccctatttttcctcaagggctgacttgtttggatgcctgggctttctt

SEQ ID NO: 597611 - DNA, 505 bp, Homo sapiens
gtaattagtagtctatgtgaaaataaacagttttgaatataagttgttttggaacatcatgctgacaaataaacgtataatttgtgattgctacttacatacaacagctcattatgttttaaaataataaaatatagtaaatatgctaaaaaccactgtaaaccacaactctatagtatctacatgggagtggtttagttccagctttcaaaaatattatggaaggaaattctgtggcaatcactttgtgtttaatatgcatgtcatcaattttattcagccatttactctgagaaagaaaagttgataaacatccacacatccttacaagtatgtgatacacatgtaacgttatgtagacaagaaatagtgcagtgagttaacatttactgagcctgttcacyggctcagtatcacatatgtgtggaatatattgacaaattagcttgctcttaggtgtttagtcttagaaaatggtactggagtcttagctttcttaactaaa

SEQ ID NO: 597612 - DNA, 548 bp, Homo sapiens
tggttgaatctaaattacccacatcctaacattctaagactcacacatgcaacaatctcagtctgtatggatgctttcackgggacttatttgcaaaatacaagatccagttttatgttaagtaggtgggttgctaatctgcaagaatgccattctttatcaggcctttatgaattgtttgtaagtaccagctgtacaatgaaagctttatattcattctgcaattagccaaaataattctagttaaactctggttaagacttctagtatgaaatgaatgtaaactattcattctttatcgttctttctggtttcattttggcacatgtatttgttaaaatataatcctctaagttgctttttcactgcttttcatgttgcagattgaaaatgttgatgtctgccttagttttctagcagccagaggggtaaatgttcaaggtctatctgctgaaggtaagaaaaagaatgactgaattgtcacaaatggcatcaatgtttttaaattattttttataatgtaagaaatgtaacattggagtatacgt

SEQ ID NO: 597613 - DNA, 630 bp, Homo sapiens
catggcaccaggggtgacacagcttgttcattgccattgctacccaccaaggctgctgtctgatgagtgcccgaaggtaggattcctgtcatayataacttgacttattttaacctatcctcacatcttctgtgccctttttgcttttctgtgccagctctatacatccttcctgtcctgatttcaagtgctctctaggatcacttctttcttccagaaaattccatatggctcttgggaaattataaaaaaaaagtatgctttcctatactgttgtggtcaatgttgtcctttgtgattccattctcaggtccaaatgctactttgaaactcagtccagagaggtaacctcttaaatctgttctagggctccttttccttccaattctcttccctatactagtttttctttttgtgggaaaaacacttacttcactgatcacctttccctaaggtatgatttctggttgcactttatatgcttagtcttttgctgctttttaagatgtagaagtccagttattatcatagaaacccttggtcttcaacacaattcctgttatgtcttagaagaacccatttaactttacaaagccagtaatttgaacataccagggagcagtgcttata

SEQ ID NO: 597614 - DNA, 541 bp, Homo sapiens
ctttttgcttttctgtgccagctctatacatccttcctgtcctgatttcaagtgctctctaggatcacttctttcttccagaaaattccatatggctcttgggaaattatwaaaaaaaagtatgctttcctatactgttgtggtcaatgttgtcctttgtgattccattctcaggtccaaatgctactttgaaactcagtccagagaggtaacctcttaaatctgttctagggctccttttccttccaattctcttccctatactagtttttctttttgtgggaaaaacacttacttcactgatcacctttccctaaggtatgatttctggttgcactttatatgcttagtcttttgctgctttttaagatgtagaagtccagttattatcatagaaacccttggtcttcaacacaattcctgttatgtcttagaagaacccatttaactttacaaagccagtaatttgaacataccagggagcagtgcttatagaaatgtaatgctactgcttgaatgttgaaggaaaacaataatgttt

SEQ ID NO: 597615 - DNA, 541 bp, Homo sapiens
ctttttgcttttctgtgccagctctatacatccttcctgtcctgatttcaagtgctctctaggatcacttctttcttccagaaaattccatatggctcttgggaaattatawaaaaaaagtatgctttcctatactgttgtggtcaatgttgtcctttgtgattccattctcaggtccaaatgctactttgaaactcagtccagagaggtaacctcttaaatctgttctagggctccttttccttccaattctcttccctatactagtttttctttttgtgggaaaaacacttacttcactgatcacctttccctaaggtatgatttctggttgcactttatatgcttagtcttttgctgctttttaagatgtagaagtccagttattatcatagaaacccttggtcttcaacacaattcctgttatgtcttagaagaacccatttaactttacaaagccagtaatttgaacataccagggagcagtgcttatagaaatgtaatgctactgcttgaatgttgaaggaaaacaataatgttt

SEQ ID NO: 597616 - DNA, 541 bp, Homo sapiens
ctttttgcttttctgtgccagctctatacatccttcctgtcctgatttcaagtgctctctaggatcacttctttcttccagaaaattccatatggctcttgggaaattataaaaaaaaagtatgctttcctatactgttgtggtcaatgttgtcctttgtgattccattctcaggtccaaatgctactttgaaactcagtccagagaggtaacctcttaaatctgttctagggctccttttccttccaattctcttccctatactagtttttctttttgtgggaaaaacacttacttcactgatcacctttccctaagrtatgatttctggttgcactttatatgcttagtcttttgctgctttttaagatgtagaagtccagttattatcatagaaacccttggtcttcaacacaattcctgttatgtcttagaagaacccatttaactttacaaagccagtaatttgaacataccagggagcagtgcttatagaaatgtaatgctactgcttgaatgttgaaggaaaacaataatgttt

SEQ ID NO: 597617 - DNA, 575 bp, Homo sapiens
taaatctgttctagggctccttttccttccaattctcttccctatactagtttttctttttgtgggaaaaacacttacttcactgatcacctttccctaaggtatgatttctggttgcactttatatgcttagtcttttgctgctttttaagatgtagaagtccagttattatcatagaaacccttggtcttcaacacaattcctgttatgtcttagaagaacccatttaactttacaaagccagtaatttgaacataccagggagcagtgcttatagaaatgtaatgctactgcttgaatgttgaaggaaaacaataatgttttaaataagtacagggttaaaattagctcagctaatatttttaaatcctctgattatattcataatatcttctaatcaggttacagatyagtgtgtttttattcaaacagacttttaacttcaatgaagaggcagtctttcccctatcacttctccctacttcttcgattatttaggattccttaaaaataagttactttatcccattgaaacacatatacctctatgtagtgtatggaataacaaaaatag

SEQ ID NO: 597618 - DNA, 594 bp, Homo sapiens
atccagaatagcttccctttgaatccaacatttgtcttcagcattttattgtctctsttttccctcaccccatctcactttttccttctctctgttcaacagatttacactgactgggccaaccactacctagcaaaatcaggccacaagcggctgatcaaggacttgcaacaagacattgcagatggagtactcctagcagaaatcatccagattattggtaagcccttccttctgaaagaaagcatgaaagtctctgctcccatctctttggtaaagcacaacttaagttaagcgccttactgaactggtccatgtgtctctgagattcatgtagctctcccctgatttaattaaaatgtttatatgaggatgtttgaaaaaggcagtttggccatacttttaaataactagaactgtatctttatatacataaacttgctaacctttattgaatcatttgaatcgaactgtcagaaatgaatgcttcattaaaccatatgtctcccatgtgtgtatttcgttagctggagcaactcatacactctgagatgccttgaaactgtatcctgatccagcagggacaattgtgaa

SEQ ID NO: 597619 - DNA, 661 bp, Homo sapiens
tactttgccctgacttgctggggtagtccacgtattagagcttcagctactgcatcttccctaaggattagcagtccacatctgtgattctgttcctcaacaatagtctcactctctcaacactctttccctttcctgactcctatacctctatcacakaaatatttatatttcctagagtgaaaaacctcaggtttcttctcctgtgacttcatgcagacctcctgtaagattccattcttgtccatggtttcaaatattacctattttttcagtatattctaaccaatactcttttctgaccttcagaaacacatgtctaatagccttaagtttcctccaaattgatgttttaatagatacatcaagttccacatgttaaaatatgaattcatcaccttcctccctccacctttttaagaaatttttttctgcttctataataataatcttgtttaatggtaattacttacccattcaggctaaaaaattggggccattttaagctccctgtactctccgtcacccacattcaactggacaccaacacttacttactttataatccccataaagcatctagggtgatcttttaaagtatttatattggatcataccacagcccagctttaaacatcttccaaagtcttcctgagttaga

SEQ ID NO: 597620 - DNA, 661 bp, Homo sapiens
tactttgccctgacttgctggggtagtccacgtattagagcttcagctactgcatcttccctaaggattagcagtccacatctgtgattctgttcctcaacaatagtctcactctctcaacactctttccctttcctgactcctatacctctatcacataaatatttatatttcctagagtgaaaaacctcaggtttcttctcctgtgacttcatgcagacctcctgtaagattccattcttgtccatggtttcaaatattacctattttttcagtatattctaaccaatactcwtttctgaccttcagaaacacatgtctaatagccttaagtttcctccaaattgatgttttaatagatacatcaagttccacatgttaaaatatgaattcatcaccttcctccctccacctttttaagaaatttttttctgcttctataataataatcttgtttaatggtaattacttacccattcaggctaaaaaattggggccattttaagctccctgtactctccgtcacccacattcaactggacaccaacacttacttactttataatccccataaagcatctagggtgatcttttaaagtatttatattggatcataccacagcccagctttaaacatcttccaaagtcttcctgagttaga

SEQ ID NO: 597621 - DNA, 551 bp, Homo sapiens
  misc_feature 221, 271, 281, 283: n = A,T,C or G
tttaaaattgcttctctctctctacaatacccatacattttcagtggcaccatattaccttctttgttggtataaaaaataaaaagagaaacactaaaatttttcaaggtgtttggccaagtactgccttgtatcctcataaaaatatatcattttaaccctatcatttccactagatttttcatctttcacgttagaaattgtaactctcattttaactncaaggaaaaggaatttagctatgagaaaacttatcataagacaatctttnccaagtcggntncaaactggagttcttaacaacggcatgatttttcctgctctaatatattcatttactaatagtcacaatttgttggttattccaggctgccaacgtttatgtaagtatggctacttctyggtttcaggatttttaagtgaatggttcctaccttggctaatccttgttcttgaacatttctatgaataatgaaaatagaattttgaactgcatctctatgacttcatgaactatttcacagtcggtattgccttaactgaggaacatt

SEQ ID NO: 597622 - DNA, 576 bp, Homo sapiens
  misc_feature 5, 55, 65, 67: n = A,T,C or G
aactncaaggaaaaggaatttagctatgagaaaacttatcataagacaatctttnccaagtcggntncaaactggagttcttaacaacggcatgatttttcctgctctaatatattcatttactaatagtcacaatttgttggttattccaggctgccaacgtttatgtaagtatggctacttctcggtttcaggatttttaagtgaatggttcctaccttggctaatccttgttcttgaacatttctatgaataatgaaaatagaattttgaactgcatctctatgacttcatgaactatttcacagtcggtattgycttaactgaggaacatttattagtctcaaaaattccaagttaaaatttgagtaaatattaacatttttagaatttcatatcttgaatatgcatatcctcaggcactagatttatgatgaccaaaagacgtttctcattttttcctcaaaatagttaccctagctttaaagttaagcctttgacaaagtctgttgaatatttcacataccactagacttaaatttcagcttctctactggcagatgagccttaagatag

SEQ ID NO: 597623 - DNA, 621 bp, Homo sapiens
taattcatgcacagtgctttgaccactgcctagcacatcagaagagctgaggaaaggttggctggtgtatcagatgctattggtgtctagctctacagtccccttcccccctctgggtttaactgcagctctggaggacagttctagagaacatccatggcctccctgatccccgattccacctcaagagcctgcagggccatgtccaaagcatcaagaattttatcacattgtgcctagatgcagataggaaattggggagtactgtagytgtacgtaaatgccccgcctcgtgtcttcccattggaggtgcattctagagggtttctcagatggtctctgtcaggactgatttgagctacccacaagggtaatgagctaatatcatgcactgtgtaggcatttatcctttctgcctgtctctttccctgcttgtgaaatcatatgccaaatatactgattacacttaagtctttgtaatcctgcttttaggatgacttggggtgggggaaaactaaattaagagaactattttaattgttgtgattgttattgttaatatgaatatttttattatgatctatgattattattatctattctagatatttagaaattatt

SEQ ID NO: 597624 - DNA, 621 bp, Homo sapiens
taattcatgcacagtgctttgaccactgcctagcacatcagaagagctgaggaaaggttggctggtgtatcagatgctattggtgtctagctctacagtccccttcccccctctgggtttaactgcagctctggaggacagttctagagaacatccatggcctccctgatccccgattccacctcaagagcctgcagggccatgtccaaagcatcaagaattttatcacattgtgcctagatgcagataggaaattggggagtactgtagttgtacgtaaatgccccgcctcgtgtcttcccattggaggtgcattctagagggtttctcagatggtctctgtcaggactgatttgagctacccacaagggtaatgagctaatatcatgcactgtgtaggcatttatcctttctgcctgtctctttccctrcttgtgaaatcatatgccaaatatactgattacacttaagtctttgtaatcctgcttttaggatgacttggggtgggggaaaactaaattaagagaactattttaattgttgtgattgttattgttaatatgaatatttttattatgatctatgattattattatctattctagatatttagaaattatt

SEQ ID NO: 597625 - DNA, 453 bp, Homo sapiens
ttctggacagacaagaacctaagtctgaacatctaaaaggctcacaaagaatcaagcaaatttattgaaagagaccaatacttattagacctatcttcgtgaactgaagatcgagaaaaaaattccaagaggcatttggacagaaaagcatgttgactccacaggaacaaaaatcaaactgcattcaaaattctcctctgcaatgtctaatagcaggagaaataaaatagtaccaacagagcttcaagggaaaaagactgcattctaagaawcctatatttaggaagttgttcaagtgaaagggtaatggaagaaatgttcttagatgtgcaactcactgttataaccttttaaacaaagccctcgaagacctgatttaactgacagtgaatgaatctaaatacagagctgtgggatgtgagagtcacatcagtgaccactgaaacaagtata

SEQ ID NO: 597626 - DNA, 632 bp, Homo sapiens
ctggtcctccttcctgcctattccatagaggagctgtttttctttctgaaagagatcaattcctcacatgtgctttagaccccatctcctttctccttcgcaggaatcttataatttaggtggttctgtatctcctgaatatccaatctcttttcaacctcatcaattgcttcwaattgtaaacattaagcaaattatattcagctttcaaaaaaaaagggaggaaatcctgtcatttgggacaacatggatgaaactagaggacgttatggaaaatgaaataaagcagacatggaaagaaaaatactacatgatctgacttacatgtggagtgtgaaaaagaactcagaagcaggaagtagaatggtggttaccaggggtcttaaggggttggagggttgggaagatgttggtcaaaggacacaacatttcaggaggaataagttcaagagagctattgtttcacacgggaactatggttaataacaatgtattgcattcttggaaattgccaagagagtagattttaagcgttctcacaacaaaaatgattagtatgtgaggtaatgcatatgttactcagcttaatgtagccattccacagtatgtacaagtttcaaagcaacatgttg

SEQ ID NO: 597627 - DNA, 632 bp, Homo sapiens
ctggtcctccttcctgcctattccatagaggagctgtttttctttctgaaagagatcaattcctcacatgtgctttagaccccatctcctttctccttcgcaggaatcttataatttaggtggttctgtatctcctgaatatccaatctcttttcaacctcatcaattgcttcaaattgtaaacattaagcaaattatattcagctttcaaaaaaaaagggaggaaatcctgtcatttgggacaacatggatgaaactagaggaygttatggaaaatgaaataaagcagacatggaaagaaaaatactacatgatctgacttacatgtggagtgtgaaaaagaactcagaagcaggaagtagaatggtggttaccaggggtcttaaggggttggagggttgggaagatgttggtcaaaggacacaacatttcaggaggaataagttcaagagagctattgtttcacacgggaactatggttaataacaatgtattgcattcttggaaattgccaagagagtagattttaagcgttctcacaacaaaaatgattagtatgtgaggtaatgcatatgttactcagcttaatgtagccattccacagtatgtacaagtttcaaagcaacatgttg

SEQ ID NO: 597628 - DNA, 632 bp, Homo sapiens
ctggtcctccttcctgcctattccatagaggagctgtttttctttctgaaagagatcaattcctcacatgtgctttagaccccatctcctttctccttcgcaggaatcttataatttaggtggttctgtatctcctgaatatccaatctcttttcaacctcatcaattgcttcaaattgtaaacattaagcaaattatattcagctttcaaaaaaaaagggaggaaatcctgtcatttgggacaacatggatgaaactagaggacgttatggaaaatgaaataaagcagacatggaaagaaaaatactacatgatctgacttacatgtggagtgtgaaaaagaactcagaagcaggaagtagaatggtggttaccaggggtcttaaggggttggagggttgggaagatgttggycaaaggacacaacatttcaggaggaataagttcaagagagctattgtttcacacgggaactatggttaataacaatgtattgcattcttggaaattgccaagagagtagattttaagcgttctcacaacaaaaatgattagtatgtgaggtaatgcatatgttactcagcttaatgtagccattccacagtatgtacaagtttcaaagcaacatgttg

SEQ ID NO: 597629 - DNA, 539 bp, Homo sapiens
aatctcttttcaacctcatcaattgcttcaaattgtaaacattaagcaaattatattcagctttcaaaaaaaaagggaggaaatcctgtcatttgggacaacatggatgaaactagaggacgttatggaaaatgaaataaagcagacatggaaagaaaaatactacatgatctgacttacatgtggagtgtgaaaaagaactcagaagcaggaagtagaatggtggttaccaggggtcttaaggggttggagggttgggaagatgttggtcaaaggacacaacatttcaggaggaataagttcaagagagctattgtttcacacgggaactatrgttaataacaatgtattgcattcttggaaattgccaagagagtagattttaagcgttctcacaacaaaaatgattagtatgtgaggtaatgcatatgttactcagcttaatgtagccattccacagtatgtacaagtttcaaagcaacatgttgtatataataaatacatataactttggcaatcaaatcaaataaataaaagaa

SEQ ID NO: 597630 - DNA, 622 bp, Homo sapiens
gctgggacacttacagtttacctctgttgtcctggaggaacaattattgacaccccttcttactctccaaagttttctggtttggacaataaattacacaatcactttagttagtgatgacctagaacagaagcctgtaggctgaatctgacttgcatgaaattccttggtcagcttagtgttttaaacaaaagtgaatgtgaatgtaaataggcaggacttgtgccctgtctttctccacagttctcaccattccaccatgtcttgtttctactgcatgcatgttggatgacagcctttgttgtcttttgaatttgaaacccttggcccacacaaaaaaagttgttgtgtggatctttttttgaccttgccyaattggcatatttaatagcagggctggctggttggaaacatggaaagtctatgggtggcaccccaaactgtaggaataacaggcgtagggtatcaccaagtgaccattttggatgagttcaaaggtctgtgcctgatgacattatttctaaacaatctttctgtatctattttgaggcccccagatttctgttattcttgtgcagtgatgagttaagcatattttaaaatttctgatgtgtcaggaata

SEQ ID NO: 597631 - DNA, 226 bp, Homo sapiens
taatcaaaatctgcccttcttccctacttcctctgtgaagcctccattctgggcaccttgtggggtccctctgcagcttcagccttgcattttcagcattgtctggtccaggagagagaaaacctgcttcccccatgtttcagagtccyagaatggaggcttatttgacctaattggactggcttgagccaatcaaaatggccaaatggtatgaaatgactgacca

SEQ ID NO: 597632 - DNA, 553 bp, Homo sapiens
aataccaggctagatcaaagtcttttaaattattacagtaaagatctggctaggctaccagtttaagatggcaaactaagtacatatctctgcttctcatctctcttaaaacctaatagtaatgcagttatttcttttygaatcacaagcacataatggagaaagaaacaggataaggaacatcggtagtggaaagagttgaacccatttccaaacaatggaaagtaaatggaacctaaagtacctatggcaaaatgttaacatgtgttaaatctgggtggtgggtacccggttgtcctaataatttttgtctatttaaatcatttcataatcataaaaaattaaaattagattaaaagcagatggaggtgtattgacggatgaaacagagcagatgattccacgcccacaatacaaacagaggaggctgcagctgagcagctggccagggtgggtggtagaaccagaaggctctggaaaacacaaaagagggaagaagtgaggaatgggcctcgataagggtattattaaaggcctatacaccactttctct

SEQ ID NO: 597633 - DNA, 553 bp, Homo sapiens
aataccaggctagatcaaagtcttttaaattattacagtaaagatctggctaggctaccagtttaagatggcaaactaagtacatatctctgcttctcatctctcttaaaacctaatagtaatgcagttatttcttttcgaatcacaagcacataatggagaaagaaacaggataaggaacatcggtagtggaaagagttgaacccatttccaaacaatggaaagtaaatggaacctaaagtacctatggcaaaatgttaacatgtgttaaatctgggtggtgggtaccckgttgtcctaataatttttgtctatttaaatcatttcataatcataaaaaattaaaattagattaaaagcagatggaggtgtattgacggatgaaacagagcagatgattccacgcccacaatacaaacagaggaggctgcagctgagcagctggccagggtgggtggtagaaccagaaggctctggaaaacacaaaagagggaagaagtgaggaatgggcctcgataagggtattattaaaggcctatacaccactttctct

SEQ ID NO: 597634 - DNA, 553 bp, Homo sapiens
aataccaggctagatcaaagtcttttaaattattacagtaaagatctggctaggctaccagtttaagatggcaaactaagtacatatctctgcttctcatctctcttaaaacctaatagtaatgcagttatttcttttcgaatcacaagcacataatggagaaagaaacaggataaggaacatcggtagtggaaagagttgaacccatttccaaacaatggaaagtaaatggaacctaaagtacctatggcaaaatgttaacatgtgttaaatctgggtggtgggtacccggttgycctaataatttttgtctatttaaatcatttcataatcataaaaaattaaaattagattaaaagcagatggaggtgtattgacggatgaaacagagcagatgattccacgcccacaatacaaacagaggaggctgcagctgagcagctggccagggtgggtggtagaaccagaaggctctggaaaacacaaaagagggaagaagtgaggaatgggcctcgataagggtattattaaaggcctatacaccactttctct

SEQ ID NO: 597635 - DNA, 593 bp, Homo sapiens
tatggctactgtgaggtctttctcacttcctgggaagcagtttccaagcagcgcagatgtggaggctgcagtctggcctgcagctgccctcacaataacacaactcattagtatggaacgttagtggggactccaccctcccttagtgtcaatatttgtttagaggagaaggcagggagggagaggcgaatggtgagctggagaaagtttgtctgaaaaagacatgataatggttacattccggtctaagaactgcttacatagttcattgctcagtcatggggtgagaccaaacttggcctgcaaggcccaraatggttgtcgtggacatattgcagaagcggaattaaggttttgtctcgcttttttgtgtttgttttcattattacttttatcatagagtctatttcttgaaaagaattcacaactcccccatctacagataactactatttacactttagtagtcttccacgcatttttcctttccataaacccaagaagaatgtgtatatttatatgtgataaatatttatattttactataaacaggattgcaagacacttttctttaactttctttacaaaagtat

SEQ ID NO: 597636 - DNA, 593 bp, Homo sapiens
tatggctactgtgaggtctttctcacttcctgggaagcagtttccaagcagcgcagatgtggaggctgcagtctggcctgcagctgccctcacaataacacaactcattagtatggaacgttagtggggactccaccctcccttagtgtcaatatttgtttagaggagaaggcagggagggagaggcgaatggtgagctggagaaagtttgtctgaaaaagacatgataatggttacattccggtctaagaactgcttacatagttcattgctcagtcatggggtgagaccaaacttggcctgcaaggcccagaatggttgtcgtggacatattgcagaagcggaattaaggttttgtctcgcttktttgtgtttgttttcattattacttttatcatagagtctatttcttgaaaagaattcacaactcccccatctacagataactactatttacactttagtagtcttccacgcatttttcctttccataaacccaagaagaatgtgtatatttatatgtgataaatatttatattttactataaacaggattgcaagacacttttctttaactttctttacaaaagtat

SEQ ID NO: 597637 - DNA, 593 bp, Homo sapiens
tatggctactgtgaggtctttctcacttcctgggaagcagtttccaagcagcgcagatgtggaggctgcagtctggcctgcagctgccctcacaataacacaactcattagtatggaacgttagtggggactccaccctcccttagtgtcaatatttgtttagaggagaaggcagggagggagaggcgaatggtgagctggagaaagtttgtctgaaaaagacatgataatggttacattccggtctaagaactgcttacatagttcattgctcagtcatggggtgagaccaaacttggcctgcaaggcccagaatggttgtcgtggacatattgcagaagcggaattaaggttttgtctcgcttttttgtgtttgttttcattattacttttatcatagagtctatttcttgaaaagaattcacaactcccccatctacagataactactatttacactttagtagtcttccacgcatttttcctttccataaacccaagaagaatgtgtatatttatatgtgataaatatttatattttactataaacrggattgcaagacacttttctttaactttctttacaaaagtat

SEQ ID NO: 597638 - DNA, 466 bp, Homo sapiens
gaattcaggttataactgcccaacagrttcttcctgccagctgcacaaataaagaccacagcattggagtacggaaagagtttaattgatgccgggctggccatgccatgcaggaaacagagttattactattcaactcaatctcgttgaaggctcctaggttagagattttccaaaggcagtttgggaaaggggtgggagtgagtaggaaatggttgcttactgctgattggttgagatggagatgaaatcataggtggttgaaactgtcttcttgagctgagttgttcctgggtggaaccataggaggagtttggcaggtccaggcggagccatcgggtccaggtggagccattggtgtcagacatgcaaaaaacctgaaaaaatatttcaaaaagccaatccaaaatagtgatgttatctgcaggagtaatagggaagttacatatcttgtgaccagtctaca

SEQ ID NO: 597639 - DNA, 463 bp, Homo sapiens
gcccaacaggttcttcctgccagctgcacaaataaagaccacagcattggagtacggaaagagtttaattgatgcmgggctggccatgccatgcaggaaacagagttattactattcaactcaatctcgttgaaggctcctaggttagagattttccaaaggcagtttgggaaaggggtgggagtgagtaggaaatggttgcttactgctgattggttgagatggagatgaaatcataggtggttgaaactgtcttcttgagctgagttgttcctgggtggaaccataggaggagtttggcaggtccaggcggagccatcgggtccaggtggagccattggtgtcagacatgcaaaaaacctgaaaaaatatttcaaaaagccaatccaaaatagtgatgttatctgcaggagtaatagggaagttacatatcttgtgaccagtctacaccttagcagaattc

SEQ ID NO: 597640 - DNA, 463 bp, Homo sapiens
gcccaacaggttcttcctgccagctgcacaaataaagaccacagcattggagtacggaaagagtttaattgatgccgggctggccatgccatgcaggaaacagagttattactaytcaactcaatctcgttgaaggctcctaggttagagattttccaaaggcagtttgggaaaggggtgggagtgagtaggaaatggttgcttactgctgattggttgagatggagatgaaatcataggtggttgaaactgtcttcttgagctgagttgttcctgggtggaaccataggaggagtttggcaggtccaggcggagccatcgggtccaggtggagccattggtgtcagacatgcaaaaaacctgaaaaaatatttcaaaaagccaatccaaaatagtgatgttatctgcaggagtaatagggaagttacatatcttgtgaccagtctacaccttagcagaattc

SEQ ID NO: 597641 - DNA, 463 bp, Homo sapiens
gcccaacaggttcttcctgccagctgcacaaataaagaccacagcattggagtacggaaagagtttaattgatgccgggctggccatgccatgcaggaaacagagttattactattcaactcaatctcgttgaaggctcctaggttagagattttccaaaggcagtttgggaaaggggtgggagtgagtaggaaatggttgcttactgctgattggttgagatggagatgaaatcawaggtggttgaaactgtcttcttgagctgagttgttcctgggtggaaccataggaggagtttggcaggtccaggcggagccatcgggtccaggtggagccattggtgtcagacatgcaaaaaacctgaaaaaatatttcaaaaagccaatccaaaatagtgatgttatctgcaggagtaatagggaagttacatatcttgtgaccagtctacaccttagcagaattc

SEQ ID NO: 597642 - DNA, 573 bp, Homo sapiens
gttttcaactcatttgtgcaaataccaaggagtgtggttgctggattatgtgccactcacttctttttcaagattggtacagtctcagtcattttgggctgctatgacgcatagctataggtggtttaaacaactaacatttatttctcacagttctggaggctgggtagtccaacatcaaggtgccaggatggtcggtttctgatgagggtcctattccaggttgcagacagccaacttctcatgtcctcacacagcagaaagaagktgagagagctcactggggtcccttttataagggcattaatctcattcatgaggaccttacccttatgatgtaattacttcctaaatgtgccacctcctaaaatcatcacattgggagttaggatttcaacatatgaattttttttggtggggggagaaagacattcagtctattgcagatatctttcttttttttattgatatataagaatgttattacatttgttgaaaaaaattcttcaacaattcttatattgatatatattcttatattgataaaaatataattgataacaattcttatat

SEQ ID NO: 597643 - DNA, 589 bp, Homo sapiens
catggtctaagtttgtgtgtggaagtttgttgttgttgttggtggtggtgctggtggtgaagatggggttttgccatgttggccaggcttgtctcgaactcctgacctaaagtgatcttcccacctcggcctctcaaagtgctgggattacaggtgtggcccagtgtcccagcctgtgtgtgtaaattttgaaaaattttaacttcttattacagatttgtgtataccttatggtagtaaatgacgaaataaatagtctagtgtctacatatatttcatgcatttatgacacacctaactttttcttaattttattgatatttctagggtacttggcttgtctgagtttcttcaaattgtcactaatctccaaaaatttttccaaaatatctgttgaaagaaattcatatttaagtagacatgcacagttcaaatcagtgttgttcaagggttaactgtattttgaaattaagttttcrttgcttagcagttttgattttagtttgttctgtttttgcttttgcctttgttctggaatgggaagctgtctgggaggaagtacttcctgagccaagaactgaagggtaag

SEQ ID NO: 597644 - DNA, 570 bp, Homo sapiens
tccaggctaaatcatgtccaaattctcacaattcatcccaggtttttgagggaggataattgcatttaaaaatcctaataaccttcactataaacaaatcaaactaagttactaagaacaagctagtttttccttttgttccttacccacttctcctgcttcttataaaaccacatcagacaaatgaaatccccactgaataagcaaaagtggaattacattasgcaaatgaaaacagcaaatgctaattctgaaaattcacgttaggtcactttggcttcatgtgctgtccctttatgtaaagcaaacagactcttttgttttctttattctctgattcaatgctgctagtttactgtgttcaaagaaaccgagaggtaatccacctaagttttgaatgttgggatttaaactactataacaaagagagtcaaccggttccttctatccatttatccagttgattccctactgggaatggtctagagcaagaccaacaggaaaagcaggaagcaacgtggcagatgagagaggtgctatggatgctgcagactgttctacaaatggtgc

SEQ ID NO: 597645 - DNA, 319 bp, Homo sapiens
agaccaaaaaatcataattaaaaaaaatcccagaacagatttcttaaaattctgcagctgattccttaargggactaataaaatggacaaactccaagccaaagtcaaggaaatcaatttcactatcagaattaagaaagggcatacacgacagacataaaggagactgcaaatgtttttatagagtaattgttaaaactgtattccagcactttgggaggccaaggcaggcagatcgcttgagctcaggagttcgagaccagcctagacaacatggtgaaaccccatctctactaaaaatacaaaaactagtcgagca

SEQ ID NO: 597646 - DNA, 528 bp, Homo sapiens
ccctgtcctcaagcacctgtgagcttctcagaagacagcacataacagatgaacaamtacacagcacgacaattgctctaaagcaggtgccaaatcagtttgaccatgccttttcaagccctgcatttgttttgcacttttctaatcaaatcagcgttagaagttgttcaaaataatgaaaatattggtagtattgattaacaaaaattgaatactacatatttgaagtattcttattatatatttgtgtttctagaagcactcttttcacttatatggctctaggtttgtgatagcttctcaagtagccaatctacatacttaatctctggccttctgcgtctaatccatcagtttaatccttcaaaaatttaatcggggcctggcgtggtggctcacacctgcaatctcaccactttgggaggccaaggggggtggatcacggggtcaggagttcaagacctgtctgacaaatatggtgaaaccccgtctctactaaaaatacaaaaattagccaggagtggtgtg

SEQ ID NO: 597647 - DNA, 562 bp, Homo sapiens
ttcaccataaacagaaacagcattcttaaaaaaatacaactcagggacacccatgaacatacaatcagtcattcccaaacattttcagaaaacaagtacaagagaggcaacaaactcaacccatgcaactatcatctgagaaaatggatttaggtgagaaaacagaagactcaaatatttagaaaattttgtgttactcatgtatttggaagagtcaggaagctactgcatccaygctaataatcaaatacagttcttggaaattaatatttagctcataaatatttgtgtaatcactaaaaattggagaaacaacaaaaggcatgcagctgatgtgaaaaaaattatatgtgagatcaagcaagtgattaagaataaaagatttaaaaatgaaagtattattaaaaaattaagaagcacggaacataaatctagaagttctagtgtctaatttaattttagtctaaagaacgagaaagcaaagaaaacttatttaaatattgttaacatttattatttttactaatttaagaagtgacacagcaacactactgagatatat

SEQ ID NO: 597648 - DNA, 611 bp, Homo sapiens
  misc_feature 469: n = A,T,C or G
ctagttggaaacctgaggccttgctacagaacccggttctgtttctatggcaactttcaaacatagtctacacttaaaatgctcaaataaattcttttgaaagaggtcaaagcctaggtttgtggaactccaactggagagatagacaactcttccatgaccccagttgctgagagaaatcagtggtcacaatgggccctgtgaacacctttgcttggtcactctgtgctcctggagtttgctggaggtctacttccagtcccacttctaatgaccaactgttaaaggaaaaactgtagacaaattaaattcaagacagtttattcaagcaaagaacaatttatgaattgggcagcactcagaaccagtagaggttcagagagctccacctggcagtacagcctaccagtgagcaggcaatattgtagagagaaaaaggaagtgtcatacagaaacagcttgattgctntgttacagcttrtgctataccttatttcgacatggtgtgataaagtatttgccttatgtaaatatgagctgatcagttggcagtctgtgattggctgagactcagcaacttgttacaagaatatgctcttaagttaggttac

SEQ ID NO: 597649 - DNA, 611 bp, Homo sapiens
  misc_feature 469: n = A,T,C or G
ctagttggaaacctgaggccttgctacagaacccggttctgtttctatggcaactttcaaacatagtctacacttaaaatgctcaaataaattcttttgaaagaggtcaaagcctaggtttgtggaactccaactggagagatagacaactcttccatgaccccagttgctgagagaaatcagtggtcacaatgggccctgtgaacacctttgcttggtcactctgtgctcctggagtttgctggaggtctacttccagtcccacttctaatgaccaactgttaaaggaaaaactgtagacaaattaaattcaagacagtttattcaagcaaagaacaatttatgaattgggcagcactcagaaccagtagaggttcagagagctccacctggcagtacagcctaccagtgagcaggcaatattgtagagagaaaaaggaagtgtcatacagaaacagcttgattgctntgttacagcttgtgctataccttatttcgacatggtgtgataaagtatttgccttatgtaaatatgagctgatcagttggcagtctgtgattggctgagactcagcaacttgttayaagaatatgctcttaagttaggttac

SEQ ID NO: 597650 - DNA, 629 bp, Homo sapiens
tttaatttaacatacctttaaaaaaaatctgttatcccaacccagtgtctcccacaaattctatacaaggaaggattcaaaattaatacaatgaccttatgtaacacaaatttattgatcactttctgggctctggcactatgttagttgtaggttgtgataccacaagatgtgacatatttttaagatgtttttcatggagactttaaaagtcaatatgttaaaatatctgatagaactgtcctccaattattattcacatattttaaaatcatttacttgtycagaaaattagtgaaactctttgtgaacttcagaggctatgtatggtccattctatggaataatgttgatgatgggagattttaatcttttaagggtgggtttgagtttcgaaagctgacaaaatcatttcaagctaagtctagtaaataaagtagataatacgatttttgttcttaagaaaatgtgctgttacagaaggcaatgtttttcttgtgtgctttgtgggtatttctgaaggtgattcttaatactttactaattggaagattagcaagtgtgtaaaatggtgaaaacattcatatagaaaaatgaattctggtgtgtttgtagtaaaaagtcagtgt

SEQ ID NO: 597651 - DNA, 635 bp, Homo sapiens
gcaatctccctcaaacttctgcctaagtgtctttgctttagtttagccctcctccactgttgttttgacctaaatcaccttcctcataatctgtttcctcatatctctgttccccaaagtctagataaaaaaccacatctccattattgtttcttattctccctttgcagattccaggctccccattctgttccttactgtgtatgtcaccgtggatctatttgtaactccctacaacccaccccaccatagagctcacaagccccttctagggacatcaaactgggtagatcacaagaatagcaccatttgccatcccatatactccccttcccacactgggtatgtttgtagagtctaaaagagaaacaaagcatctttttctttttttgcccaccaaactcctgctcatcctttatcactaggctcaaatgtatcagcctctgtgaaacactttcatttcccccgccagggctcaccgctccmtcatactagtcccagggcacttgctacgtattttagtatcctcaacaatgaacaaagattacacattgaacatgctcaaaaatctgtttgcagataagtcagttatggagagacctgtatataagaagttggaaactgcttcagttgtc

SEQ ID NO: 597652 - DNA, 625 bp, Homo sapiens
catacagctcacaaaaggcagagaatggctttgtcttgccgtttgagtgcagtgagagaatataattaaagtgaccaaaaatccctgggaatttattcaattcttttgaacaatgaccatccttgggaagggaagtcccatccatatcaggaaggggacaccagcaagcttaatcaycttgcatttaaatgttttccatctatacttagagctcaacacacaatacaaacacagccttcaacactgggaccctctccacccacagcacgtgccctctgacctgctctccaagcagtggtggtggcctgcctctgtccagaagcacacctgccacggcccagttctctctcagtatgtttggtagaaggattaagggtgtccatcatggttgctaaacagtaccaagctagtgtcctattataaaattactttcacacatataggatgcaatggttctaatgaggggaaaggcatgctaagaacaattacccccccttagattagcttagtactttatatggttaacaaatctcttttaccaaaatcatctcattttaatttcagtcctcatcactgaaattcatgtaaaaaaagagcaggtgtttttccatcatcgttttgtaga

SEQ ID NO: 597653 - DNA, 625 bp, Homo sapiens
catacagctcacaaaaggcagagaatggctttgtcttgccgtttgagtgcagtgagagaatataattaaagtgaccaaaaatccctgggaatttattcaattcttttgaacaatgaccatccttgggaagggaagtcccatccatatcaggaaggggacaccagcaagcttaatcatcttgcatttaaatgttttccatctatacttagagctcaacacacaatacaaacacagccttcaacactgggaccctctccacccacagcacgtgccctctgacctgctctccaagcagtggtggtggcctgcctctgtccagaagcacmcctgccacggcccagttctctctcagtatgtttggtagaaggattaagggtgtccatcatggttgctaaacagtaccaagctagtgtcctattataaaattactttcacacatataggatgcaatggttctaatgaggggaaaggcatgctaagaacaattacccccccttagattagcttagtactttatatggttaacaaatctcttttaccaaaatcatctcattttaatttcagtcctcatcactgaaattcatgtaaaaaaagagcaggtgtttttccatcatcgttttgtaga

SEQ ID NO: 597654 - DNA, 570 bp, Homo sapiens
ggccttttcttagttctgtgtagctgttgggaaggcaaggaaaaagggagaactgggagtgtggtgcctccttgggaatttctctggatggagaatacgaaattgaaaagccaagagttcctgcttcgggagtggggagtagggactctttctccatgcgttccatatcttcagaataatttcatgctcagcatttttgccttttctctgaagtcctccccaagtcctggaagaaccaagaaatcaccatggctccgacagaatttgttttaagcaagactcaacttgtcagctgatgccacagcgacctcctgctagactatgagtttcacaggctcagcactggttaggaactgctagactttcagacagggctggctccagtttttccctctgattcatggattaaagtggaattttccagtgaggcttgatctaggaggaattcttctctttgggtccacaagttctctttattctgcaaaggaatcctaccctgtggccatagttgggcagtctctgtctattccatcaacckccagacctcagatgagaagagaaataggcatc

SEQ ID NO: 597655 - DNA, 592 bp, Homo sapiens
cagcatactattgggtctttcttttttatccagcttgccactccgtccctttcaaatggggcatttagcacattacattcaatgttagtaatgatakgtattgatttgaccctgtaattgcatttttagctgggtattatgctggcttgtttgtgtggttgctttatattgtcactggtctgtgtacttcagtgtggtgtttgtattggctcgtaacagtcttttctttccatatttagtgctcctttcaagatctcttataaggcaagtctggtggtaatgaattccctcagcattttcttatctgaaataatcttatttctccttcacttaggaagcttagtttggctagatatgaaattattggttgaagatattttttctttaagaatgttgaatattggcccccaatctcttctggcttggagaatttctgctgagacatctgctgttagtctaatgggattccctttgtaggtaacctgccctttctctctagctgcctttaacatactttcttttatttcagccttggaaaattggatgattaagtgtcttggtgataatcttcttatgtagaatcttgcagtgg

SEQ ID NO: 597656 - DNA, 520 bp, Homo sapiens
ataaacattttctaaaatggaagagaaaatgtgcaaactaaaagtacatatgtttagggagatgttgatacagaacattgacacaaagtatatcctggtaaagttgctgaatatcaaatataaactcaagaataaatttttcatcaattaaggcagaaatagtaagtcactgataaggaaaaaaagtatctgagactggcctcaaatcttactgcagcaattatcaatgtcaaaataatgcagcaaagtctgaaaattttgagtgaaggtgtgacccaaaatgtcacactttaaaaaaactctttagtacataattcatgtacacctttttaaaaattcaaaagtacaggaagacatatactaaaaataaggactttcttctcatagctctgtctccatcaaagaggtaaataatggtaattrgttacatattttattttttagaactattttatacatatgcaagcatatatattttcttagcttgggttctcctgaaatcagagctgatacaaagctt

SEQ ID NO: 597657 - DNA, 566 bp, Homo sapiens
gggcttctggaaatcttcataaactgtgactctaaactgtccacctgagtgtgaaacgagaggcacttatctagtgtttcctgtgctttattgatggagggtatccaaacagttaattcccttgcatttctacactgcaagtgcgtgaatgttgaatgggtttgtgtgagagtctctctccgcagcttcagagaagccytgggacagtgtcatagactgaaggtttgtgtccctccataattcctatgttgaagccctaacccctcaatgtgatattatttggaagtggagcctttgttggtaattaggttttaacgaggtcatgagggtggaggccccatgatggagttagtgtccttataagaaaaggaagagactgaagttcactctctctgccatgtgaggacacagagggaagacagccttttgaaaaccgggaagaaagcccttaccaggatccgaatggacagcaccatgatcctggattttctaagccaccccagtctatggtacttgttacggtagcctgagctgactaagacaggcaggagcaaatagtacacact

SEQ ID NO: 597658 - DNA, 564 bp, Homo sapiens
ctgaacactcttaatttctgaatggagacaatttccaacttaaagtgaccagagatagaactgtttattccctaagaatcagtagaaaagtcacaggacagaggaagggaaaaggaaagctatatttttatttttatttacttatttttcaccctgtcttatgatgctgagctatatttttattaaatcacactygctttttctaaatactggttacatacacaagcccagagtcaaacattttcttaccctatctgaagactccagcagtaacagagaaacaaataacgatgacatccacctcagccacgtctggcaaacttgacacaagcggctcaccaagaaggcaacccagcagttaatgttactgacccatttgtcatatccagtttctccaactgtccataacaggtatttaattatagaggatgattggggattcatttgtccttcaggaaatttcacgactaaggtatgtctttcttccagtaacatgcacacactcacacagactcatttaattctcaaacctaacatgattaggttggtctaggaaaggcctct

SEQ ID NO: 597659 - DNA, 528 bp, Homo sapiens
ggatgaacttgctccccacgagagggactgactttactcatccttctcttttaacccagtcatgctgaaattatcagagagagccaggcagaatgaaaatggcagtaacatccagactctcctagacattgaccggaagttgacctctggccacagatgccagaagcaggcaggcaaggaagggaccaaggagaagccatcaagaaaatgaaggtacgataaactgtgaaaattgcgttggcaatgcatgagktaccactgagtcaacctatatttccaacaaaatcctggagaataagcctgcagaatacacagactaaaaagatggcggctccccaccccaaaacaccttccctacccaccagcctctgctcaaaataccaccacacaaacttgattttttaatctaaggaaagaatcaagcagatgaactatgattgaagcttattttgtaatagcaatgattcaaaaacaaactctatgtccaaacttagtcagctttccctgactggctaaataaattatgat

SEQ ID NO: 597660 - DNA, 598 bp, Homo sapiens
gcagaagtttgctgcagggttggagcccacatggagaacctctgctagggcagtgtggaagggaaatgtggggttggagtcgccacacacagtctccactggggcactgcctagtggagctgtgagaagaaggccactgccctccagaccccagaatggtagatccgccaacagcttgcaccatgcacctggaaaagctgcagatactcaatgccagcccatgaaagcagctgggagtggggctgaatcctgcaaagctataggggaagagctgccaaggctgtgggagcccaccttttgcatcagcatgacctggatgtgagacatggagtcaaaggagaccatttcaaagctttaagatttgactgccctgctggattccaggcttgcatggggcctgtagtcccttcattttggccaatttctcccatttggaaagggtatatttatccaatgcctgttcccccactttatctaggaagtaactaacttgcttttgattttacaggctcatatacagaaggaacttgcttcgtctcaggtgagactttggacttggactttttggttaatgytggaatgagctaagaatgtgagg

SEQ ID NO: 597661 - DNA, 518 bp, Homo sapiens
agttggagttgctgcctaaaagtaaaagggtatggggtagaaactggaggcttttggttcttctcctttaatttgcccagatattcttacgaatcctcagaatatttcattctaattagtttttaataaggacaaaaacagcactactttttagggttattgtgaggattaaatgagttaatacatacatgtatagccctcaaaacattgcctggcacatagaaagcattcaataggtrttagctgttgttgctgtatgtattagagttctccagagaaaaacagaaccaataggggctgtgtgtgtgtgtgtgtgtgtgtgtgtgtgtgtgtgtgtgtgtgtgtgtgtgtacagagactgtattttaagaaattggctcacataattctggagctggaaaattcaacatatgcaggacaggccagcaggctagagacccaggaaggagctgatgttgcagtctcaagtccaaaggcagtgtggaggcagaatttcttctccctcaagggaactaggt

SEQ ID NO: 597662 - DNA, 364 bp, Homo sapiens
gcttctttatattcaattctcattttgctttctggtgagggatttttcaatagtcaaacaactgaaaattattttcatgagccagcattgtccaaacaggggtytgggaggacactgctgtcccacagatgtcaataggccttccaagaaaaaaaaaggttctgtcttcaaatcaatgtgggaaaaactgggttaaataaaattcaactagtttcttcactacatattgatgttctctgtgacctctgaaacctttatttcacagtacacctattaatatttccaaatacaccattgttgggtagaatatatttgggagaaaattatcttaggtaatcatcattattatcatcacctataatta

SEQ ID NO: 597663 - DNA, 540 bp, Homo sapiens
gttgcattacttggggtctcagtttcttcatctgtggagtgggattgcagtgacctactcacagaattgttacaaagactgaatgagaagaaacagtatatgtgatagtgctttggaagctgaaatggacttaacatcaaataacagtcattaataagatctattcatcaatagccaagtttactcactgatatcagaagtggattctgagaatgtgtactcttagccattttctagctgtgtgaacttctaaacaagttaattaacttcttagaggcttaattttcttatttatagaattaggaaaataatacctatttctacaaggctgttgtaggaattttattttatttatgtatttatttatgtatttatttatgtatktatgtatttatttatttatttatttatttatttatttatttattgagacagactctcactctgtctcccaggctggagtgcagtggtgcaatttcggctcactgcaacctctgccctcctaggttcaaatgatgcttctgccttagcctcccaggt

SEQ ID NO: 597664 - DNA, 540 bp, Homo sapiens
gttgcattacttggggtctcagtttcttcatctgtggagtgggattgcagtgacctactcacagaattgttacaaagactgaatgagaagaaacagtatatgtgatagtgctttggaagctgaaatggacttaacatcaaataacagtcattaataagatctattcatcaatagccaagtttactcactgatatcagaagtggattctgagaatgtgtactcttagccattttctagctgtgtgaacttctaaacaagttaattaacttcttagaggcttaattttcttatttatagaattaggaaaataatacctatttctacaaggctgttgtaggaattttattttatttatgtatttatttatgtatttatttatgtatgtatktatttatttatttatttatttatttatttatttatttattgagacagactctcactctgtctcccaggctggagtgcagtggtgcaatttcggctcactgcaacctctgccctcctaggttcaaatgatgcttctgccttagcctcccaggt

SEQ ID NO: 597665 - DNA, 537 bp, Homo sapiens
gttacttaatgtgcactacagaccaaatggacctcatagatatttacggaacatgtcatccaagagctgcagaatacacatgcttttcctcagcacatggatcattctaaagggtagaccatatgttacatcacaaaacaagtcttaaaacatttaaaaaaatggaaataatataaagcatcttctctgaccacgatggaataaaattggaaattaataacaagaggaattttggaaattctacaaatacataaaaattaaacaatatgctcctgaatgaccagtggatcaatgaagaaattatgaagaaaattaaaaaatttcttgaaacaaatgataatggaagcacaacatgcctagctagagcaatcacacaataggaaaatataaaaggcatcgaaattgagaagaaagaaatcagtttatcctggtttgcagatgatatgatcttctatttggaaaaacctaaagtctcygcaagaaaatgattagaactgataaacatattcagcaaagttggaggacaaaaaaatcaac

SEQ ID NO: 597666 - DNA, 572 bp, Homo sapiens
tctcttcaataaatggtgctgggaaaactggatatccatagcagaagaatgaagctagacccctatctcttaccgtatacaaaaatcaaatcaaaacggattaaagacttgaatctagacctcaaactatgaaaatactacaggaaaacgttggggaaaatctccaggactttggtctgggcaaaaatgtcttgagcaatatcccacaagcaccggcaaccaaagcaaaaatggacagatgagatcacatcaggttaaaaagcttctgcacagcaacggatacagtcaaccaagtgaagagacaacccacagaatgggagaaaatattttcaaactrcccatctgacaaggaaataataactagaatatataaagaggtcaaacaactctataggaaaaaagctaataattcgattcaaaaatgggcaaaatctgtgaatagacatttctcaaaagaagacatacaaatggcaaacaggtatatggaaaggcactcagcatgactgaacatcagagaaatgcaaatcaaaattacagtgagatatcatctcacctgggttaaaatggctttt

SEQ ID NO: 597667 - DNA, 606 bp, Homo sapiens
aagcttgtccattttactcaaaagtaacattgagattcaagggagacaaaatctaagatatttgcccaaagaatagaacttctgttcatttagctcaattcccaaagtattcttaggatgctattgcatgtctgttactgaacataactttgaaggttaaggctacaacaaggtctctgattcaaggagccaacagtctaatggaaaagatgttcctaacacatataaaaaggttttgagtctgagataagtagctgatcaccagaatcccctctcctcttcctcactgcagcggggaattggaagccccatggcaccacattctcagcctcccttgaagcagcctgtggccctgtgataaacttctcccaatggacagtgacagggtcaatgcatctgggtcatamaacatcccacatatgcaccttcacattcctgcccatccctcagggtaaaatggcagacaatgaatagagtgacactggaagccactggtcgaggacagaagagcagacatcaccctgaatttataaaggactgtccttaccaccttcccctgcccacaacctggaacttcttccctggactataacttgagaaacaaac

SEQ ID NO: 597668 - DNA, 559 bp, Homo sapiens
agatttcttgagagtcctatctcctgccatatacttgtctatgtagcrggattacagttcaccaacaaagtctctgagtttacagagtagggttagagagcttatgaactaatacatatagacatgcatacatacataaaagtatgtatacattttacatcttaggtaatgattagtgctgtgatgaaaatgcaacagtattatatgaaagattatgaataaaggcaaaaataggtacaacttttccagggtttagttaaaccaaaattctttaaaattttattaacagattctgatcaactctccagctttctgcttactcaaagctgtcctgtggaaggcacattgctcagactgggcaaaatcttgagtcttttgctgttccttctcctccccgctttgaacttcctgcccttttctactccacactcaagactccttccttctactcatttaggcctaaaataaaactacaaatttcttagcaaacagcctgtatttttttgtctccctagccaaatgatcaaataaatatttcaggaaataaagaagaaagtgg

SEQ ID NO: 597669 - DNA, 636 bp, Homo sapiens
agaccacatgattatctcaagtgatgaagaagaagtatgtgacaagaaaacaaataaccctaattaaaaatgggcaaaggactggagtagacatttttcaaaggaagacacagaaatggccaacagacatattttttaagagctctacatctctagtcatcaaagtcattgtggctttattttgcaaaataaaaccacaatgagataaaacctcagactcttagattggctattataaagaagatgaaagataacaagtgttggtgagcatgtggataagaggaagcccttatgcactactggtggtattgtaaattagtatagccactttgaaaaatagtatggaagttcctcaaaaatctgaaaaatagaaataccatatggccaagcaatctcactactattcacaatagccaagatatagaaacaatctaaatgtccatcaacaaatgaatggattaaaaatgtgatatatacatatatatatactcacacacacacacacacaatggaatactattcagccttttaaaaaaaaaacaaaattttttcatttgtracaatgtggatgaacctagaggacattaagataaatgaaataatccaaacacagagaaaaaaacaccacacggtctc

SEQ ID NO: 597670 - DNA, 601 bp, Homo sapiens
agaccaagagatttattggaaagactgtgtgattgattgactattggatgagaggaagaaaagaaagatttcaaaataattcccaagtttctgattctaatgttatgaataataacatttcagtgaataactgaaatagggaatgttagtgtaggaatttcatcataatttttgttctggttgtataagtgtgatcatctaaatgaaattcgatcagataatagtattcagtatttcagtaggtgcaagaattgtgttttatgggatctacactatattttctgattaatttcaaccttagataataaaacgaattgaattgrgtcttgttagcactttagattatggggaattactagattaaaaatactctttaaagctttagggttcaggagtttgtacttttcaaagcattgcttaaacaaactgaggtagtgggaaatgaagagaatagagtctggtaacataaaataaaactcatagcaattttttgttgttgaccgaggtcagtttagttgaaccgtcttgcaagaaataaaaacacatttaaaataaaattcaaaaaaatgaatatctcaaagtattgtaattaatctattct

SEQ ID NO: 597671 - DNA, 625 bp, Homo sapiens
tcttgtaaattagaccgacgaaagacagattgtcaagagaaaaacacactaatttatttactataagtttcacatgacacaggagccttcctaaggaaataaagacctcaagagactgttaatcttgaatggttttatgctaggtgtgatgaagagtggagagtcttgggaaaatttgatagtacaaaaagatatcataggagaaagggctaagtgtagtaaagtgggggacatttagcaaagtctsttctttcagattcctcctggtaactctccatcttcagagatcaggatgctcctttcctccaggtacagggagtgcacctctcacatgagagtctcatgacctgcttaaggggaagaagctcagagagtccttcctgcacctgctgtttctcaaattccttctgtttgaaatcgtcaatatgccaaggcagcatactctggggtagtgctttctgaatccttttaaccctgaagcatgggaaaactactgacttacctcgaagcgacattcaaagaatttgccattttcttgtctacctatttattgtttcatattattcttattgttattgttctggcccagttatactcaacgggtgatatgagggttgtgtttcac

SEQ ID NO: 597672 - DNA, 628 bp, Homo sapiens
ttcaggatctttcttcaactgatgctgatctgccttggaatagagcaaaaaaccgcttcccaaacataaaaccatgtatgtgcatttgttggttttggtttagctaggaaatatttttaaatgcctaccatcttaacttttttgtttccttaatatattttattttatattgtttgaattataataatgtattttattggcagtgactaccaaattatatatcttttgctttgttcatatttaactaaagttagtatacgtggttttcagtttgttcacacaagttcacttatgcaggtgcaagaaactgyagacctaatagtttcttagctttgtaattaaacccaagtaatgaacctgtttaacatcttcctacagacctagcatcaaatgcaaagggaatattctcacttagctttgtgcattagtttcccttcacagcatagcagtgttttcctatggaacataaaaaaaatgcattgtaaaatattcattgaagaccagagtaaatgcgcacttacatgaattcattttacatatgaggcagaatgagcttcaccatagtacatacagcttcatttttcaatcaataagaaaataaacagtgttattgcttaaagaattaaca

SEQ ID NO: 597673 - DNA, 495 bp, Homo sapiens
gaaaactgagatcatataatgttagttttgtaaataagttgtaacaagattgtataggaataatcccaattatttatatatgtgtatgtatataaaatatacagtataatatttagtatacaatatgtgatatattgtctatattactctgtgtggaacctactcctcccttacaggtactggctttctggccttgctcaccagtgggtctgcataccctcccgtacgtactcagcatagagaagggtcaagttgcctcaatcctcagtgccacctccacatcattctctatccctctgccctaaaattgccagcttgaattcatgctatcaagcataggacacaccattgctctttttggaagttaattaccatcccctaagtcactttctcttgtttcttaaagatttcactccrggatcactgcttctctctcatcactcttctgtcataattattgatgatgtcaaaattcatataaaatattgacccata

SEQ ID NO: 597674 - DNA, 585 bp, Homo sapiens
cttttttcttgctttcctctctctaacgccaaattttctttcctagaatcagtgactagtaccctgctcaatcagagcccttaccctgacacagctaaacttaatcatttgtgttagtcagaacctttatagaacacctctacatacgtcatactatttaaagtagatctgtcttgttccaaatccagttttctgrggttgcttctaacatctaacagagaaatgttattgcctgcctgtcatcttggctaacaggcagtaaggccttatttttagctggtataatatcttctggtatctcctattcattgagtccttgctcagggccccatccatctcttcacataactttgatcagtctctttctcctctctatctacaaattctaccctgttgccccggatgtagctaaacaatgcccatggttttcatttagaatacatggttgacaaaagaagacttctggcaagaatattttttcaaatgtgctaatgtggaaaggcttagtaataaggaaaattcaacttctgccacactggggatcatacctctgagctttttgacatcagcaagaatattgcattc

SEQ ID NO: 597675 - DNA, 585 bp, Homo sapiens
cttttttcttgctttcctctctctaacgccaaattttctttcctagaatcagtgactagtaccctgctcaatcagagcccttaccctgacacagctaaacttaatcatttgtgttagtcagaacctttatagaacacctctacatacgtcatactatttaaagtagatctgtcttgttccaaatccagttttctggggttgcttctaacatctaacagagaaatgttattgcctgcctgtcatcttggctaacaggcagtaaggccttatttttagctggtataatatcttctggtatctcctattcattgagtccttgctcagggccccatccatctcttcacataactttgatcagtctctttctcctctctatctacaaattctaccctgttgccccggatgtagctaaacaatgcccatggttttcatttagaatacatggttgacaaaagaagacttctggcaagaatatttyttcaaatgtgctaatgtggaaaggcttagtaataaggaaaattcaacttctgccacactggggatcatacctctgagctttttgacatcagcaagaatattgcattc

SEQ ID NO: 597676 - DNA, 514 bp, Homo sapiens
ccttcaaatttaatgcttcttttaaactgatttgtcctacacatatgagaagatatgttgagaaggtaatacatatcatttactattaattgttttcctgatttaaaaaagtattacatggccaggcgcggtggctcatgcctgtaatcccagcactttgggaggtcgaggcgggtagatcccctgaggtcaggagttcgagaccagcctggccaacatggcaaaatcccgtctctactaaaagtacaaaaattakccaggcatagtggcagacacctgtaatcccagctactcaggaggctgaggcaggagaatcgcttgaacccaggaggcagaggttgcaatgagctgagtttgcaccattgcactccagcctgggcaacaatcgtgaaatcccatctcaaaaaaaaaaaaaggaagtattctattactcacttatggtatatttctcttataaaattttagaatcagctgtataggaccaaccatgggttaggatattttaaatttatat

SEQ ID NO: 597677 - DNA, 514 bp, Homo sapiens
ccttcaaatttaatgcttcttttaaactgatttgtcctacacatatgagaagatatgttgagaaggtaatacatatcatttactattaattgttttcctgatttaaaaaagtattacatggccaggcgcggtggctcatgcctgtaatcccagcactttgggaggtcgaggcgggtagatcccctgaggtcaggagttcgagaccagcctggccaacatggcaaaatcccgtctctactaaaagtacaaaaattatccaggcatagtggcagacacctgtaatcccagctactcaggaggctgaggcaggagaatcgcttgaacccaggaggcagaggttgcaatgagcygagtttgcaccattgcactccagcctgggcaacaatcgtgaaatcccatctcaaaaaaaaaaaaaggaagtattctattactcacttatggtatatttctcttataaaattttagaatcagctgtataggaccaaccatgggttaggatattttaaatttatat

SEQ ID NO: 597678 - DNA, 440 bp, Homo sapiens
aattctttcttgctttctttaaatcactctagggtattgtggggcactcttaagcttatccaccaagactctttgttagtcactgctactttgtcacttagatgccctgtttggcaatggaatagtctatcactttatgtttaccctgagaagctggaagatacaacatctctttctgcttggggggcacccatcattaactgagaattctaacattctactttgtaatacctgstccagcatccccatatttttcaacaattcctgtattgtaatgaaatatacttccttttaaatcctgttttcttcattgaatacacctctttttgaccattttcatatttattatgctctgtttttcaaaccattttttttcttttattcattctttgcttcaaaaaacatatcttcttacaaatattcttcaattaaagaatata

SEQ ID NO: 597679 - DNA, 561 bp, Homo sapiens
gtccattgttctttaacttgttaaaagtgaagccagtgccaatgctaacgcgaacaaatacaatctaacatgaccctattttatacctttctttacttggaggccaataagcaagaaatccttcctgcaacatgttgaagagctttgcacaaacaacaacctaaagtttcaagaagaattttcggtatgttactagcagttgtcacaacattgcaagacctccagtcgtttcatgtgtcacatttcatgtccattttaagcaagcaaggccatgaaggactctggccttgataatcaatacccaattaccaggttgattgttttgatagtaatgttacactgggccrcctctggtgcaacctgatcagaattattcacctactgtgtcaggaaaaggtggtcttcttcagacctcccctgtattggcagcatgaccttgtctattctctgctctttcatccagatgtaggtgcaaatgtagaatgccatattcattagtttgttttgtattcaaggtttaggtcatactataagtgtagttttatatttaagtaattattt

SEQ ID NO: 597680 - DNA, 600 bp, Homo sapiens
gggcctttttaaagttactatggaataaatgctgtatcatataatgaaaatgtataaaattaagaatttgtcactttaaatctacttaaaagttgggaatagttttttttttaacattttgtatatctataaaattgaaattatttaaaaacataaggtagatatcaaatcttcaagctactttaagagttataagcatcttttctaacttagatgattattttgttattaagaaagacagatttctacatgtcaccaaaaacattatttctattttatttttttccatgaaatttccagtgtgtgaactcctgaaacaaagaataaaacaattggrttaaataattcagaattataatatttcagtctcttagggaataataacaaaaatgagagaagattaatggtatttcctgcagccttttggttatgcttcttaagaaatattggtctggacttaacaaaatcaatagtgccataaaattcttcctagcatttagacagcaagaattctcaatttttcaggagcaaaagtgtaatttccctagaataagagtgaatgtaattacattatgcatgaccaagtagataaaaagtttt

SEQ ID NO: 597681 - DNA, 558 bp, Homo sapiens
gagaatgtgcatatttaaaaaatctgtaaagaaatcaaccaaaatgttaatggtccttcactctggatagtgggattacaggtgaattctactttctattatgtatttttctaaattttcaaaatattctacattaacatatattatttttaataagaaaagatccctcacactttaactacatatttagrtctttcggttgagactggaaagacagaaaagctgcagtatactgtgtatttaagagaatcaagattttctacaagcaaatgttcctggcttgcactgtaatttgggaaaatcacctaaagtgcctcctcattgttccttaaagtaaaataaacttgctggattacattttagagtccctggaaaatttaaatatatgttattttttgtatattactattctctgactactgagacaatttcaatgtaaaaaagtaaatgttaccttttattccatattccttaaagcatcttcctgtttgaaatagatgtcattccattactactttttaacttatacattacctttctttaaaagaaatccacaga

SEQ ID NO: 597682 - DNA, 558 bp, Homo sapiens
gagaatgtgcatatttaaaaaatctgtaaagaaatcaaccaaaatgttaatggtccttcactctggatagtgggattacaggtgaattctactttctattatgtatttttctaaattttcaaaatattctacattaacatatattatttttaataagaaaagatccctcacactttaactacatatttagatctttyggttgagactggaaagacagaaaagctgcagtatactgtgtatttaagagaatcaagattttctacaagcaaatgttcctggcttgcactgtaatttgggaaaatcacctaaagtgcctcctcattgttccttaaagtaaaataaacttgctggattacattttagagtccctggaaaatttaaatatatgttattttttgtatattactattctctgactactgagacaatttcaatgtaaaaaagtaaatgttaccttttattccatattccttaaagcatcttcctgtttgaaatagatgtcattccattactactttttaacttatacattacctttctttaaaagaaatccacaga

SEQ ID NO: 597683 - DNA, 558 bp, Homo sapiens
gagaatgtgcatatttaaaaaatctgtaaagaaatcaaccaaaatgttaatggtccttcactctggatagtgggattacaggtgaattctactttctattatgtatttttctaaattttcaaaatattctacattaacatatattatttttaataagaaaagatccctcacactttaactacatatttagatctttcggttgagactggaaagacagaaaagctgcagtatactgtgtatttaagagaatcaagattttctacaagcaaatgttcctggcttgcactgtaatttgggaaaakcacctaaagtgcctcctcattgttccttaaagtaaaataaacttgctggattacattttagagtccctggaaaatttaaatatatgttattttttgtatattactattctctgactactgagacaatttcaatgtaaaaaagtaaatgttaccttttattccatattccttaaagcatcttcctgtttgaaatagatgtcattccattactactttttaacttatacattacctttctttaaaagaaatccacaga

SEQ ID NO: 597684 - DNA, 599 bp, Homo sapiens
ggggggatgagagaacatgatataaaatatgattgatctaaatgtctaaaataaaattaatttctagaactatccctttcaaggatacctrtatattcaacaatgcttttgtattgtcttctgaacagaattttgaatcgatatccaactttagtatcaatgtcactgtatttgttccagatcactctagttaaagtctgtattaaccaattagcatcacattcttaggttgacaagagcagaaaaaggagagaaaatgatgagatcactagctttattttatctaatgaagaaactgtaatatctgacttgagacagcaatttcccaagtcactcatctcctgaatcctaataatttgattttctatttaatctgcagccagatagaaaaggtagtatgggatctcactttatgagatctttatgggatcactttatgggatctcagtttatataaatgcctatacacacagaagatgatataaggatctttatacttttcacataacagatgctcaatacctgtgtatggaataatttgtgaatgtgttcatttaagttttgggtcaaaagtgtttcaatacctattattctgagtg

SEQ ID NO: 597685 - DNA, 606 bp, Homo sapiens
ttttcaaaatgaaacaaagaaaatgctatataagctaaatattctacatttgtaacatttagcatttctgctggtaactgaatatttggtcaatacagagtctcatggtattaagaattttcaatgattttaaaaaatctctatacttcaacaacacaccctaaaatattaagaaataagaggttaagttccactgattaaagaaagacaaactcaaatatttgatagcatattaatgataatcatcttgccttgtttaaacacaatcttggtaaccataaaaaatccaaagacactccaaagaaaatctgcctccaaataagagaagaaactrttagaatttattgctatcatagctcattatctttatccccatcaaaatgaacaaccctttgctgaataattttcatgtaatttacccttcctgtagtgctggagttggaagaactggagtttttattgctctggaccatttaacacaacatataaatgaccatgattttgtggatatatatggactagtagctgaactgagaagtgaaagaatgtgcatggtgcagaatctggtaagatctctaaacctgcactgcattctaaagttctaga

SEQ ID NO: 597686 - DNA, 630 bp, Homo sapiens
attttttgtcattcatttgggcttgcatgataaatattatctttaatccacagtctctttgtaggaatcttccttaactacttcaattctgtgataattagttaggtaaactaggtaatataatgcatatacattccctcatatactgagttaacaaatgagttaaatgtcacccttcccccaggattcagaaatggaatattatacatgaccagggccagcttcatgggtaggcaacatgggtagtttcacaggtcctcacacttaaaagggccctgaaattggtttaatgtttgckgtcactgtcttgaaaatcttaaaattacattttgagacaggaactttacattttgtagtggaactttacattttgcattctctctaatccaagtttggctaacaaattaggtagctggtctttatcaaggggtcttatgaaggttctaatatcaatccaactattactcattattaaaattcaatttccttctcatttttagttaaaaacaaagataaatgaaaagctaacattttcctcccatgtccctaggtgtacacatagacactggggatcagtgctctcaatgaaattaagggtttgctctcttgggtaggatagaggatggaact

SEQ ID NO: 597687 - DNA, 542 bp, Homo sapiens
gaattaaattctgtaaagagtgtgttcaagaatgtctgttaataattttacccaatttagtagtcaaaatatgttataaacttcatacattattctgtttaaccagccatagcaaattgtcacagcttgggatggggatttaggggtggggcagggattagaaagaaggtttttgaagtcagagaactaaattccgaatacatctctgctaattgttggctctgtgactttgtttarttagcctctttgagctatgtctcttttgtaaaattgccctgttacacttttcacaaacttgttatcagtattaaataagagaaagtttgtaaatcaccaacatggtgcccagcaggcagtaaatgtccagtgagatttttctgattctctccttgctgaaaatcaggtactcggaagccctctttgatcttagttcccagaagttaggctctttactgttttttccctgtgatgacagacagaaaaatgaccaccccttgcctccagtccttacaaaccagcattgccttgcacaacagcagttt

SEQ ID NO: 597688 - DNA, 583 bp, Homo sapiens
ttttaatctatatttgaaactaaattaatacatatctaaatatcacacagattaatatgaagaatctcaatgaaaactatataacagaattgaatgatatcaaagcaccttttataaaattttgataaagttacataaaggtaaggttagaggcctaaaatatatatcctcaaatataaacatagtaagcatttacttgagaagctggaaaaagtacaayagagaaaatctaatgacataatgagatctcatttgtgaccaaattatgtgtgagctattcactggcaggcagagaggatatttatgtgcatgaaacacttttggagaaaatatggaattgacggacaaaccaaaacacccctttaagtggagaaatagaccacattagtagggttcaagactatattataaaactatattataaaacaatttctaaattgattgaatcaatttctaaattcaaaacttcagaaaattcttaaatgaaatttgagtagagaacaacacctgggatttcaacagaaaccctaaagaagctgcagtaaactagactctcccaacaaaacgttttttaaaaagtttt

SEQ ID NO: 597689 - DNA, 550 bp, Homo sapiens
ttacattatgtttactgtttaaggagacagaaatgggtttgacatattatttaaaagatctcatcaaaacttattagactgaaaaggtagggtaaggcagtttcagaagaaagctggaacaagatatcccacagggctgaagcaggtggtagagatgcagaggcagatctggattcagttgccaatgtgcacatgcatggaggcagacagcaggtccagagagtacagtaatgagcaacagatggtgaacccagctaggacacatgagagtagactagcaagaggtagcatatcataacaggcaggtgaagcaaggctaaagagaatccaggaactggcactaggcaggtccaagtggcagggaagcaggtcagcagggagcaagattctactcgccagctagaytcagtggtggctcacttcctcagggtgatatgcaaagtagagacccagatgggtttcaatggcccctcatatcctgcatatgaatatatagagatatatatatatacacacacacacacatatatatataaatatcgtttacagt

SEQ ID NO: 597690 - DNA, 597 bp, Homo sapiens
ccacttggatttctttagtagagctcaagacgtccttcaatttggtgtttcccaaatgtatgtaccactgtttgcccaaataaactctaaaatttgtatagtgtctcagtttatcttttaacagaccttatttgtataatggaatttcccaggcaattgaagcttatttttgggagcaagctacctggtttyctgctccaacatcctcgtctctatattttagaagcaactcaatctaaccagaaagctcagcctcactctggaaagaacttagtccttatctaggaaaatattatattccttcagtactcttagatcaacatcaagaaaatctttctgtaaatgtagtgcatgccttgtttcccagtcctagaaactaagatttggtcttattcaccagatgcacttcttctacttgtgcctaaattactgattttattttattgtctcaaatatttattttctcattacaaaatataaaattattatacaatttgtacaaatgacagaaaaatctaaaaagtaaaatgaaattatatcacgttaaactctagtacctaagggtaactcttattaacaatttggagtgatgtttcc

SEQ ID NO: 597691 - DNA, 539 bp, Homo sapiens
tgctagcttttcttttatctaacttaactgtatctgtcaatcattgaacataaaataggtgttgggcattgtgctaggccaaaagttctcagtagtggctgcacattttaatcattttccatttcccaggttattctattgtgcagccaggtttaagaaccwttaggctggacacatttaatctcatcagaatccctactagcatttacagaaatactctggttcggttgggctgcagtggatcttgggaatccaaattttaacaagttcccccagggttacaattgatcataggattattacttaataaatcttgagtcctgattatgtcaatcgcactatataggctaatgtgatcatttcacaggcctctcagaaatgagctacccagtatgtaacacttaagataccattttttaaaaatgaagatgtactggactaaaaagtgttttacaaaattattttaaggtaaactaaaatatttttattactacaaatcaacagctttgtaaagaaaaaatgtgaaggatacaaaaaga

SEQ ID NO: 597692 - DNA, 561 bp, Homo sapiens
aaatcagggacaaaagatgaaatgttaaaaaattgatactatttgttgttccaacgacaacagataaacaataaaagatatatttatacctcattcctcaaaaaaaaaaaaaaagtcccaatgggacaaagattgaaatacttaaaaccagaaaaatccatgaaattttcagaagaaacagaatttgtaaaataataataatttataatgacaactttgacaaatggtacaaagtcatagtgaaaaataatgagaaatttgattgcataacaatataaatttttgtayggcaaaattgatagacaaattcatggacaaatgacaaactaagaagaaaattttaattaatatgacaaaaggcgatatgtagccttctgtttttaacatactttttttaaataaaagtgagaaaatgtgaaaggcagttaataggaaaggcattaaaatggtcagtaaacataaggaaagaagctcagtttcacttgtatttaaggaaatcaaaataaatattatgagacatcaatttgtatttgtacaaagaacataaagtgtttaataata

SEQ ID NO: 597693 - DNA, 545 bp, Homo sapiens
tcatttttccttttatcagcatctttttccgtctggttttacactcctatacctggagatctgggtgagatttacttacccaaagttaacaatggaattttcaatctaggaaaatatggttgcaagaaattaccacaccaaaactgtgctcatttcccaaaaagatcttcagcggatttacccacaaacggccttccctcttagccttcccaggccgctcttgtcctgaagtgtrgatctggagttcccggggctgcatccggcatcctcagggccggatctcgggccccctccccagttttcttgaactagactggtccctagcagactggaatatcctcaaggcctcgtttggcttgggtttgttttccatatacgaaagataaaagaaatgggcaatctgtctctggaggtggggtgggctgctttgaagggagggcggcttcaagtgagggaaggtttcaatggttgagggcaaaagacaacaacaacacacatgcaacctcttagccgagccaaacagcaaagccccaaagaggctagaa

SEQ ID NO: 597694 - DNA, 433 bp, Homo sapiens
tctagataataataacagagtaaagctgatagctgacgctagtgttccaggttcggattatattaatgccagctatatttctgtaagttactattttatatattttataattgtataaaacataattactgaaattgtattatctttccaattacttaaaacaacaaatttattacaactcctatggatcttaatatgctagttatttacarccacattgtgtacccttattttatagatgtggatatggatatgcctaacagagatactaacttatcaaaaattatttcaccagtgcgcggcagatgttcaacttcaggctacacatccctgatctttccactaattcatatgctttgttaatgtattctccatatgcaatgaagtttgccaatctctgtgaattaaaaattatcaaatggacagttatgtc

SEQ ID NO: 597695 - DNA, 300 bp, Homo sapiens
tgttagttaaaaatatttcgcgctgaggggcttgagtacaaatcacgttaagtgctttcagaaattagctgaaagatgagcagaagcgtaacctctaactttcactcaaactttaaagaccaagtttatttgtgtccaaagcacaagtcygagctaatttgtggactccacagccaaaaaaataaaaaagtggtcatatggctgctaatagaaactgtgggacttggctgagaattcctgggggaggatatctacccactattgtatttcagaggtagcaatgtgctttgcatttgctgt

SEQ ID NO: 597696 - DNA, 618 bp, Homo sapiens
taagtcatatttacttttactacctgcctgaaaatatcttgataatatatactaatattgtcaataaaatatttaaaggtattgggctgattttttttatattgctagagtgccaacataagaaaacttacacaaattatactgaagtgagacagacttgagttttcttccttctttttacagccttttaaactttattgtattaatcatatcatgtatgcgtgtgtgtgcatgtgtgtatgtaaaacagacttgtctcatattcatcaccctaaatctcctctagaaagaactgatatgaaaaaattgaacaattaagtggaaaattaggttgagacaatgmttgggataattatcacaagtttaccattgagagagattttaaaaagagattcttaaagtatctaaagtagctattcacagagaacaaatattgataattgtttaatcctcttatatgtacattgatttaaaattcctaaggatttgtggttacatacgttaatttaaaaaaagcatacagactctttactagagcttggcaatgctactgttctcaggaaggtttctctttctctctggtgtgatttgctcatgcttatgcagtcatgaagctta

SEQ ID NO: 597697 - DNA, 618 bp, Homo sapiens
taagtcatatttacttttactacctgcctgaaaatatcttgataatatatactaatattgtcaataaaatatttaaaggtattgggctgattttttttatattgctagagtgccaacataagaaaacttacacaaattatactgaagtgagacagacttgagttttcttccttctttttacagccttttaaactttattgtattaatcatatcatgtatgcgtgtgtgtgcatgtgtgtatgtaaaacagacttgtctcatattcatcaccctaaatctcctctagaaagaactgatatgaaaaaattgaacaattaagtggaaaattaggttgagacaatgcttgggataattatcacaagtttaccattgagagagattttaaaaagagattcttaaagtatctaaagtagctattcacagagaacaaatattgataattgtttaatcctcttatatgtacattgatttaaaattcctaaggatttgtggttacatacrttaatttaaaaaaagcatacagactctttactagagcttggcaatgctactgttctcaggaaggtttctctttctctctggtgtgatttgctcatgcttatgcagtcatgaagctta

SEQ ID NO: 597698 - DNA, 600 bp, Homo sapiens
ctgcttgaatggcaaagtgctcctgaaaatatcaccactgaatgttcctacattgtcacaaaaagcacaggatatcacatttatttcctttaagaattttaattgtatatattttagttgactagtgagttggtttatgataaaatcataaatagtgaacaccaaaattattgtaggrtcaaaatattatgaaaataatcctttgtaaaggggaagttagccaaatcttatctctgtttatggtacaaattcacttcattacagattaatcagaaaatagcgatacagcagcaactggcaaatattgagtgctgtgcttatcattatgcaaataagaaaactgaggtttaaggggtttaataatttgcccaagacatagctggctatttgggcttctttacatgtgttccaggaggctcaggcagaagttagaagtcttcttatgatgtagcattggaagtgccagaacattattcctactacattcttctggtcaagcaagttactaaggccagcccagaatccaaaagaagcaaattaaactctatttatcagggaaggaaatagcagtaaatttgcatacatagttaatactaccac

SEQ ID NO: 597699 - DNA, 526 bp, Homo sapiens
tgtgcttatcattatgcaaataagaaaactgaggtttaaggggtttaataatttgcccaagacatagctggctatttgggcttctttacatgtgttccaggaggctcaggcagaagttagaagtcttcttatgatgtagcattggaagtgccagaacattattcctactacattcttctggtcaagcaagttactaaggccagcccagaatccaaaagaagcaaattaaactctatttatcagggaaggaaatagcagtaaatttgcatacatagttaatactaccacaatgactactatatacttgctgtctttatttcctcaccttttatccattccactgactgtaatcaggcttctgcctttatgactgtccatgatcactggtaaycttcaaaccagtggactgttccagtcctgggtgaagcttatccctataggcgtgatgtctttcctgatcttcagtcctatatatccaactgtcttcttaaagtctctcataagtctcaatggcacttccaactca

SEQ ID NO: 597700 - DNA, 573 bp, Homo sapiens
caagtcattcttctcttaccatgagtatatcctcttccttgaccataattattgtttcatagattcacatgtgacccaagttgtttagtaagtgtccatcctgggatatttgttggaactmcagagaaaaggaggttctctttctgctggggtgataatatatgagattttttatcttatgtatcaggctgccagctgtcatctcacccccaaaaaagtagatcctgcctaaaaataaagcaatacagtagaaagcagaactgtgatgcagatattcctgaaaacatcattgagcatccagatccccaaatgcttgaatatctgctcttggctacactttacaatttaggagccgacacatggtcttttttcgtaaaccagtatgagtgggaattttgttaactgaaacagaaataatcttgtataataccactctttgatctcttctgcctattacagctacagcaattgtctcagaatattcatctgattatgtcaaccattctgttttccctcccagcttattgcatgcagggtaacaaaacagcagactcattaacatgaccctcaaag

SEQ ID NO: 597701 - DNA, 664 bp, Homo sapiens
ttaaattacatataaacaaaaatcatttcacccacctctgggctggaatgtgacagctgcttaaagtaagcatagcaacactacacaacattgtcaaacaggatgaatgggcttaactaatcaaaaatagagcatcaaagtaaaactgctcaaattagatttctggccaggacagaaaggttaactgttctgtactggtataaagtccttacgatccttgatgactgcaggattcatgtcagtattgccaatcaaattcaagatgtgatttgacaacttaagagttttttaatatcacactggggactttttatggtcttttgatccaacatgaagaatctagaaagcaatacttatgatagctaagagaataagctttgaagagtgaccctggtcaagtcacaagttcttgttttataaattaaccaatctactttccctcctgcacgtacagtcctcaatacccaccttctcaagatagttttaggatgagttatatataatatgtaccatgctctgaaatcagttcctagtacagagaatgcacaccatacttggatctgattgtctttaatctattaatgatcagcagaattcatataaaacgctgagggaaggagttgtgagaaatattttcccrtatactaaatttttcttaacctag

SEQ ID NO: 597702 - DNA, 610 bp, Homo sapiens
ttttcacaataaaaacttaactctggaatatcagtaaatatgggagcatataacacctaagtatgactaaaactattttctagtgattcttagagaaaaatatgcaagttatattctgaaatcatgtactagtgactggtataagtgttctacaatcatagtattcctcaatccatctaggttcaaatgcctactcctgcataagtgataagatcagttttaattcttgctagagtgtagtaggcaaagccatactttttaaaaccaacgtrtaacaaaacagagtgctgtgtcaagacttctcactcactgaagttataatacgtaggattctgttagtctagtcctctccggaggttaattcttaaaattgcagctattaagtttcatgtgttatatttactgtggaatttgaaaacattgacaaagggttgagcatctctggtatgtccattctagctttgcttaatgagccacatcacttgctgataagttatatgaaagacttctatttttatggggttttctttactactttacgtatttgcttccagtaaatgttcagcgaaaagtaatgacattctataggattctacaaatactataatgt

SEQ ID NO: 597703 - DNA, 556 bp, Homo sapiens
caaaagatggggttccttgttctacaagagttactataagagatacagtaattagacagtttgacattggttatgtgacaaatagacaagtagggcaaaagaaaacaatagaacgcctcaaaataaatagacccgcctctatgtggacactttattacaatgatggcatttgaagttcaatagtaaaattgttagtcttcaataaattacgcctgtatattttattattggaggagaarggaagggaggagaagggaaaggaatggaaaggaaggaaaggaagggaagggaggaagaaaggaaaacacaagaaaagttctacctccaagtagaatataaatgtgagaaacaaaacttttaaaagaaaaaatagaagaatatatttgtgatgttcaggtagtagcagattcttacataaaatataaagtagaaaaaaatgataaattcttccacattataaattttaagttttgttcatcaagagatgtaatttttagaagtgaaaatacaagtgacaagaaggaaacaagaagaagatatttacaatatgtaacca

SEQ ID NO: 597704 - DNA, 512 bp, Homo sapiens
ttcagttatatacatgtgtgtttatgtgtgtgagtatgggtgggtctgtgtatgcatattgaatcataatgtaaaaatatgttttcattcgagtagcagcaaaaattgccttgacccaggtgactctgatgcagcaatcyacattttgagaaacaattacctgggggtggtaagggtgaaggagaaaatatctaagactttggcttccaaaaactacattttaatgtatattaattatatatgtatatatgtataaaattatttaagaacttgaaatacataatagggaatccagaccttaatgcctgagaaggaatcagtagcaaagtatacagttttaggaggctgtgcggtagagaccatactcaatagccagaagaacactgaacttttaaaataaactccaagaaaagaaacaaacacatgcaaattccacagtagcatgcgttagcttgatggggagagaatgcctacctgctaaagcaaatatatctggcccgtacgaaagcaga

SEQ ID NO: 597705 - DNA, 613 bp, Homo sapiens
gtagtcagaagggcccagccatcgctgctgctccagctgggcacaagctccagctggcaaccagtacaaaacagccacagaaagaaattcaagtgaaaccagcagaagagctgcccaccaacctacagaattgtgaaaaacaataaaactgttataagctaccaaaatttggtgtgttgagctactacatttgggggcacaatactatgcagcaaaagatgattgataccgtatatagttatttatttatctctctcagtagcattccttctctcyccagcccaattttatcaatagtcactaatattactagctgctccttttctgaagatgttttacgtatttccatcagtagatctgggtttttttcttttggtttggtttcatacacctttgtaacaaatatttattgcctattatgggtcaagctctttatacataagatcttggtctctggcttcacttcttagcattaccacattccatccctaattgcaatcctccaattgtaacattagtctcactcctccttgtcttgaagacactattatctctctggaacaatattccttccttaactgcctgacaactgcttacctagacacattgcaat

SEQ ID NO: 597706 - DNA, 531 bp, Homo sapiens
ccttctctgtgtgaggaagagcataaggtactgggcactacatgaggataagcatgtatatttcctcttatcttagtaccacgtaaggatggagattcagtcttcatgatcttactatcaatccttcaatatgaattgaggacccctaaaacacatacatatgaaaacacaaacacacatgcatgtttatatacatcatttacaaggatttgctagacagtttgggggatattaagatgaagaatctctgcttttaatgacatcataatcatacaaaaggaaaaaawatatatatataaacacatatatgtgggtatacataaatatatttgtatatgtgtatatacagttatattttatatgtctatattttatatatgtatatatataatataaacatatatacattttgtatgtatgtatctagatatgtatatgcatgtatataaattctcccactattcactcctttagcaataggacccaatatatatattgtaattttggaataattatcaaacaatatagaat

SEQ ID NO: 597707 - DNA, 531 bp, Homo sapiens
ccttctctgtgtgaggaagagcataaggtactgggcactacatgaggataagcatgtatatttcctcttatcttagtaccacgtaaggatggagattcagtcttcatgatcttactatcaatccttcaatatgaattgaggacccctaaaacacatacatatgaaaacacaaacacacatgcatgtttatatacatcatttacaaggatttgctagacagtttgggggatattaagatgaagaatctctgcttttaatgacatcataatcatacaaaaggaaaaaaaatatatatataaacacatatatgtgkgtatacataaatatatttgtatatgtgtatatacagttatattttatatgtctatattttatatatgtatatatataatataaacatatatacattttgtatgtatgtatctagatatgtatatgcatgtatataaattctcccactattcactcctttagcaataggacccaatatatatattgtaattttggaataattatcaaacaatatagaat

SEQ ID NO: 597708 - DNA, 599 bp, Homo sapiens
tccataaggatatgagtgctaacaggaagggaaaggtgctagaaaacaaaatgatcaacgtcctcttcaaaatatatgtatatgtgtgttgtgcctgtacttggaagtgttaagagtaactgtttacatggcagcattttagatattttgattctaatatatatttttgtatttatattttaactttttaacaaggattaatatttctatagtgatacatttaaaaagtaaattgctttctttacttgagactttcacccaagtcaagggaaagagaatgtatcacaagaaatgattctgagtctcaaagacattagggagcatgtgtctcctggttgccaatattgtgaaaaggtattgttcaaattctgacagccctgttgagaataaagaagaatttcttacaattattgttatttttcaagagacagtagaattctcactgctttgcagaatataaaggagcatatgactctgtaaattcctcatcacaagttgcctggtgcctgtattctcctcttttgtgcagcataacaagggaagacagagttgcttgactcttaccatrttattaactctaagtcacatctgaaatagga

SEQ ID NO: 597709 - DNA, 620 bp, Homo sapiens
agtgtcaaggtacaatgtcaaatgttatgcaggttattgctgacattgtcttggcaatccctctccctattatattccatgatggtttttacttttgttttagtgtgatttaactaatgagctatctattttggatgtcttttcattttctcaataactggcctactttctgacgctcacaggcttcctgaataccctgggtactagcacttgcatttgtcttacagattgagatgtgaaacatctctgcagcttttgtgccatcactttgaacctyagacgggcagtgaatctcttttatgacaggctcatattgaaactacagaacagatgggagttggctggaaatcataaagaacagagagaaatcagccatgaattacaattgccaagaaatcctccaaagttattttgtattaactagcatggaatatactggaagacacagaatactgaaagaataatggagttcattgtcttctccaaggagcagtgaaagctttttgatagattctgagcacctgtttctttctcctaagacagaagtagaagatgatttcctttcagacatggagtggttgaggacagggtggggaaacggttggtacttttacctccca

SEQ ID NO: 597710 - DNA, 566 bp, Homo sapiens
tcttccctatgggaagactaagggctggtaccttaagcaaggctcattttagttggtcaaaggctttctagcctctggtttccaaattagggagtgagctttagctgcctgagtcttctatattaggtgacataaggggcaagctatttcactgtacccaggtatccatagtctgcagaaccctgtaatgcccaagaatcccctcagttgcttgagggttttggagaggggaaaaaagaagatgggcttaatcctttcttcacccaatgccttggtcctctctgaaagaccaggtctaggtacttcactgaagtctgacagagctgagctttaggctttgaaatcttatatcctctgttagccagaaaattaagaagacycttactgccctcctgagagattgcctcagttatggcacagaggagaatgtcatctacgtattgtaaagctttaacctgaggataagggaactcaaagaggtcttttgagaatgcctggccaaataagcaggggctgtcttggaatccctgaggtaacactgtccaggttagctgggtggtttggtt

SEQ ID NO: 597711 - DNA, 390 bp, Homo sapiens
ttgtcttaactttggataacctgatgacaatgcacctaggcaaagatctttttgcgatgaattttccaggtgttgtttgtgcttcttgtatttggatgtctaggtctctagcaaggctgggaagtttccctcaattattctcccaaatgtgttttccaagcttttagaattctcttcttgctcaggaataccaattactaccaagtttggtcatttaaaataatcycagacttcttggaggctttgtttatattttcttattctttttttctttgtcttcattggattggattaattagaagactttgtctttgagttctgaatttatttcttctacttattccattctgctgctgagccttcccagagcattccacatttttaaaagtg

SEQ ID NO: 597712 - DNA, 556 bp, Homo sapiens
gtatgtctgggtggtgaacactttggagattattcttcttgtttctttaggtctcttgatcattcaacattcaaaaacatgttgtgttcatgtaattttaaagagggktttttagagaaagaataaccagttgttctacaaatctacaagtagctgataatcttggcctacataggaaatgctagtataattgatgggcataggaggctgcagcagtaagtttaaatttggagccacacatctgtatttaaatatctgacaatctcattgtttgtcattcctgtctacaaaatggcaaaaatgttctgtttcctttctcatttcacttaaaactgaaaatagtactcacacaatagacattttgattaaaacattgtcactagatggagcaaaacagtagattaaagaaatctggcttttgtcaatgatgagctaagaatttaaatagaacaaatcttgataaatatctcaagtgtaggtcgccaaatatgagaaaacagctttaggattttcagtaaggaaaacactatgaggatttcattcattaattcagcaa

SEQ ID NO: 597713 - DNA, 558 bp, Homo sapiens
tatcctgtctgcacagtgaagctactatatcagggcttgtggttcctgtaggctgtcagggagtggcagtattatccttggtgccctgagtctgaatgctgctcctgtgctctcagtatctrcaggagccaatttgaaggctcctgttgtgcctgctagtgacagcagtcaaggtctagcacctaagtataccacaatgtcatcctcactgtcctccctggattccttttgctccatattatagagaagtcagaacatgtagtgagtttgccagctatttaaagaggtcctcctagtattttgtaacatagacccacaaacacaattcagaaaacttggcaacatcctcaaattcatttttctcataatttcacatataatatagtatcagaaagataaattgggaaattgggtccacagaatagcactttagatagactggattaccatacaactccatgctgcccactgactataggcaatgtgacttcgaccaatggaatgcctgtggatataaaatgagcagtagctttcaatgtgctgcatcgtttgcctcct

SEQ ID NO: 597714 - DNA, 558 bp, Homo sapiens
tatcctgtctgcacagtgaagctactatatcagggcttgtggttcctgtaggctgtcagggagtggcagtattatccttggtgccctgagtctgaatgctgctcctgtgctctcagtatctacaggagccaatttgaaggctcctgttgtgcctgctagtgacagcagtcaaggtctagcacctaagtataccacaatgtcatcctcactgtcctccctggattccttttgctccatattatagagaagtcagaacatgtagtgagtttgccagctatttaaagaggtcctcctagtattttgtaacatasacccacaaacacaattcagaaaacttggcaacatcctcaaattcatttttctcataatttcacatataatatagtatcagaaagataaattgggaaattgggtccacagaatagcactttagatagactggattaccatacaactccatgctgcccactgactataggcaatgtgacttcgaccaatggaatgcctgtggatataaaatgagcagtagctttcaatgtgctgcatcgtttgcctcct

SEQ ID NO: 597715 - DNA, 611 bp, Homo sapiens
tatacagaagcaatcctactggcatcagrttggtgcccctcgaggtcagaagtcccagaagaaggagcaggtacccatatgtgctgttctccagcctccttgagtgacatctccaggcatgggagtgaatcagatgaatagggcctgaagagaacccccagcaaactgtatcagccctacagaaaacagacctgaccattgaaagaaaaacaaacaagcagaaagcaacaacagtatcaacaaaaacaacaaaatgtcccacaaaaaccccatccaagggtcagcagcctcaaagaccaacactaaacaaactcatgaagatgagaaagaatcaacaaaaaaatgctgaaaaccccaaaggccagagtgcctcttctcctcctaatgatcccaacatctctccatcaagggcacagggctggatggaggatcagatgaatgaattgacagaagtaggcttcagaagataggtaataaaaactagggtgagccaaaggagcatgttccaacccaatgcaaagaagctaagaattttgataaaaggttagaggaattgctaactagaataaccagtttagagaggaacataaatgacctgatggatctaaaaa

SEQ ID NO: 597716 - DNA, 551 bp, Homo sapiens
gggtgtagtgtcccagggcagcctcttatgaattctcctttcgataaggccatacttcactgtcaccgccaatgttgctgatcttacagtccagagacctcactgaacaggtttctattaactmcaacaatgctgggcctatccctgtaatctttataaagctcactcaaaatgtggacaataaatgatatgcatgctgtacgaagtttctaaatataaatacatttagggcttctcatttttttctctgaagactactggattaaagaagagggggtaaaagaaaatattaataaacaggctcacattctctttcttctctgcaatgaattatcctcatgaaatagtaagcatgcaaaacatggggagcacttacatctaaaatactgcctatctggaactaggtctacacaggcagaattaaaaccaaatccgtaaggttagagagaccaggttggacagacctcctaactaccaagcttcatgaaagaaaagggttctcttagcacatgcatttgactttctagtacggtatggtgagaacgtggcac

SEQ ID NO: 597717 - DNA, 583 bp, Homo sapiens
aaggtgaattatttctgactcacytgctaattttactccctaacatcatacccctaaaaaaatcataaattaatgagtatggaaattcttatgtgttcaaaatgatttatgtcctctaatgaccaatggtctatcttgccatgtttagaggccacatgattaagaatgcttaaaaagtagtctccttggaaattatcaattctgcccacactaagacatttcaaagctcttaaaaacaagtattcatgcacaactgtttctcctccaaaaggaagatgctagactgtacgtcttatcaaataagtgattaatcaggattctgtatgccctatttttctttcactcttttgctatttgcctgttggccattttaccactcattagcacctttaaacaaatgaggtcaaactccacccagccaacttggcaggcatgaggtgcctgccccgcgcctccacgctcctcccctgccccaagcacctgaatgtgcatctctcgtggcccccacctctgtgtcaaaagccatttacactcagtctcccttcctgcctagtcttcccagaactggcctgttggaaatcca

SEQ ID NO: 597718 - DNA, 583 bp, Homo sapiens
aaggtgaattatttctgactcacctgctaattttactccctaacatcatacccctaaaaaaatcataaattaatgagtatggaaattcttatgtgttcaaaatgatttatgtcctctaatgaccaatggtctatcttgccatgtttagaggccacatgattaagaatgcttaaaaagtagtctccttggaaattatcaattctgcccacactaagacatttcaaagctcttaaaaacaagtattcatgcacaactgtttctcctccaaaaggaagatgctagactgtacgtcttatcaaataagtgattaatcaggattctrtatgccctatttttctttcactcttttgctatttgcctgttggccattttaccactcattagcacctttaaacaaatgaggtcaaactccacccagccaacttggcaggcatgaggtgcctgccccgcgcctccacgctcctcccctgccccaagcacctgaatgtgcatctctcgtggcccccacctctgtgtcaaaagccatttacactcagtctcccttcctgcctagtcttcccagaactggcctgttggaaatcca

SEQ ID NO: 597719 - DNA, 583 bp, Homo sapiens
aaggtgaattatttctgactcacctgctaattttactccctaacatcatacccctaaaaaaatcataaattaatgagtatggaaattcttatgtgttcaaaatgatttatgtcctctaatgaccaatggtctatcttgccatgtttagaggccacatgattaagaatgcttaaaaagtagtctccttggaaattatcaattctgcccacactaagacatttcaaagctcttaaaaacaagtattcatgcacaactgtttctcctccaaaaggaagatgctagactgtacgtcttatcaaataagtgattaatcaggattctgtatgccctatttttctttcactcttttgctatttgcctgttggccattttaccactcattagcacctttaaacaaatgaggtcaaactccacccagccaacttggcaggcatgaggtgcctgccccgygcctccacgctcctcccctgccccaagcacctgaatgtgcatctctcgtggcccccacctctgtgtcaaaagccatttacactcagtctcccttcctgcctagtcttcccagaactggcctgttggaaatcca

SEQ ID NO: 597720 - DNA, 583 bp, Homo sapiens
aaggtgaattatttctgactcacctgctaattttactccctaacatcatacccctaaaaaaatcataaattaatgagtatggaaattcttatgtgttcaaaatgatttatgtcctctaatgaccaatggtctatcttgccatgtttagaggccacatgattaagaatgcttaaaaagtagtctccttggaaattatcaattctgcccacactaagacatttcaaagctcttaaaaacaagtattcatgcacaactgtttctcctccaaaaggaagatgctagactgtacgtcttatcaaataagtgattaatcaggattctgtatgccctatttttctttcactcttttgctatttgcctgttggccattttaccactcattagcacctttaaacaaatgaggtcaaactccacccagccaacttggcaggcatgaggtgcctgccccgcgcctccacgctcctcccctgccccaagcacctgaatgtgcatctctcgtggcccccacctctgtgtcaaaagccatktacactcagtctcccttcctgcctagtcttcccagaactggcctgttggaaatcca

SEQ ID NO: 597721 - DNA, 569 bp, Homo sapiens
tacagtctcacaattgagtcaatccccacgcaagagggaaaacagccccaaagcacccagtgtgaattttgaaaaaaaaaaaaaaaattcagttcagggaattgaactgcccacactgagcaaagccctgtgccagggacagaagagcagctgccacagccctccctgtagcagccttgcatccccctccaggaactctggtaagcaaggcaggagatgtgcaccagttaccctgctccrgaactgaggcctgagaacaggacagggccacaaagagcctccaggagaggctgggagggagcttctctgagagggtgacacctgaactcggtgatgaagaagagagaggtgcaaggcagagtgagggacagatacccagaaaaaagcagaagcagcacagacccacctgcttagtaaaatcaggagaccagggaagaaggcaggaaagaaggtaagaaaattacacactcaaagtgatcagagatctcaattcgagggtggttattttatcaaacagtcactagagaggaagaaatcaacaactgcaacagctgccgtggactaaatct

SEQ ID NO: 597722 - DNA, 449 bp, Homo sapiens
cagtaactggtgtatattgctttatattttaacaatctttccacagattcagaatcaggaaccaaatgtattcatcctgaggtgatttgcttattgcctgtgaatgcctcttaaacaagagcaacaatgcacttttcactgaaacasgtttgatttcagcgttctggccagcgcttggaaaaaccctcctgcttcattcccaatgcataaatctcagtcctgcactctccatttccatgaaatgagaagggaagaggggaggagctgagcttcattaacaggtggctgggtttggcaggggcattcggttgcattctttcatcctcccttttcctcactcagttcaagctggtaatcaggggggaaaattgttctaaaatgcaaatgcagtgcctgatagaaggggctgctgtgaggaagatctccatgagaaacactgcctctgctaa

SEQ ID NO: 597723 - DNA, 240 bp, Homo sapiens
ttggacaaataagtaacatttgcattttgtttgtgtttagagtttccaccttccgggaawttggggggccttaagattcaactaaattataggtggttgaccttgatgtatctaaacagtaactaccatttttatttactttttttagcaatgggaacataggaaactatagcaaattgaggtaacaatttactataggaaaaaaaaaaaggtcaggagcccattactttgttcagccat

SEQ ID NO: 597724 - DNA, 567 bp, Homo sapiens
atagcaaattgaggtaacaatttactataggaaaaaaaaaaaggtcaggagcccattactttgttcagccatgaacatatgtaaaatactggctgttacttcaaaaaaatgcaatacagscatattaaaggcacaagaaaagaaaaattgtgagaaagatatataagggagttaaattttcatcatagaaggaaaccaataaataatgcctaaatgaatatatttttaaagcagtataatacttagaagtaaagacctaattaactacagagcaaaagtaactgaaatctattatccagatggggatgagggaggtatagtgtaaacaattgccagtttttattatatgattttaatactgttagctcttcaactatgccaacatctaaacttaataaaaaagaataagaattggcagtttgtcatgaaataattttataatgactctcatttagaattatcaaaataaattttcattcccaaagaagtaaacttcattgtgcaaaaaattgtattcatgtagaagagctaaaatgaattttaatacagacggtgtgtaatgtgtgc

SEQ ID NO: 597725 - DNA, 567 bp, Homo sapiens
atagcaaattgaggtaacaatttactataggaaaaaaaaaaaggtcaggagcccattactttgttcagccatgaacatatgtaaaatactggctgttacttcaaaaaaatgcaatacaggcatattaaaggcacaagaaaagaaaaattgtgagaaagatatayaagggagttaaattttcatcatagaaggaaaccaataaataatgcctaaatgaatatatttttaaagcagtataatacttagaagtaaagacctaattaactacagagcaaaagtaactgaaatctattatccagatggggatgagggaggtatagtgtaaacaattgccagtttttattatatgattttaatactgttagctcttcaactatgccaacatctaaacttaataaaaaagaataagaattggcagtttgtcatgaaataattttataatgactctcatttagaattatcaaaataaattttcattcccaaagaagtaaacttcattgtgcaaaaaattgtattcatgtagaagagctaaaatgaattttaatacagacggtgtgtaatgtgtgc

SEQ ID NO: 597726 - DNA, 429 bp, Homo sapiens
taaaaatggtcatttgtatcacctagcatgtgagcaactagaggttgtatccctaatatctgacagtgtttgtttattttaaaagtgaggtgaaatattcacataggtggcaccaaccttagcaactgctcagtagctgcygtggtagctggaaacggctgtcctgctgattgcctccgtgtgtgacatctccaccgcagcagctctgggttcgtcagtgcaggggtgctgcctaggaccttagctagttatcatccccaggtcatttgtgtggcttagtttatcaagtgagctaacagaagtcctaaaggcagggtccgtgggcaggtgaaagaccacagggacattgtaatcgggcaggaaaccagcctggatgctcaggaatgtgagaatctcagagggtagtaatggagagagaggaacacaaac

SEQ ID NO: 597727 - DNA, 429 bp, Homo sapiens
taaaaatggtcatttgtatcacctagcatgtgagcaactagaggttgtatccctaatatctgacagtgtttgtttattttaaaagtgaggtgaaatattcacataggtggcaccaaccttagcaactgctcagtagctgccgtggtagctggaaacggctgtcctgctgattgcctcmgtgtgtgacatctccaccgcagcagctctgggttcgtcagtgcaggggtgctgcctaggaccttagctagttatcatccccaggtcatttgtgtggcttagtttatcaagtgagctaacagaagtcctaaaggcagggtccgtgggcaggtgaaagaccacagggacattgtaatcgggcaggaaaccagcctggatgctcaggaatgtgagaatctcagagggtagtaatggagagagaggaacacaaac

SEQ ID NO: 597728 - DNA, 429 bp, Homo sapiens
taaaaatggtcatttgtatcacctagcatgtgagcaactagaggttgtatccctaatatctgacagtgtttgtttattttaaaagtgaggtgaaatattcacataggtggcaccaaccttagcaactgctcagtagctgccgtggtagctggaaacggctgtcctgctgattgcctccgtgtgtgacatctccaccgcagcagctctgggttcgtcagtgcaggggtgctgcctaggaccttagctagttatcatccccaggtcatttgygtggcttagtttatcaagtgagctaacagaagtcctaaaggcagggtccgtgggcaggtgaaagaccacagggacattgtaatcgggcaggaaaccagcctggatgctcaggaatgtgagaatctcagagggtagtaatggagagagaggaacacaaac

SEQ ID NO: 597729 - DNA, 510 bp, Homo sapiens
gcactgagcacagccatttctatgaattgtctgatttaatactctaacgacaccatgttgggtactacttcaatcttctcttttacagaactgaatcatagagtttcagtaacttctccaggaatacttgctagcaatctacacatgattcactgatgtaagtcttgtgagtgagttgtacacagaacactatcggtgctccgagaaagacaaagacaacagcaatacacaggaagacatcccagggtgacgacatatgagctgggtgctagcagactttggatttctagggaaacacaacagtagtccaagatcttgtgtataagatccttataaagaagaaatatacaaaagtttagttgctatgcccaggatacttagacaacattctcatgactcaagtactgaagtctcaataccttgaacaatctctctttctctcctctctctctctccccctttccttctccctmcatccacagaggctaccacaattaccatgtctttaag

SEQ ID NO: 597730 - DNA, 603 bp, Homo sapiens
gttgcttgtgtgtttggtgtcttcccctgggcttttctttgtggaaagttatttgattaagaattcaatgttttcacatgtgtagccctgttcagattatctatttcttcttgactcactttaggtagttcatgtctttctggaaattcatccattttaatcaagtaatttaatttgttgtcataaaattgtttatatgatagtattgccttataggccattttatttctgtaattgatagtaatgttccatcttttattcttgaatttagtgttttgagtcttctcttttttctttgtcagtgtagccaaaagcttgtcaattctgttgatctcaaagaactggttctttgattttctctattgtgtttatattttctatattgtgtatttctactctaatcttcattagttttttccttgtgcttgttttrggttcagtttgctctttgttttttctttaagttttaagatggttattgatttgagatctttttttttaatgtagttgtcctataagttttggtgtgtagtgttttcattttcactcatgttaaaatatttttatattatctttgtgatttcttatttgacctatgattat

SEQ ID NO: 597731 - DNA, 530 bp, Homo sapiens
cagattcctgagtagctgggactacagatgtgtgctatgatgccaggctaattttwgtatttttagtagagatggggtttcaccatattgaccaggctggtcttgaactcctgacctcaagtgatctactcacttcagccatccaaagtgcttggattacaggcatgagccattgtggccagcccaattttaaatccctgtcttttgctggagtatttggtccatttacatttaatgtaattaatgacataacaacgtttgtatctaattttttgctatttgtttattctatgacatgtcatttttgatctgctattttttcattgttgccttcttttaggctaaaactttttaatatgccattttaatctccttgtgctttcttttactgtatcatttttttgagtaattttctgtctttctttcttttttttttttttttttttttttttttgagatggaattttgctcttgttgcccaggctggagtgcaatggcatgaatgtgtgatcctgactcaccgcaacctc

SEQ ID NO: 597732 - DNA, 530 bp, Homo sapiens
cagattcctgagtagctgggactacagatgtgtgctatgatgccaggctaattttagtatttttagtagagatggggtttcaccatattgaccaggctggtcttgaactcctgacctcaagtgatctactcacttcagccayccaaagtgcttggattacaggcatgagccattgtggccagcccaattttaaatccctgtcttttgctggagtatttggtccatttacatttaatgtaattaatgacataacaacgtttgtatctaattttttgctatttgtttattctatgacatgtcatttttgatctgctattttttcattgttgccttcttttaggctaaaactttttaatatgccattttaatctccttgtgctttcttttactgtatcatttttttgagtaattttctgtctttctttcttttttttttttttttttttttttttttgagatggaattttgctcttgttgcccaggctggagtgcaatggcatgaatgtgtgatcctgactcaccgcaacctc

SEQ ID NO: 597733 - DNA, 530 bp, Homo sapiens
cagattcctgagtagctgggactacagatgtgtgctatgatgccaggctaattttagtatttttagtagagatggggtttcaccatattgaccaggctggtcttgaactcctgacctcaagtgatctactcacttcagccatccaaagtgcttggattacaggcatgagccattgtgrccagcccaattttaaatccctgtcttttgctggagtatttggtccatttacatttaatgtaattaatgacataacaacgtttgtatctaattttttgctatttgtttattctatgacatgtcatttttgatctgctattttttcattgttgccttcttttaggctaaaactttttaatatgccattttaatctccttgtgctttcttttactgtatcatttttttgagtaattttctgtctttctttcttttttttttttttttttttttttttttgagatggaattttgctcttgttgcccaggctggagtgcaatggcatgaatgtgtgatcctgactcaccgcaacctc

SEQ ID NO: 597734 - DNA, 517 bp, Homo sapiens
ttgcctgaacccaagaggcagaaacttcagtgagctgagatcacgccactgcactccagactgggcaacagacccagactctgtcacaaaaagaaaaaaaagtgaaygtagaaaatctttgaaatcatattttctgctttatttttcttctcaatttttaattaaaaatatttggggatttcaaatgcctatcagtgacagactggataaaaaatgtggtacatatgcactatggaataatatgcagccataaaaaggaatgagatcatgttctctgcagggacatggttgaagcagaaagccatcatcctcagtaaactaacacgggaatggaaaaccaaacaccgcatgttctcactcataagtgggagctgaacaatgggaccacatggacacagtgaggggaacaacacacattggggcctgttggcagggcaaaggggagagagtgcatcaggacaaatggctgatgcatgtggggcttcataccttggtgacaggtcgatagatacagcaa

SEQ ID NO: 597735 - DNA, 512 bp, Homo sapiens
actctagtacctcctataaggagaatcatacagtatttgtctttttgtgtccggcttatttcacttagcataatgtcctcaaggttcatstatgtgggatttctataaatttcattctacattgcttatttatatatatcactccactacataatgtgttccctgagggcaggcattacatttttaattcctttgtgtcttcagtgcaaatgcaagtgtgattaatgagtaaattaacacttataactttatttttcagcaaacattttgtcagcattcacaatgatttttttaaacaaatttttgtttcctgaattgtaaaagtttaaattgttccttgattgccatctcaaaactcttcattcagcaaaattcagacaccaatcttttgctgtttgtttttaatattttggctaacagagctattgcccattacagcagaatgatttctctgtattgacatgctgtcaagcaggacggtatccttaggctcacttcaatggccacagctt

SEQ ID NO: 597736 - DNA, 512 bp, Homo sapiens
actctagtacctcctataaggagaatcatacagtatttgtctttttgtgtccggcttatttcacttagcataatgtcctcaaggttcatgtaygtgggatttctataaatttcattctacattgcttatttatatatatcactccactacataatgtgttccctgagggcaggcattacatttttaattcctttgtgtcttcagtgcaaatgcaagtgtgattaatgagtaaattaacacttataactttatttttcagcaaacattttgtcagcattcacaatgatttttttaaacaaatttttgtttcctgaattgtaaaagtttaaattgttccttgattgccatctcaaaactcttcattcagcaaaattcagacaccaatcttttgctgtttgtttttaatattttggctaacagagctattgcccattacagcagaatgatttctctgtattgacatgctgtcaagcaggacggtatccttaggctcacttcaatggccacagctt

SEQ ID NO: 597737 - DNA, 578 bp, Homo sapiens
tctctttatcctattttgcagattatttttattgtggtaagaacacttaaggtgagatccaccctcttatcacatttttaaatatacatgacagaactgcttattacaggcacaatgatatggagcagatctcaaaaacatactcgttttatgaaactgaaactttctaactgttgaagagcatctctycttttttccctctctaagcccctggcaaataccattctactctctgtttctatgagtttgactactttatatacttcatacaagtggcatcatgcagtttttgccctttgatgactggcttatgtcacttagcatattgtcctcgaagttcatgttatatctaaaagaacgaagtcaggatctcaatgaggtgtctgcactcccacgttcactgcaacataattcacaatagccgagatttgatagcaacctagatattcatcaataggtgaaaaggtaaagaaaatgtggtatacacatacagtggactattattcagtcataaaaagaaggaaacattcacgatgtcttgtgatatttgtgtattttctttgccagtcttctctggc

SEQ ID NO: 597738 - DNA, 578 bp, Homo sapiens
tctctttatcctattttgcagattatttttattgtggtaagaacacttaaggtgagatccaccctcttatcacatttttaaatatacatgacagaactgcttattacaggcacaatgatatggagcagatctcaaaaacatactcgttttatgaaactgaaactttctaactgttgaagagcatctctccttttttccctctctaagcccctggcaaataccattctactctctgtttctatgagtttgactactttatatacytcatacaagtggcatcatgcagtttttgccctttgatgactggcttatgtcacttagcatattgtcctcgaagttcatgttatatctaaaagaacgaagtcaggatctcaatgaggtgtctgcactcccacgttcactgcaacataattcacaatagccgagatttgatagcaacctagatattcatcaataggtgaaaaggtaaagaaaatgtggtatacacatacagtggactattattcagtcataaaaagaaggaaacattcacgatgtcttgtgatatttgtgtattttctttgccagtcttctctggc

SEQ ID NO: 597739 - DNA, 430 bp, Homo sapiens
aggtgagatccaccctcttatcacatttttaaatatacatgacagaactgcttattacaggcacaatgatatggagcagatctcaaaaacatactcgttttatgaaactgaaactttctaactgttgaagagcatctctccttttttccctctctaagcccctggcaaataccattctactctctgtttctatgagtttgactactttatatacttcatacaagtggcatcatgcagtttttgccctttgatgactggcttatgtcacttagcatattgtcctcgaagttcatgttatatctaaaagaacgaagtcaggatctcaatgaggtgtctgcactcccacgttcactgcaacataattcacaatagccragatttgatagcaacctagatattcatcaataggtgaaaaggtaaagaaaatgtg

SEQ ID NO: 597740 - DNA, 532 bp, Homo sapiens
tgttacacacaatttatggaaattacacataaagtgttgacagtccaaaaatgtacacatatgtgagacataatgtaaaactcatacctgagtgtagatagccgagagaaaactccccacaaacccaaaggagatacaagatcattatggttgtgataggtgaacctagagagagtaataaagtgataatagactgcagtcctcagactttgcactgtgttaccctgggcgcagaaccacaggtcygcctgtggcattttaattttttgagggaaacagggcaagagccaacaactgtcagatgccacacaagctacttacttgagagagctcactgtttcaacctcagacagtgctgcatctcttctgatgacatatctctacaaaattgcttttttattctttctgtgacaaaaggtgagacccttgtgaaaatgaatgtggaagggaaatgagcatggaggttcctgggagtgaggagttacgaagcctgaataggggtgcatttcctattagtcagttattgctatga

SEQ ID NO: 597741 - DNA, 605 bp, Homo sapiens
ggtgaaaccctatctttactaaaaatacaaaaaattagctaggcgtggtggtgcatgcctgtagctacttaggaggctgaggcaggagaatcgctggaaccctggaggtggcggttgcagtaagctgagactgcaccattgcactccagcttgggtgacagagcaagactctgtctcaaaaaataaaaaaaatttggggtaataaaattatcagggctattgtaggaatttttataaaggaagaattgagggaaatatctaggtttgcatcctcagcaatgtggtagatactgctgccatttactgagatggacaaaagcaggaggacagcagtttgtgaggactaccaaaaattccgtstagaaatgagggcttgaatggaaatgtaaacgctttttggttctaacatacaatagggcattggtctgaagtgatgtcacccagctcgcagaagggaaagaacctgaggacattgggtctatattggccaaggccgggaaacagagcggtcatagatggagtgtattcagcctcaaaacaagttcctaggggcgctcacagaggcacctgggtgagccagtctcgaagtgtttttgtaaaatata

SEQ ID NO: 597742 - DNA, 410 bp, Homo sapiens
ttggttctaacatacaatagggcattggtctgaagtgatgtcacccagctcgcagaagggaaagaacctgaggacattgggtctatattggccaaggccgggaaacagagcggtcatagatggagtgtattcagcctcaaaacaagttcctaggggcgctcacagaggcacctgggtgagccagtctcgaagtgtttttgtaaaatataacacaggtcggggagaatgaagccaaagaagtccacgttcagggatgccttcaaatctgaaaaggagtttcagtaactmcaagtttagtaagcgcccaggagccatgtgtgaggaattctataatctcagtcagcagatagacataaagtactgccaatctgcagaatggaagattaagactagaaaacaggtggtaaggt

SEQ ID NO: 597743 - DNA, 410 bp, Homo sapiens
ttggttctaacatacaatagggcattggtctgaagtgatgtcacccagctcgcagaagggaaagaacctgaggacattgggtctatattggccaaggccgggaaacagagcggtcatagatggagtgtattcagcctcaaaacaagttcctaggggcgctcacagaggcacctgggtgagccagtctcgaagtgtttttgtaaaatataacacaggtcggggagaatgaagccaaagaagtccacgttcagggatgccttcaaatctgaaaaggagtttcagtaactccaagtttagtaagcgcccaggagccatgtgtgaggaattctataatctcagtcagcagatagacataaagtactgccaatctgcagaatggaagattargactagaaaacaggtggtaaggt

SEQ ID NO: 597744 - DNA, 247 bp, Homo sapiens
ccctgaacagactcaagctctaccagggacctatgggcatccctgtcatagttttatattagtatacagtttcctgactttgatggttgtgccatggttatataagacagygtccctgttttgagaaaatacatggaaatcttcagggatagagtgtcttgacgtctccaacttactcatgaatggtgtgggaaaaatagagagagacactgataaagtgaatgggacacaatacaatattacactt

SEQ ID NO: 597745 - DNA, 620 bp, Homo sapiens
ttgcccctttccagtgacaaatctaatagttaaacagaaagacaaagcagtaagcttgaaaaccaaaatcacaagtctggatggcagataggcgttcagaggacaaggtggtcattgtggactagatattccatgggggagttttggccttagctggactctaaaggaacccaggactgagtccttggagaggaagattctggaggttagatggagaggacagcaggagcactggccccgcatgagctagtggcccttccctaagacggagaagatctttgtccttctgatggagagcttgtctcatttttgtctstctgtctgttcttcagaataccctgaaaatgtttttagcatacgatttcagaatcctcacgaaaagcctcagtgtttctacagttatagagagattctaaaaatgtgtggatcaagggttaccacttccacttattaacctacttgtggtaggtaatatattcatcacattcacttgcatgtagatattactctcttctaaaggcatacagccattcatccaatttcatacagtaattatccaaggctctctgcccctagttacaagaactgagttaatgtgctcctgagtctgtctatatttt

SEQ ID NO: 597746 - DNA, 534 bp, Homo sapiens
gcactgcctgggttatgtagatctctttaagctaaacttccgtgcttttaatcttctttacctcttaggactcttttcaatctctcttcatttctgtaccgcttatcattccacccatatttttggcgaattttatcgtttagcccttaaatagaattgagtttttcattatacattgactcagcgatctgcaagtaatggatgcatttaaaaatgacgacaatggaacctaaacccaaagagttgtagactcattcagaaggcaccagggatgcgttcggcagtgggaaaaccacagtacccaactgcacagaagcacgctcttgtgggagagcaatgagactcacagggacsctccagggattgtgaattcacagggggatgagactgcacctcgctttgagtctagattattaacagttttatttatcatcaccaagagctttatttatgatcagcaagaacttgatttagaggaacgacaccttatttaattgaaattgtcagggaaacttagtgaggaagaatgtaatt

SEQ ID NO: 597747 - DNA, 580 bp, Homo sapiens
gaattctgcctcagcctcccagtagctggggttacagacatgcaccaccacacccagctacttttcgtatgtttagctgagacaaggtttcaccatgttggccaggctggtctcgaactcttgaccttttgtgatctgcccaccttggcctcccaaagtgttgggatcacagacataagccaccatgctcagccctagagatattttttaaatgtaaataaaagtcaatacaaatatrtatatgtatatatcttttctgtctctcttttgtcaagaatagagaaatgctatatataccttgcttttaattagtataatttagaaatcttttcatatcaatacactaatagtttttaattttttttacagatgcatagtattccactgtgtggatagtccataatttattcagttctctgttgatgaacattgagttttttgtcaaaatttttattacaataatactgcaagtaatatctttgtatttaattcattttagcatttctatatctgtagcataaattcctagaagtagaattgctaggttaacgggataagtagttgaagctttggtagatac

SEQ ID NO: 597748 - DNA, 580 bp, Homo sapiens
gaattctgcctcagcctcccagtagctggggttacagacatgcaccaccacacccagctacttttcgtatgtttagctgagacaaggtttcaccatgttggccaggctggtctcgaactcttgaccttttgtgatctgcccaccttggcctcccaaagtgttgggatcacagacataagccaccatgctcagccctagagatattttttaaatgtaaataaaagtcaatacaaatatatatatgtatatatcttttctgtctctcttttgtcaagaatagagaaatgctatatataccttgcttttaattagtataatttagaaatcttttcatatcaatacaytaatagtttttaattttttttacagatgcatagtattccactgtgtggatagtccataatttattcagttctctgttgatgaacattgagttttttgtcaaaatttttattacaataatactgcaagtaatatctttgtatttaattcattttagcatttctatatctgtagcataaattcctagaagtagaattgctaggttaacgggataagtagttgaagctttggtagatac

SEQ ID NO: 597749 - DNA, 566 bp, Homo sapiens
caaactaaagtttaaccaattaagatgcagtgtagatttgaagtgtgacaaactatcaccacaggcccagatagaaatagagtcatcattctgtttgacctacaaccataaccatgagatctggaaggaagtgccacgattctcaaagatgtagcatcttataagagttgaaaatatatactctacattcagatagttcaagtcaatccttggggcttcagaagagccccacgatcttgcataagttatttaacactctgtgactctctaygactattaataatggaagtaatatgagaatctaccatacaatgtttggtgaagactaatgaaataatatatgtacattgtttaacatattgcttgacacttggcaagtgcttaaatgttaactgtaatcatcattattattatcatcagcattatcgtactcctcacatgagacagtccctcactttataaatgaataaattaagttttagagcaacttttctcagcactagtgctagaatattgctatcacttagaacatgcaataagtaatttatttctaatgtcaactatta

SEQ ID NO: 597750 - DNA, 625 bp, Homo sapiens
gatgtcaacacacaaattccagcccccaacccagaccatgtaaatcatattgatagtgaagtattaagtttgtcaactagctcacttctaaggcaaaaacattttttctttttgccactgttggcaaaatgaggtactattaggctgacattactaaataaatgtatttcatggtttctgtacatttaaaacgtgtttttccacatatcttcaaatctgtcaaaagcaattggatggaccatgtttaaaatagttacaaaggtaaccttgcaactacttaggatgaataattttatcttctatgtacaaataagagttcattattaagcgggctatataaattcattacctattccataagtgtctgataacaattagctctgtggtgaggctgaagaaatatatccctatcatatttataggattattaatayggctattgtcctttaaaaatctaatttgcccacaatgcatttcaaacatctagttaaacaaaattattttttctgaatcctggataaaattcttatctttcacaattacacagcagtttcaaaacgtggtgtttattcagttgtttattgctttaaacaggagttcattaagaaaaatgtgtacataaatg

SEQ ID NO: 597751 - DNA, 625 bp, Homo sapiens
gatgtcaacacacaaattccagcccccaacccagaccatgtaaatcatattgatagtgaagtattaagtttgtcaactagctcacttctaaggcaaaaacattttttctttttgccactgttggcaaaatgaggtactattaggctgacattactaaataaatgtatttcatggtttctgtacatttaaaacgtgtttttccacatatcttcaaatctgtcaaaagcaattggatggaccatgtttaaaatagttacaaaggtaaccttgcaactacttaggatgaataattttatcttctatgtacaaataagagttcattattaagcgggctatataaattcattacctattccataagtgtctgataacaattagctctgtggtgaggctgaagaaatatatccctatcatatttataggattattaatatggctattgtcctttaaaaatctaatttgcccacaatgcatttcaaacatctagttaaacaaaattattttttctgaatcctggataaaattcttatctttcacaattacacagcagtttcaaaaygtggtgtttattcagttgtttattgctttaaacaggagttcattaagaaaaatgtgtacataaatg

SEQ ID NO: 597752 - DNA, 541 bp, Homo sapiens
ctggtttcagatattgacaactgtgcaaaccatcatgaagattaggatttgctaacaggcagtttttcatttacttgtcgtaagacaacacttttctccatgctttttatagtaataaaatgtctcctaatgtaaggtcagaggaaggagaagatttgggactggtgaggaaggcagtagattctggacgatggtatttttagatggcagcaactaattttctccattgttctcatcccacactctgattcagtcggaatattgctattagwcttgttattgatccaattggcattctatttcaactttggaatgaagaaaatggacataaattatttgtcttttaacctaaatgatacttggtaactactggagtgggacacttattttcaagaatctttaaactccatgattttagtcattcagccaaagtttgtaggtactagaagataatctatggctatttatgtacttatttatttattttgcatggaaagaaatgaataccaaagtcgttctccatatatttctgttggtcaag

SEQ ID NO: 597753 - DNA, 549 bp, Homo sapiens
gctatttatgtacttatttatttattttgcatggaaagaaatgaataccaaagtcgttctccatatatttctgttggtcaagtaagcatattctattttattcatattaaaatgtgacttgtttcatacatttccttggcttgaaagttaggaatcaaaaagcacaagatcagaaaacattagaggtacaggaattggaattgaaatgattgctatcaggcagtccagaaataaagcaaataatgtcttggattttaaaatctaattcaacttttactcactgcttcatgattaaaatgttcctttgaaactaaaatttacttctccatatttgcaaggtacttaatggttagggttttattttcagtctgccaaattatacatgttcatgrcactgacaaccctctaaatagtgacacttttattaatgaagttcaattttctcttaagaactaaaagtagatgcaaggattaaccagaaaggagacaagaagcaccagaaggaaggaaggagagggttcgaggcagttcacccagccagggactaag

SEQ ID NO: 597754 - DNA, 611 bp, Homo sapiens
cagccaaattgagcaccactggcaggttatttccactgaagaaaaagggctaatttttatccctaacttcaaccaaaacaaagttacatgcaccaaagatgcataygcacaatgctcactgataaatgtaggtgaaaggactgaattagaaaaatttattttcctcatcagcataataaattactcagacaaggctcactattgaatgccaaaaccactgggtgaaaggtttggaagtaacaagatatttacatgatattcatatcatcctacagagtacatataaaatgcaaagagaaaattccactttaaaattcagtgatttttacatttaaaaccttaatcaggtatgcaaacttagcatcaccaatagtgggacaacctgatatcagctgtctcagtgtgatacactaaggaatatcaatatcatctatgtggtatcttgccaaaaatgttgcttgattctaatcatgagaaaacaatttaaaattttcaaattgtaggacattctacacaacaatgggtctgtgctcttcaaaaaaaagagtcatcattgaaaacaaacaagaaaaaaccaccagagtattctgtgttagagagactggaatgac

SEQ ID NO: 597755 - DNA, 484 bp, Homo sapiens
caatccacacagaaaatgcattcgtgcagtaaaaatttatgaatgcctacgggtrctgagcactgatccagggagcggtactccaggtaatatttcttgatttataatacatagtgtgtagttattagatatattatgtaataacatgtattttcctctttgacaagggatggcaatgaacaagacatcatctgctctcttagaacttacctttagtgggagagacagataaaaagtaaacaaatatatacataactttaagtaatacatgctttttatatttttataatttcatcagaaaaatatgtagattaatgagagagagggtgacggggtgaggggcagaggtgtctattttagagatttcttactgagaaagtgtgattggaggggacactgaatggaaaggacctagctacgcaaaaacctgtaaggaaggtaagtaacattccaagtaaagggtggcagtgtcacagggcttcag

SEQ ID NO: 597756 - DNA, 484 bp, Homo sapiens
caatccacacagaaaatgcattcgtgcagtaaaaatttatgaatgcctacgggtgctgagcactgatccagggagcggtactccaggtaatatttcttgatttataatacatagtgtgtagttattagatatattatgtaataacatgtattttcctctttgacaagggatggcaatgaacaagacatcatctgctctcttagaacttacctttagtgggagagacagataaaaagtaaacaaatatatacataactttaagtaatacatgctttttatatttttataatttcatcagaaaaatatgtagattaatgagagagagggtgacggggtgaggggcagaggtgtctattttagagatttcttactgagraagtgtgattggaggggacactgaatggaaaggacctagctacgcaaaaacctgtaaggaaggtaagtaacattccaagtaaagggtggcagtgtcacagggcttcag

SEQ ID NO: 597757 - DNA, 505 bp, Homo sapiens
aggcactcccttctttcttcctgacaaaccttgaaccagaaaagttcctgttgccagtggaagatcttcaatccactctagttcaaagtaaagtttttttcaattacagctgatactggcttgaaaatataaaataaattattaaaacacatcagaggaggtgcgtaaagaaaacagggaaatggaaagcaaagggaaaaggaaatggagagaaacaaaggaaaaagaaaatatagaagtctgatgaatttgggaattaaaaggcctgaattcctgtccctgacacctcctggctgtgtaatcaagcaatgctcatcaccatcaacatcattatcagagctacgatttatacagtgtttaccatgaactcattcctttacacaatcctcatagcaactttaaaagtaagaycctattaccccactttatggatggagaaacagattcaaaaaacaaataatcagccctgggttttacaactaggagatctcagaatgaggggttt

SEQ ID NO: 597758 - DNA, 519 bp, Homo sapiens
tatgcaggatttccctgagccctgaaatttgaggtagcacaaactaataccttggtattatgaccttctatatacgcattggcaacgcagtaaattccagatgccttgaagttaagaaactctttattatcatttatttattttggtaaaataataataatcccaccgttcacagagttcaggatggggatttgggctggagaaagaacatagagtttgtccattatcactaacttgttacaactgaataacattaagacctaaaccaaagaagcaaagaattgccaagcaccattgattttcttttgtttctacagggtttctaatgctcttacatttcatttttgtactttatgatcactaaaaatgttgggctaagccctactggcaaaccacaatctaggcattgtgccactcaaagatttaatggaaagaccatatcttactcacagtagaaaaaaaaaatcaycttttcccactatttattgtatggaaatactgttactagtttgcaaaaat

SEQ ID NO: 597759 - DNA, 570 bp, Homo sapiens
gaggttctatgtactcgccagaggggagccatagatttgactttgacatttctagtgatcaatcagagagggaaaagtgattggtgataagacgcatgatgactgtaatatagaatcagataatttatttgggaattgtatctactaagatcagtgagaaatttttcctatggatccttagggaaaagagatggcacaatgtgataaaatacatgcttatcaacattcttaaatatatacaacattgagtttcatagatcaatttcccttaatgttcatcaaygtaggaaaatagaccgatgagagaataattcaatggatgtgttctctaggtgacaaatatgatcattctttgatatgatccaatgtagcaaagcctctggattgttcacttaagtgtagattcatgaatctctcccatctctaccgcttctcatccccctagagattttgactcagcagtttggaagtagattcctagaatttttgttttaggtaatcaccctgggttattagacaacaggtataagaatcacacttaatgctgatttttgagtatttagaggaaca

SEQ ID NO: 597760 - DNA, 570 bp, Homo sapiens
gaggttctatgtactcgccagaggggagccatagatttgactttgacatttctagtgatcaatcagagagggaaaagtgattggtgataagacgcatgatgactgtaatatagaatcagataatttatttgggaattgtatctactaagatcagtgagaaatttttcctatggatccttagggaaaagagatggcacaatgtgataaaatacatgcttatcaacattcttaaatatatacaacattgagtttcatagatcaatttcccttaatgttcatcaatgtaggaaaatagaccgatgagagaataattcaatggatgtrttctctaggtgacaaatatgatcattctttgatatgatccaatgtagcaaagcctctggattgttcacttaagtgtagattcatgaatctctcccatctctaccgcttctcatccccctagagattttgactcagcagtttggaagtagattcctagaatttttgttttaggtaatcaccctgggttattagacaacaggtataagaatcacacttaatgctgatttttgagtatttagaggaaca

SEQ ID NO: 597761 - DNA, 570 bp, Homo sapiens
gaggttctatgtactcgccagaggggagccatagatttgactttgacatttctagtgatcaatcagagagggaaaagtgattggtgataagacgcatgatgactgtaatatagaatcagataatttatttgggaattgtatctactaagatcagtgagaaatttttcctatggatccttagggaaaagagatggcacaatgtgataaaatacatgcttatcaacattcttaaatatatacaacattgagtttcatagatcaatttcccttaatgttcatcaatgtaggaaaatagaccgatgagagaataattcaatggatgtgttctctaggkgacaaatatgatcattctttgatatgatccaatgtagcaaagcctctggattgttcacttaagtgtagattcatgaatctctcccatctctaccgcttctcatccccctagagattttgactcagcagtttggaagtagattcctagaatttttgttttaggtaatcaccctgggttattagacaacaggtataagaatcacacttaatgctgatttttgagtatttagaggaaca

SEQ ID NO: 597762 - DNA, 570 bp, Homo sapiens
gaggttctatgtactcgccagaggggagccatagatttgactttgacatttctagtgatcaatcagagagggaaaagtgattggtgataagacgcatgatgactgtaatatagaatcagataatttatttgggaattgtatctactaagatcagtgagaaatttttcctatggatccttagggaaaagagatggcacaatgtgataaaatacatgcttatcaacattcttaaatatatacaacattgagtttcatagatcaatttcccttaatgttcatcaatgtaggaaaatagaccgatgagagaataattcaatggatgtgttctctaggtgacaaatatgatcattctttgatatgatccaatgtagcaaagcctctggattgttcacttaartgtagattcatgaatctctcccatctctaccgcttctcatccccctagagattttgactcagcagtttggaagtagattcctagaatttttgttttaggtaatcaccctgggttattagacaacaggtataagaatcacacttaatgctgatttttgagtatttagaggaaca

SEQ ID NO: 597763 - DNA, 388 bp, Homo sapiens
ggagtgcagtggcgtgatcttggctygctgcaacatctgcctcccgggtgaaagcaattctcctgcctcagcctcctgagtagctggaattacaggtgcccaccagcacgcccagttaatttttgtatttttagtagagaggggtttcgccatattggccaagctggtcttgaactcctgacctcagatgatccacccgcttcaagcctcccaaagtgctgggattacaggcatgagccactgcgcccagtcaggatttcatttttaagactgggttataaaaagactgtagcttccattttggatgtactttcctgctttctctctctctctctctgggggggaagaagttgacatgtcagcagccctgtggagaggcccacatggc

SEQ ID NO: 597764 - DNA, 474 bp, Homo sapiens
caagtctgctcatactttgttggtcaaaacaagtcacaaggccaagcccaaagtcactggagttggacgtatgttccttctcctgagaaaaattgcaaaaaygaggaagaaatgaaaaatggagaacaaataatgcaatctaataccgttagtaagaggcaggtttttaatatttttcgaacgtctctctagtaaaaaccttctgtcaaagattgttgataatattcttgagggataatctacagtttattctgtctttattgtcatccctttcctcgaagcatttaagttttgataatttcttccttgaatctttctcctctttttgctcctatggtattcatggttcttttcttacctgtctgaatacctctgtgggctttctttcattttctttcttcttagagccctgaaaatgagaattttctaacggttatctcattggccctcttattgctaagccatcctaattcc

SEQ ID NO: 597765 - DNA, 474 bp, Homo sapiens
caagtctgctcatactttgttggtcaaaacaagtcacaaggccaagcccaaagtcactggagttggacgtatgttccttctcctgagaaaaattgcaaaaacgaggaagaaatgaaaaatggagaacaaataatgcaatctaataccgttagtaagaggcaggtttttaatatttttsgaacgtctctctagtaaaaaccttctgtcaaagattgttgataatattcttgagggataatctacagtttattctgtctttattgtcatccctttcctcgaagcatttaagttttgataatttcttccttgaatctttctcctctttttgctcctatggtattcatggttcttttcttacctgtctgaatacctctgtgggctttctttcattttctttcttcttagagccctgaaaatgagaattttctaacggttatctcattggccctcttattgctaagccatcctaattcc

SEQ ID NO: 597766 - DNA, 547 bp, Homo sapiens
tagaacagtcactatcataggtgccagtaatatttagtaaataaatacacatgaagttaaacccaaagtcaacattattcctcttgtgtcacttattgttgatacacttttcagaacaaaacataacatgataccataacagaagaggagaatatctgtgattcttatcagccgcccagagaaatgagttcatttttctattcctgagagctttgaggtagtggagcatagataggctgttcaggacctcagatgtccaggcaggtatggaggaggatgggattcatatcatggaaggaaagaaagagtgaaaaaacaggaggaggttagacatataagatggtaaataatttttcccatgtgacctactttcatatggaccctatataacctgcctttatgttgagttctgtgatttttgtccctctccagctactgtctatttctctcttccccttttaaggagcaaaatctcaaaaaattttcatgccyatgacctccaacatatcttttcctattcttggatccacttcaaatcggcatttaa

SEQ ID NO: 597767 - DNA, 359 bp, Homo sapiens
gagtactgcagagttcagtctttagacttctcaatttctctaactgctctcactcccttggctgccttctccagcgtatggctttaaatactatgttatcttgaccaccccacatttacattcctcatcctgacctctttcctgaatctctggactccagtaaatgactatgtaatgaacatatctacatggatgtctgattagccrtctcaaatttaacatgctcaaaataaatacatgatttttcttcccaatcctgttacttactaatattccccatgttgattatggaaaattcattcttccattttccctcataaaaaatcttggagtctttattgactgctttttttttctca

SEQ ID NO: 597768 - DNA, 530 bp, Homo sapiens
ttgacccccatatgcaaaacaagcatttccaggtggttaaacttatttaaggtgaggccctcgggcacactatagaacaaagctaattgggctcagcagagatcaaaaccacgaccttgtccttattttatctttctgccactggcgtgcttaaggcagacaaacacttgccatcaaacggctataaagcgttttatttcccttcatattgtgtaggttgctcatttattcaaagaactcagcctttcaaaataagccactggcaagaagagagaaaagggatgttcctataaattatccagtggaaaagcttttacggcattygaccaggacttgaaatgtgggaggtaggacgctggaaatctaccttgaagatgtgcagaaccagcggcaggtcctggtccccaggaatggggggtcggcgcggggaaggggggaacggtctctgtttgtcttgctgcgtgctcacactgccacctgctggcatagcccacatctccgcttccccagctcctgtccacctggagacc

SEQ ID NO: 597769 - DNA, 640 bp, Homo sapiens
ctatttctcttggttctacttaagaccacattattaagcctacttaaataaatgagatttggcatgaaatttataaaatacttaaaacagtagaagaagttgtataaatttaaaaagaaccagaaagcatctcttaaggttacaattaaatatttgaaattcaaatgcatcttgatataccccaaaaaagcaatcgctttctaattatgcacattactgtgattacatagaatctcgtggttaacaggcacaaagcactcagaataatcacttacatacttacattatataaacaagaacaagcacaagacctagattcctttctatacctgtcctcctccttatctcagccagtgattaacgcagcactctgagcttgtgctcataatagatacttgcaatggttacgtgcttctctctctctgcccctcatagtcaggaggcaaatgttaaagtcatgtcttgaccagaagagttctacaaccaaattagtgttgttgtaatagaaaacattttgccagatctaaagcattgggtgaggaagataaaaatgtactttyataaactttttttttaattcaacaaacatctgagctccaattgcacgccaggtcttttactgggttccggaattataaaa

SEQ ID NO: 597770 - DNA, 602 bp, Homo sapiens
agttcaaccctggctgttatttaacaaattgaaatttttgtgtcttctttctttttgtgattccttttatattctccatgactgccttagataatttgtcatttatggtttcctatcttaatcttgtgattatgtctgtggctttgttatgactctctctaagttgtcaatgtttctgtctcatagtagaaccaagggtcaagcttcagttacaagggcctgactattgctttaaaatcaataaaagacaacttttggagggtcaatrtgatactattttctcttactggctttattattgctatataagaaaaggaagaaatccaagggtgttcaaataatgaaacagagagggtaaagacaaactccctgtgtatatgtgtgtttgagtatgctcacatgtgagtgaaattagatcacctggtgaaataagccatgccaatgcaatgaatgacaccatttcaaagtctcatgagatgggactttaaatacaaaccgtttaaaatatatgatgactggtttcagtctcccatgccctttagagtggatcggccttacagttttacaaccagtaatggtttacaaaatattttcattcatac

SEQ ID NO: 597771 - DNA, 450 bp, Homo sapiens
tatttcttacttacttagtgtcataaaatactagaaagtcagcacaatgatatmaaacacagtcatataacataaatacaggagtaagaaggaacaaggagaaaagtgaaaagaatgaccagagaaccatgactgagacttcgttacaaaaatatgccatagagcagggtcagcaaattatagcctgtggattaaatccagcatcctgcctatttttatcaataaagttttattggaacacagttctgctcattcctttgtgcactattgactattgagataggaattcagcaggactagtttccaagacaataagtcacatgaccccgatgacaggacaggagacagcaaaagaaactagccaaaaccagctagaagcaagatggtgaggaaagtgacctctgtttaccttcactgctcattatatgcaaatataatgcgttagcctgc

SEQ ID NO: 597772 - DNA, 450 bp, Homo sapiens
tatttcttacttacttagtgtcataaaatactagaaagtcagcacaatgatataaaacacagtcatataacataaatacaggagtaagaaggaacaaggagaaaagtgaaaagaatgaccagagaaccatgactgagacttcgttacaaaaatatgccatagagcagggtcagcaaattatagcctgtggattaaatccagcatcctgcctatttttatcaataaagttttattggaacayagttctgctcattcctttgtgcactattgactattgagataggaattcagcaggactagtttccaagacaataagtcacatgaccccgatgacaggacaggagacagcaaaagaaactagccaaaaccagctagaagcaagatggtgaggaaagtgacctctgtttaccttcactgctcattatatgcaaatataatgcgttagcctgc

SEQ ID NO: 597773 - DNA, 568 bp, Homo sapiens
tgactattgagataggaattcagcaggactagtttccaagasaataagtcacatgaccccgatgacaggacaggagacagcaaaagaaactagccaaaaccagctagaagcaagatggtgaggaaagtgacctctgtttaccttcactgctcattatatgcaaatataatgcgttagcctgctaaaaacactcccaccagcgccatgacagtgtacaattggaatggtaatgccagaaaattaacctgtgtggtctggatgtgggagaaaaccgagttctgggagctttctgcccttttcccagaacattcatatatagtacatcccttattcagcaaataatcaacaaataatcataaatataaccagcgagcagcccagggaactgctctgcctgcagggtagccttccttttgctccttaataaacttgcttttgctttattctgttggcttgctcttgaattctttcccacgtgaagctaagaacccatgcacttggcctcccaggctgagccctaattttggggttggccctgtgacactatctatggctgctttcacactac

SEQ ID NO: 597774 - DNA, 430 bp, Homo sapiens
gaattcagcaggactagtttccaagacaataagtcacatgaccccgatgacaggacaggagacagcaaaagaaactagccaaaaccagctagaagcaagatggtgaggaaagtgacctctgtttaccttcactgctcattatatgcaaatataatgcgttagyctgctaaaaacactcccaccagcgccatgacagtgtacaattggaatggtaatgccagaaaattaacctgtgtggtctggatgtgggagaaaaccgagttctgggagctttctgcccttttcccagaacattcatatatagtacatcccttattcagcaaataatcaacaaataatcataaatataaccagcgagcagcccagggaactgctctgcctgcagggtagccttccttttgctccttaataaacttgcttttgctttatt

SEQ ID NO: 597775 - DNA, 568 bp, Homo sapiens
tgactattgagataggaattcagcaggactagtttccaagacaataagtcacatgaccccgatgacaggacaggagacagcaaaagaaactagccaaaaccagctagaagcaagatggtgaggaaagtgacctctgtttaccttcactgctcattatatgcaaatataatgcgttagcctgctaaaaacactcccaccagcgccatgacagtgtacaattggaatggtaatgccagaaaattaacctgtgtggtctggatgtgggagaaaaccgagttctgggagctttctgcccttttcccagaacattcatatatagtacatcccttattcagcaaataatcaacaaataatyataaatataaccagcgagcagcccagggaactgctctgcctgcagggtagccttccttttgctccttaataaacttgcttttgctttattctgttggcttgctcttgaattctttcccacgtgaagctaagaacccatgcacttggcctcccaggctgagccctaattttggggttggccctgtgacactatctatggctgctttcacactac

SEQ ID NO: 597776 - DNA, 568 bp, Homo sapiens
tgactattgagataggaattcagcaggactagtttccaagacaataagtcacatgaccccgatgacaggacaggagacagcaaaagaaactagccaaaaccagctagaagcaagatggtgaggaaagtgacctctgtttaccttcactgctcattatatgcaaatataatgcgttagcctgctaaaaacactcccaccagcgccatgacagtgtacaattggaatggtaatgccagaaaattaacctgtgtggtctggatgtgggagaaaaccgagttctgggagctttctgcccttttcccagaacattcatatatagtacatcccttattcagcaaataatcaacaaataatcataaatataaccagcgagcagcccagggaactgctctgcctgcagggtagccttccttttgctccttaataaacktgcttttgctttattctgttggcttgctcttgaattctttcccacgtgaagctaagaacccatgcacttggcctcccaggctgagccctaattttggggttggccctgtgacactatctatggctgctttcacactac

SEQ ID NO: 597777 - DNA, 570 bp, Homo sapiens
atctaatactacaaatactcactacagtgttcttatcaagaatgactataagggtagtgctgtggtcttacagcccctctgaaccttgagcaacaaatactgcatgacttttcaagagttagatgttttccaaaaatggtttaggaaagacatgacgagatttttggaaacaatagaggcaagacgaaggccacaggcattgctaaaagagagagttttctgaggatcatgagagacctcccrttgtttatattataaagtacaaagcctcagcatgacacataaaatcctttacacccagacctcagtttacttctatttcatcttctcccaccgtctactgtactctttataatccagcccaacatagtttcttatcagtctaaatatatcatgctgtttcaagattcaatgattttttcccatccttgtcctttatttattagaaacaaactttaaattaaagaacacatacacaaaattctcagctcaaagagtttttgaaaatcaaatttctttcttggaatgctcttttcaaactggtgtatttttattattcattaggatcaa

SEQ ID NO: 597778 - DNA, 448 bp, Homo sapiens
cattaagtaaaaaacgtacaaatacctaaacacataaagaataattacagattgtgattaatactgtgaagggaaagaacaggttacataagcaagaataaaagggccatgattttgtttggggaattggataagggtccccagaggaggtagccttgagccaagccaggagactgaccagggggtgttctgcagaggatcggagtggaagacggcatttccctacagcaggggctggtgcccatgaagtgagaaagagctcagggttcaagttgctgcaggccggtcagtgtggctggagcacagggagcaagtcgggaggatgtgaagggtcagatcaggcakgtgttggaggccttggtcgagggttggttttgattcaagtgtgatggcaggagagcccctgaaggttttaagaaagagagtgccaatgatgggctttgtgtgt

SEQ ID NO: 597779 - DNA, 516 bp, Homo sapiens
cctttatgtgaacatgataatggaaaaatataacttcttaagaattacatcaataactctttggggacaaagctgatcaaatatattattacatcctaccacatagcataaaaaaatgaagtccactgatctggatagagaggagcarttattaccttgttccctctaaacaaatgttactctttattatatcctcaggacctctatttttcaaacaaaaagttgaatttatactcactgagttgctcattgctggttccctggtgagaaaaaagtaatgaacatattaagaaaaaaggtaccagaatatgtgagattttcaatatttagtattgtcatattaaaatctccaggttaaacctgtggtagtcagaggccctgtgattgtgaggttatggtttgtcaggaaagatctcaaagacattaagagattaatttttttgttgttgctatacaggtacagtctttcagtcttacaggtctggacattcaatcaataacttattcaagggaatt

SEQ ID NO: 597780 - DNA, 516 bp, Homo sapiens
cctttatgtgaacatgataatggaaaaatataacttcttaagaattacatcaataactctttggggacaaagctgatcaaatatattattacatcctaccacatagcataaaaaaatgaagtccactgatctggatagagaggagcaattattaccttgttccctctaaacaaatgttactctttattatatcctcaggacctctatttttcaaacaaaaagttgaatttatactcactgagttgctcattgctggttccctggtgagaaaaaagtaatgaacatattaagaaaaaaggtaccagaatatgtgagattttcaatatttagtattgtcatattaaaatctccaggttaaacctgyggtagtcagaggccctgtgattgtgaggttatggtttgtcaggaaagatctcaaagacattaagagattaatttttttgttgttgctatacaggtacagtctttcagtcttacaggtctggacattcaatcaataacttattcaagggaatt

SEQ ID NO: 597781 - DNA, 516 bp, Homo sapiens
cctttatgtgaacatgataatggaaaaatataacttcttaagaattacatcaataactctttggggacaaagctgatcaaatatattattacatcctaccacatagcataaaaaaatgaagtccactgatctggatagagaggagcaattattaccttgttccctctaaacaaatgttactctttattatatcctcaggacctctatttttcaaacaaaaagttgaatttatactcactgagttgctcattgctggttccctggtgagaaaaaagtaatgaacatattaagaaaaaaggtaccagaatatgtgagattttcaatatttagtattgtcatattaaaatctccaggttaaacctgtrgtagtcagaggccctgtgattgtgaggttatggtttgtcaggaaagatctcaaagacattaagagattaatttttttgttgttgctatacaggtacagtctttcagtcttacaggtctggacattcaatcaataacttattcaagggaatt

SEQ ID NO: 597782 - DNA, 554 bp, Homo sapiens
attttatcatcatgcagacatcagagtgtacttacacaaacctagatgatataaactaccacacatccacctctacagtatggcctactgctcccgggctacaaatctgtacaatatgttactgtactgagtgctgtaggccattgtaacgtagtggtaagtatttgtatatctaaacatatctaaatgtaagttatcccagcaagaaagagatggaacatttaaattaggataatctgagaaggaattaaaaaggaactatttctgaaagcaagggcagaatgtmggaaaccataagagaagcacagggcctcagagctgttatcactagtaggtctactagcgtaagaggtatgaccatacctggaaggaaagaattgcttacggagggccaacttgagtgcagcactgagctatgcttaagggacacagcctgccccaggtgaacctgaggggagtgaggcagggacacagggatcttatttttactcactttgttccttccctgccatcactttctgggatctgcttttggcccattgatgtaatccata

SEQ ID NO: 597783 - DNA, 611 bp, Homo sapiens
ttctgctccaccagaattattctcagatgtttttaaaaaaaaaaaaaaaatttacatctctaattggacaaaagttagatcacgagggttttcgtgacagtcagaaattagagaatataccacaatttctttggaagcagtaagacagattatttcctaaggttaaagaaaccaacatccagaacygagcatggaaggcaaagctgcctgggatttgaaaccaaatttagattagtagagtgtaaaggagaaaagaaagtttttaatgtctgtaatcgaaaggacgagtgaaaagaatgccaaatatcacatgagaaagaatacctgtacataccagaaactttgctttaactcagcaggttgctttaaaatacttaaagcttttgaaattaatttaatgtttacttaagttttagcaattttttagaagtcagcataatgttttgttgaaagcagtctgtggttaatttttacctcaaatttgctccagtaggaacatgacactgaacatggacaataataattgctccaacaaagggaaattaaccactaagatacagaaactgctagataacatataacttggagatggcacgtaagaactataatga

SEQ ID NO: 597784 - DNA, 418 bp, Homo sapiens
agtcagtcgcaagaaatcaaatccctgaatttagcttattttactattataatattggagccataagtcaagaaattattgataaaactggttcagatacttttcaggtcctcagagatgcaaatgttaaaccattctatataggtacttacataaatcagaggccttgagacatcctggaaaatgctaccctctctgaaaatgagctcacaatgaaaattatgtgagaaaattaaatgcattaggagaaaaaattatctgatgcaagatataggagagttagtacctcattaagtagacagaataatctgaaagattttacacaataaatatatttaaaaggcttatagagcttaaygaaggaatagaaatcataataatctgacagtatagaaaagatgtagatgtgaaaaaagca

SEQ ID NO: 597785 - DNA, 609 bp, Homo sapiens
gactattgctttaaaatcaataaaagacaacttttggagggtcaatatgatactattttctcttactggctttattattgctatataagaaaaggaagaaatccaagggtgttcaaataatgaaacagagagggtaaagacaaactccctgtgtatatgtgtgtttgagtatgctcacatgtgagtgaaattagatcacctggtgaaataagccatgccaatgcaatgaatgacaccatttcaaagtctcatgagatgggactttaaatacaaaccgtttaaaatatatgatgactggtttcagtctcccatgccctttagagtggatcggccttacagttttacaaccagtaatggtttacaaaatattttcattcatacatggtatctgggccaaaattatctttccaacttcattttytcctctttcctgtcctttctgtagtttggctttaacaaccctggattccttactgctcctagaatgtactaagtatgtgcctacctcagggcctttccttttcagctcctctgcctggaatgttcttcttccagatgttgatataagtgcctcaccttgctcgggtcacctctaagaaatcagtttct

SEQ ID NO: 597786 - DNA, 398 bp, Homo sapiens
aattggaatatatatatgtatttttctctaaagcttttgaaactttgtagccactttaccaattctcattaaaaatgctgaaacaatattactgggggaaatttcttaacactatatgasatagttcattaaatacctaaagtacttataatgcccaggagaattttaaatgaaaacatttttaaaaaataaaataaaaacaatgtaaatgtgcaaagaaagcaaaagtactactattcagcgaaacaggattctgtaatttaaatatgatccagggcagatagcaagttctgaggggaatttgcctgttgttgaatggtggaggggggcgggggcactggaggtgacctgttcctagcctgtgtgaaccgtgtctggagggaggggtggcagataag

SEQ ID NO: 597787 - DNA, 609 bp, Homo sapiens
gactattgctttaaaatcaataaaagacaacttttggagggtcaatatgatactattttctcttactggctttattattgctatataagaaaaggaagaaatccaagggtgttcaaataatgaaacagagagggtaaagacaaactccctgtgtatatgtgtgtttgagtatgctcacatgtgagtgaaattagatcacctggtgaaataagccatgccaatgcaatgaatgacaccatttcaaagtctcatgagatgggactttaaatacaaaccgtttaaaatatatgatgactggtttcagtctcccatgccctttagagtggatcggccttacagttttacaaccagtaatggtttacaaaatattttcattcatacatggtatctgggccaaaattatctttccaacttcattttctcctctttcctgtcctttctgtagtttggctttaacaaccctggattccttactgctcctagaatgtactaagtatgtgcctacctcagggcctttccttttcagctcctctgcctggaatgttcttcttccagatgttgatataastgcctcaccttgctcgggtcacctctaagaaatcagtttct

SEQ ID NO: 597788 - DNA, 600 bp, Homo sapiens
gtctggctgtgacttcctttattcaaattccactttcttagctgcgtctgcccttaccttaccaggggcagagaatgcttaaggattgcaaaggaagaaacaaaaagcaaaatatatcagtaggtatctcaaaaatacctctgctacctttttcttgataatacccctgaaatgtcatggaatgctatttgtattttagaaataaaaagatagtgagcaaaattaaggacatttaggaggaaatgggcctgtaacttgaggtttccctgctatagaaacacattgattagtgaatatttattgattcttttacattatgcttgaagctttggggagatcttcaaagcataagacattggtaggccctgtccttaagaaacttccctctagttagggagataaggstgacctgctattaattaaagatgaaaaacaaacgtttaaggaatcacactatcatagttcatggacagagtgattgattcaggctgggcttgtgaaaaaaatttcttggcgatggtgaaatataagctcttcttagaagtataataggattcatgctggtggaataaagagaggacggtgatctaagggaaggac

SEQ ID NO: 597789 - DNA, 548 bp, Homo sapiens
ttgcattatgggaaatagcccagataaactttggaatatctccaagttctatgattctcttgtcaagagtacatrtaatatgcgacatatatataataaatacacccagcaaacacatatatgtatatatgtttgcattttgcctaagaccgtcccccttcagtaagtccattttctactctaaattttggatcagtttctgagttaccgaaccaccaaatatataacagaaacaaaccggagagcatggtggggaagttgggatagtgaagcaaatgtgtgtttccactacaaacattgtttatattgcaaatatatttgtactcttatttttaagaatatgtaagtacatgctgattaatggctataagtttcagaacattattgggtttatagaagcttttatcttatgtgttttctcatttaactgaatactgaaagtacaattactataaatggaaagtccttaaaaactgttgatattagaaaggaattctcaaagttgttactgaaaaaatggaagtgttatatttggaaggacctttttg

SEQ ID NO: 597790 - DNA, 555 bp, Homo sapiens
tcatgtatgtcaactttgcattttgaaattactgcagcaattggcagagtttggatttgaggggaacagtcccaaagagtaaatgggaggcccagaaatgatagctaccagcagggggaaaggaggccttatcagatagctccacactgactcagatgagagagtgcaaggacaagggacctggaaatgacaatgggraacaatgggacagcaaagcccttctccacctgatgtgagaaagcagacggtcaccacttcagaggactaaaggagaagcaatgtcctcagggaaaactcaggtttttgttggagcaaaaaggtgaaggcatggttgagagaacagagtgatgacataggggagtttgctgaatacaaagcaacggttccagaaggcatgtggaagccctgagcaagagaggaggaacagagggctcatccaggagcagtggggaaaatcaggcaaagagattgatgactgaggtggacttatatttaagcattaactgatttaaaaaaaaaaaaagtcaatgggaatgggagtgattactggcccta

SEQ ID NO: 597791 - DNA, 555 bp, Homo sapiens
tcatgtatgtcaactttgcattttgaaattactgcagcaattggcagagtttggatttgaggggaacagtcccaaagagtaaatgggaggcccagaaatgatagctaccagcagggggaaaggaggccttatcagatagctccacactgactcagatgagagagtgcaaggacaagggacctggaaatgacaatggggaacaatgggacagcaaagcccttctccacctgatgtgagaaagcagacggtcaccacttcagaggactaaaggagaagcaatgtcctcagggaaaactcaggtttttgttggagcaaaaaggtgaaggcatggttgagagaacagagtgatgacatargggagtttgctgaatacaaagcaacggttccagaaggcatgtggaagccctgagcaagagaggaggaacagagggctcatccaggagcagtggggaaaatcaggcaaagagattgatgactgaggtggacttatatttaagcattaactgatttaaaaaaaaaaaaagtcaatgggaatgggagtgattactggcccta

SEQ ID NO: 597792 - DNA, 539 bp, Homo sapiens
tagtaaggtagatacacagtggtgacttcatgtcagtgaagaatctgactagaagtagacagaattctagagataaattcatcaaatcctctactctatagatcaggaaactgacacttaggttaggtgcagtgaccatttccagtgactttgacctttactgacaaaatgtcagggaagacttagtaccacaggccaggcacagtggctcatgcctataatcccagcactttgggaggccaaggtgagtggattgcctgagctcagaagttcgcgaccagcctgggcaacatggtgaaaccacatctctacaaaaaatacaaaaattaracaggcatggtggcatatggatgtagtcccagctacttggggggctgatgtgggaggattgcttgagcctgggaggttgaggctgcagtgagccaagatcatgccactgcacttcagcctgggtgacagagcgagaccctgtttccaaaagaaaaacaaacaaacaaaacaaaaaacaaagacttagtaccaggaaccagatggaatga

SEQ ID NO: 597793 - DNA, 504 bp, Homo sapiens
aactcaaatgtttcctctgaggcttgaaaagttttagaaaatatacaagtcatggtatcatgatatcatgataactatcatgattgctatgtagacatcaattttctaggtttataaaaatgggctaggttcagcagggctcagactgagctggtaagattggcttctgactcaccaagctcttctctctaaaatgactgctatttcatgaatttaaacaagtgccacaagtgctcatttccatgtgtgacatttttgataaacttccaggttttaaactggttragagagccagattacaagccaaatttgcttagtgtgaacagtgaactaactccaacatagcccctctcagactttcagtgaaattcctcgaatattagccaattactttagtgtgaacacaactagctaatcacttttcaacatatataaaaagtataatgggtagaaaagggagttatttgtaacagaaagatctttggaggaacccaggagtgaatg

SEQ ID NO: 597794 - DNA, 580 bp, Homo sapiens
tcatataccatgttctctaactaaactgaactacttgaacctttttttattaccccatgttttctgacctccatgcccttaattatgctctttcctcaatctgaaatgtctgcacttacatctcctctctacattttaaattctgtccatcaagagcaagctcaaatgtcatcttctcagattaattaccaattccttcctctctgctgccagcccacaaaatttaataatctatttttttggaacccccaaatcatcttgtctgtgcttctcttgtggtacttcttactttttaccctatgttatagtattttgctgtatttcttctccccagttagaccataagctccttgcaggtacatctgactgattcatctttgtttcccagaggcctggcatggtaacttgcacataattggtgtttaagaaaattttatgaaacaaataaacagtggtcrggcacggtacctcatgtctgtaatctcagcactttgggaggctaaggcaggcagatcatttgagtccatgagttcgagaccagcctgggcaacatggagaaactctgtctttacacaaaata

SEQ ID NO: 597795 - DNA, 522 bp, Homo sapiens
tcttgctttgatacaatgtatataaaagtctctctgatccataacttatacatatattcttctaaactttcttctgagattctgtttgcttgctttgtttacttttgaatatttaatctctcttaaattattatgtctattgtgagacagatgtggaaatagaaacaatttttgtatcattggataccctgatatgtaaataaaatccawtcacatcctattgcatcacatatgttgcatgtttgatttgttccacagttcataggtgaaagagtcatcgcatgcttttatttttctaaattcatttcagtaagactctgtcccttccatcagggttggtgggaagtctaatctgtcattttctcagggagctcctcttacccatttggcattatacaagaactctaggacccagtggtcagagataatggggatgaagttcctggttatcagttagttgggtttatctctgagaacttggacttcctgaccatgtaatccatttgtcatgggtaactcctc

SEQ ID NO: 597796 - DNA, 569 bp, Homo sapiens
atctcggttctctgcaacctccacttcctgggttcaagctgttatcctgcttcagcctcccaagtaagtgaaattacaggtgctcaccaccacgccaggctaattttttgtatttttagtagagaaggggtttcacratgttgggcaggctgttcttgaactcctgacctcaggtgatctgcccagctcagcctcccaaagtgctggaattacaggcaggagccaccacgcccagctgtaatgtttctgtatgtcccatttgttctttgtgttttttttctcgttttctgtttcattaaagattaaatgataatttttttattagtacactttttctactctgttgtcatgttatgtaactctacctattttttcatagccatcctaggctttccaccatgcatcttttatttatcacagtctagcttctatagattattctccttcacataacaacagttatgatatctcaatcatacattttatgtttacatgatacataaaccctacaaaaattcttattttctctttaaacaattttctttttaagagactttaaaaatgagcta

SEQ ID NO: 597797 - DNA, 519 bp, Homo sapiens
catttctggacctgccctgggtcagagaggagcccattgccctgaagggtgagtctcaggcatggcagtattcactacaagctgactgaagagcccttggctctaagaaaacatcagtgttggcctagcagaatctgccattggccagtagtggtggtggctccccagagatgctcctctgcctgtggaaaggggagataaggacaggaagygctttgtattgtggtttgagtgccaacttagccacagtagaatggagcaccaggtaaatttccaaggtttttggcttcaattcctggctcaaagacagtatctctggacctgcctagggtctaggggaagttgccaccctggagaggagggcataaacctgactggattcactacctgctgatcctagagcactagggccttgagtgaacacgtgtggtagccaagtagtggttacagtgggcattggataagacccagtgctatgctggtttcagacctgaaccattatagttccagtggtggtgg

SEQ ID NO: 597798 - DNA, 541 bp, Homo sapiens
tttacccttgaatagtacatccagccaaaaatatcctttaagcatgaagaagaaataaagatcttccctgataaacaaaagctggggtattttgtcaacatcagacctctcctagaagaaatgctaaaggcagttctttaatcagaaagaaaggatgttaataagcaygaagagatcctctgaaggtacagaattcaatggaaatagtaagcacacagaaaaatgcagaatattataacaccgtaattgtgatttgcaaactactcttaagtagaaagactaaatgatgaaccaatcaaaaacaataacaaaaacaaattttcaagactcagtacaataaaacataaagagaaacaataaaaacttaaaaattggggaggaagttaaagtttagagtttttgtttttttctttttgcttgttagtttatgcaaacaatgttaagctgttattagttgaaaataatgagctataggatagtatttgcaagcttcatggtaacctcaaatacaaaaaaaaatacaatgaatacacataaaata

SEQ ID NO: 597799 - DNA, 623 bp, Homo sapiens
gttatgcacacacatagtggaatactattcagctatataaaagaatgaaatcatgatgtcatttgcagcaatgtagatgaaactggagattattatgttaagtgaaataagtcaggcacagaaagacaaataccatacatactcactcataggtaggaactraaaatcttaatctcatgaacatagggaatagaatgccagataccagagtctgggcaaggctggggagggggataaagagaggtttattatgagtacaaacatacagttaactagaagaagttttttttaatgtttgatagcagactagggtgactaaacttagcaaaaatattatgtatatttccaagtaactagaagagaggattttaaatgataccatcacataaaaatgataaacactcaaaatgatggatacttcaaataacctgacttgattattacacattctatacaacattcacatgtatatgttgatatatatatacacacataaatatattcatatataatatgaaaattattatatataaataaaagggaaaatatacaaatatattgtgcttctatacactagcaataaacaatcagaacctgatttttaaatatatagcttataatag

SEQ ID NO: 597800 - DNA, 441 bp, Homo sapiens
atgaagactagggtgaaagaagaggttattaacaatgcaattgacctctgaactcagcttttaataaaagcaagaagaaacaagattttattgtagtgggttgatctttcagactgaaagtgtagggatatttgcaaatacataagaagcaacatccgtggtaagtaataagagtcacaaccactattcttcccagttattgtagcaaagacctacagttgctctgtaaattctcagtaaatttactagatycatctaattctactactgattaatgcatagatttttttaaaaacagtgccatcacaaccacacagaataaaaacatttaaaatatttttgcataaaatattttattaatccttacaataggccttgatatcgaacactacaattttaatttttcagtgaagtagctgtgactctttgatattaaggttg

SEQ ID NO: 597801 - DNA, 539 bp, Homo sapiens
ttcttttccttcattactgaatgccaaacttaattcagaattccatacaatttctttttaaaataccatcaaagactaattmtctggaacgtgagcttttatggtcacacagcaccgtaaaaattaagttcactgaaaagtgtgactgaagttagactgagttttactgcagcattgctggataaatgaatattgaatggaaatttgcatagggagagagatgtcattttcagaaattagagttttaaaatatgaagcttattttaagggaaggattatttgtaggttttgtggtcatcaagggtactgttgcttttactctatcaattaaaaacatgtctattcttcaagacgcatataagttaaacttccagaacccttccctaatcacattagccataatgatttctctccctaataaaataaactctagtgcgactctctgagtcacatggataagtagtatgtatatgcttctttattccatttatttaagtctcatttaatcaacagaattataattgcttcaagggcagaga

SEQ ID NO: 597802 - DNA, 600 bp, Homo sapiens
tctgtaaagctatgtcactattgatcaactctttccgcctctccctttgctgcctgaatggtgagaagatttaggaactgccttctagttaacaagcactaaggaacctgcctgtaccatctgtgctcatytaatacctgctttaaagaaattttagtttaagagaaagaaaatgggaggttgtgtttcaaagcgatagaaataaaaatacctatgtatttggttcaaaatattggccttagaaagaattgttattataattagtgtcaatggtgatagacaacctttttgcaactgtctctgagaaacgtctgtgaaatatgtcccaaaaacagtctggttactgactaactgtcaaacacagactcaaatacctgtagcccttaaatataatattctgcctcatgagcacttgtgctttctctctgaaatctgtcaaacaaccttctactcatttccttcttccccttcggtcttcctgacccgacatgacatatcattaaggaatggtttaagacttctccatgagaactcttcactcttttctaatctccttctgcatttgtaattcaagctccagaatttacattagctgcaggt

SEQ ID NO: 597803 - DNA, 556 bp, Homo sapiens
gaagcacactccatacaaatacaaggtctagattagtaccacaattgggatgtgtgaactccaagttaaggagcctcttcttaacttgaaaacaaatcccttcctattagggagaatttagaatactacaagtctgtagcctatctatctactaagcattaattgtatatggatgatctttttgactcatgcctcagttctagaagttggttttctgatttgtcttttttcttgaagagattgcaagcatttcagcattggtagtgattagtaaatattgtrgatattgcaagcattgtagatattgcaagcatctcagcattggtagtgattagtaaatattgtaggtattgcaagagtcccagcattagtccctgtccctctgaagcaaagactctctattacacagattagtattcccagatccttcttcagaatcccagacccatgaacttatccttactaactcttacctgctgtgtagtgtccaagattcattaaactaactgctgccaagttcttctgccacatcttgttattctgccaaccagtgttt

SEQ ID NO: 597804 - DNA, 508 bp, Homo sapiens
tttttaggcttgctttatgatttatttaatctcttgcagagaagaaaaatggaattgtttcttaaagattttaaagatagataatgcatctaattttcttttgggaagtattgtaattttatatttgcatgtcagctggaaagaacactataaaagggaattttcctcaattactaaacagtaacatgtttcagtcwctattctcgggtgagaggcagctgatctctcatcctcaggaaggaacaactggacagtaaccagggatcaggcactaactaggttctaaaagtgtattaacaaatccagagtatcaatcatcaaaagtcagacaggccttttctgtgacttcgtatcatcgtgaaaattttaagagaataaatatttttagagtctttaagagacccatacaaacattatggtcagaataacaagacaagcctgtctcaaggtttaatctaaatgaagaatcatgagtactcacctcaaggcaatttaacagatctgaatt

SEQ ID NO: 597805 - DNA, 588 bp, Homo sapiens
atgagtactcacctcaaggcaatttaacagatctgaatttgccttctgaagtcttttgatctaaagctaaaagaaaaccagttattccagagtttcgagaatcatatataaccccaaaaatattgattgtgggcagagtttatcaatttttattaaaatatttttgcggccaggtgcagtggctcacacctgtaatctcagcactttgagaggccgaggcaggtggatcacttgaggtcaggagttcaagaccagcctggccaacatggtgaaaccccatctctactaaaaatacaaaaattagcctggcatggtggcgggcgcctgtaatcccagcaacttgggaggctgaggcaggagaatagcttgaaccaccgggaggcagaggttgcagtaagcagagatcacrccactgcattgcagcctgggcgacagagcgagattctgtctgaaaaaaatatctatctatctatcatctatctatcatctatctatctatctatctatctatctatctatctatctatctatctatcatctatctacctatctatctattttttgtacttttgtactatctatacccat

SEQ ID NO: 597806 - DNA, 588 bp, Homo sapiens
atgagtactcacctcaaggcaatttaacagatctgaatttgccttctgaagtcttttgatctaaagctaaaagaaaaccagttattccagagtttcgagaatcatatataaccccaaaaatattgattgtgggcagagtttatcaatttttattaaaatatttttgcggccaggtgcagtggctcacacctgtaatctcagcactttgagaggccgaggcaggtggatcacttgaggtcaggagttcaagaccagcctggccaacatggtgaaaccccatctctactaaaaatacaaaaattagcctggcatggtggcgggcgcctgtaatcccagcaacttgggaggctgaggcaggagaatagcttgaaccaccgggaggcagaggttgcagtaagcagagatcacgccactgcattscagcctgggcgacagagcgagattctgtctgaaaaaaatatctatctatctatcatctatctatcatctatctatctatctatctatctatctatctatctatctatctatctatcatctatctacctatctatctattttttgtacttttgtactatctatacccat

SEQ ID NO: 597807 - DNA, 510 bp, Homo sapiens
tctacccttcctttgccaaaaattctatactatcaatgaaattttagctacctgcaaaataaatgaatctcaatagttaaccacttcacataaagaatggatgattaataaatagtctttgttgaatttgcttatgaaatgaatgtatatccaaattaaattgtaactagattgattataaaacctcttggtgggaaatctttttyaaaagccctaacaattaaactcctaaaataaataatttttaaacattgacaatgttttatttcagagagaaattttgaattgttttttatatggctgtatctgcaaattatatcttgatttcttactagatattcctgtttctcttctacgcttggttatttttttttttcaagattttgatttatcattttctctactttttaaattttgtaaatgttcaaatgtcataagcttttcaggtctttcagtcttgtttatacaccctcagaatcatttttctataaaggggaaattatataaata

SEQ ID NO: 597808 - DNA, 510 bp, Homo sapiens
tctacccttcctttgccaaaaattctatactatcaatgaaattttagctacctgcaaaataaatgaatctcaatagttaaccacttcacataaagaatggatgattaataaatagtctttgttgaatttgcttatgaaatgaatgtatatccaaattaaattgtaactagattgattataaaacctcttggtgggaaatctttttcaaaagccctaacaattaaactcctaaaataaataatttttaaacattgacaatgttttatttcagagagaaattttgaattgttttttatatggctgtatctgcaaattatatcttgatttcttactagatattcctgtttctcttctacgcttggttatttttttttttcaagattttgatttatcattttctctactttttaaattttgtaratgttcaaatgtcataagcttttcaggtctttcagtcttgtttatacaccctcagaatcatttttctataaaggggaaattatataaata

SEQ ID NO: 597809 - DNA, 652 bp, Homo sapiens
atgatttttgcctggagaaatcaaacacacacttggttaactttcaaaactaacctrgtaggaaatttacacagtgaaatctgaacctacttcttttgcctcaagtgtgagcggctggctatttagcacaagcttatgttctatgtaacttttgtctgtatgtgatcaataccctatttcatctttccaagtataactagatagtgttgaggtatgtcagacacttgagtactgtgcgccattcccaactttaccctcttcttatacttatcaatggatgaatgtgaaaggtttagaaatttcagatattgaggagatgagcaattaaatgttacaatgtataatcttttataaggataatagttaaatgagtgccgttacatgttatacccattgagaattatccagctcaaatttgccaaccccagccaaaggtaactagtcaatttctcaaaaccaaaaagtgaaaaccaaaacaaaatcaagaggagaggaaatatgtgaatataagacacatagtgtaggagttctggatgggcattttatacagagaaggctttgaaatgagagatgagggagatactggaatttggtaggcctgtcaaagacagagaaaaataaaaagaaatttagaaaccattgctctggacta

SEQ ID NO: 597810 - DNA, 558 bp, Homo sapiens
cacaccagatttataacttccccatgaatcagggaaattttgtccattgatgtatatagtaggtgttcatatggtacttctgtttgcctcttatttttgcacttattaatatctgtacatgtttctaattttcccacatcctttcttatggacacatttaataaaattaggctttacatattcagatttgatttatagagtcttttgcaatgaaatacatgatgggcaaatattatactaaagcttataattgtaattttgtttgtaatatttttaaatagatatattcattctttggctactccagcaatgaacgaagaaagtcagacttctctaatagttactggttactgggggagtctgattcatttccatcgccgtcaaatgggaccacgtaagtttatctgtgcaaaactaaaataaaaagtaaaaacaaaacaaactcccaaacttattttctgrgaaaacctagggaattattggaggaaaagaaatgatgccataaataaggaaataatacatagcctaaggtgtgtttctaaataagtgatcatcagt

SEQ ID NO: 597811 - DNA, 601 bp, Homo sapiens
aacccttgtacattgttggtgggaaggcaaattggtaaagccttttggaaaacattacaggggttcckcaaaaaaattaagattagaactacccatgatctatcaattcctcttctgcataaatatccaaaataattgaaagcagagccttgaagaagtggctgcactaccatgtccattgcagcgatcttcacaatagccgtgatgtggaaccacttaagtgtcaatggatggatagatggataaagaaatagtgactgacacacacacacaaacacacatacaaatgcatacacacacatataatggaatatggcttagctttaaaaaagaaaaagatcctcctatttgaaacaacatggatgaaactggaggacattataataagttaaataagccagatgcagaaggaaaaatactaaatgatgccacttttatgagttatctgtaatagtaaaactcatagaagcagaaacacaatagaccagcagctgggggcatggggaaatgttggtcaaaaggtacaaagttctgattatgtaggataagcacgttttagagatctaatgcatagcatggagattacacttaataatactgt

SEQ ID NO: 597812 - DNA, 595 bp, Homo sapiens
ttcataaaatctctccttatttcagtccctacctcccctcttctttcccctgtgcttggggatctcaaatctctgcttcatttgctttacagagtaaaacatctgtcttccacagcactgaggaagaggaacagtcatctcttgcatgagggctctgtagggctgaatactctctagataggcactaatctagagagtgacaattaaatttccaaatggagaatagtttcagcacagagagaactgcattgaactcctggcatataaagytcaagtggaagggcttcctgtaccacagcctctagtcacgtagcatcctttcttcacctgggttcaatcagaacctaaagttggctgggcgcggtggctcatgctgtaatcccagcacttcgggagttcaaggcaggccgattgtttgagcccaggggtttgagacaagcctgggcacacatagtgagaccccatgcccatgaaaaaacacaaaattagccaatcatagtggtgcacacctgtagtcccagctacttgggaggttagtgtggaggatcacttgagctcatgaggtccaggctgcagtgagctgtgagcacatgac

SEQ ID NO: 597813 - DNA, 595 bp, Homo sapiens
ttcataaaatctctccttatttcagtccctacctcccctcttctttcccctgtgcttggggatctcaaatctctgcttcatttgctttacagagtaaaacatctgtcttccacagcactgaggaagaggaacagtcatctcttgcatgagggctctgtagggctgaatactctctagataggcactaatctagagagtgacaattaaatttccaaatggagaatagtttcagcacagagagaactgcattgaactcctggcatataaagctcaagtggaagggcttcctgtaccacagcctctagtcacgtagcatcctttcttcacctgggttcaatcagaacctaaagttggctgggcgcggtggctcatgctgtaatcccagcacttcgggagttcaaggcaggccgattgtttgagcccaggggtttgagacaagcctgggcacacatagtgagaccccatgcccaygaaaaaacacaaaattagccaatcatagtggtgcacacctgtagtcccagctacttgggaggttagtgtggaggatcacttgagctcatgaggtccaggctgcagtgagctgtgagcacatgac

SEQ ID NO: 597814 - DNA, 531 bp, Homo sapiens
agggaagggccccctgtccagtggacacatgactcacatgaccttatcaatcattggcgatgacacactctttactcttttgctttgtatccaataaataacagcacagccaggcattcggggccactaccggtctccacgtcttggtggtagtggtcccccgagcccagctgtyttttcttctatctttttgtcttgtgtctttatttctacaatctcttgtctccacacatggggagaaaaacccacagaccctgtaggctggcccctacatagacaaaaaaagaaatgaaaaacacccaaatggatgggaagtggtaaaacgatctctatttgaagatgacataatcctacatatagaaaatccaaaagaacccacaagaaggtacaatagctcataaacaaattcagcaaagttacaagatcaacacatcaagaccaacacgcaaaattcatttgtttctgtgcatcagtattgaacaattcaaacaggaaattaagtaaacaatgccatttacaacaagatctaaa

SEQ ID NO: 597815 - DNA, 534 bp, Homo sapiens
gagacgtgcattgtgttttgttgtaatgcactgtgaacacctgggtgtgagggtgcacacccacagtcccactgactytggaagccgaggctggtggatcacctggtcctgggagtttgagtccagccttggtaacacagcaagaccgttgtctcttaaaaaaaaaaaaaaaaactactgtgaacttacagacgcatagggctcttggccacgcatgggtgctgtcttttgttaggcctacttgagctttatcttcctcacattctgtatagatagctctagtttttgttgttgttgttgatgatgttgtttttgagacagggtcttggtttgtcacccaggctagagtgcagtggcgcgatctcggctcactgcaacctccgcctccctggtccaagtgatcctcctgcctcagcctcccaagtagctgggactacaggcacacgcaccacacctggctattttttgtttttaagatggagtattgctttgttgcccaggttggagtgcagtggtgcgatctcagctcactgc

SEQ ID NO: 597816 - DNA, 577 bp, Homo sapiens
aggtgaagactttgtatcagttccttagttataaagtctctgtgcactggcttttcctgatgttggttattgtagttatgttcttggtgtgtgggtgagttcactgtctcctatggaattggaatggcagggatctcttgaagcttatctcgttctctcatggtgtacaatttatttatttattttctttttctccagtttttaatttactcagttgatgtggggaggtatcctttggtgagcacctgccccaggtcataagctttcccactgagaaagcaagcacagctttcaggccatgcccctccccatcttcctgtaatgccaagtgcccacacctgtgctcgtatctgccacagttcccatttgtgccacagattcttttaaagggggtttattcccactataaattaaaacaagattctgctggaagcttctttcaccctgtgactcttccctaattctgctggctgcctgactcttccytaattctgctggctgccttccctcagggtgcctgtaagatatagtcagggatggcttccctgggcttgagctggagactgagaatgcctat

SEQ ID NO: 597817 - DNA, 625 bp, Homo sapiens
taatgtgccatcatctttcactcactggaacacggaaacatggccaacttacctgtaagggagactagaaaatgtagttttttaaattgtagtaaaatacaactaagataaaatttaaaatcaactatttttcagtgtacagttcagtggcagtaagtagattcacattgttgtgcaagaatcaccaccattaatctccagaactttttgtcttccttaactgaaactctgaacccattaacaataactctttatatcccctttttccttaacctctggcaaccaccattctcctttttgcctctgtgaatttgatagtataggtaccttatataaatggaatcatacagtatttgtcttcttgtgcctggcttactccacttagcataatattctcaaggttcatccatgttgtagcatgttcagaatttccctatttttcaaagctgaatcatattccatttgatgtatataccacattttgtttatccagtcatctgttgaaggacaattcagttgcttgcttcttttggctcttatgaataacgtgkcaatgaatatgagtatacacatatctcaagtcactgctttcctttcttttgggcatatgcccagaagtgaaact

SEQ ID NO: 597818 - DNA, 582 bp, Homo sapiens
cgggtgtattggtgggtgcctgtaatcccagctacttgggagactgaggcgggagaatcacttgaacccgggaggcrgaggttgccgtgagccaagatggtgccattgcactccagcttgggcaacaagagcaaaactctgcctcaataagtaaataaataaataaaatagaaggttctaggatggtaaaggacttaactatatcatctagaaacagaaagaatgcaaggaagctgacatagtcatgcggaagagaaaaagtgagtgaagattttgttgtagagatgagtaaggacaagatcataaaagcttctgaagtaattacaagaaattatattttaatttaagcaggggaatgatatgctttgatttatgctataaatatccacactgctgtgtgaagaaaatattgtggagccaaaaaggaaagcaagctggtgtacccattagaaggcgagtattgcactccagcaggaaatgaagtggcttgactagggtgatagcaacgctgttggagaaaaaaggatagattcggaaatcattagcatttacagagctactgattatcattcaatgtgagag

SEQ ID NO: 597819 - DNA, 575 bp, Homo sapiens
attactgggcatatatccgcaccccctcaaccccccaccccacacacacacacaaaaagaaatagttctaccaaaaagacacatacacatatatgttcattgcaacactatacacaatagaaaagacgtggaattaaccaggtgcccatcaacagtggattggataaagaaaatgtggttcatatacaccatggaatgctatgcagccataaaaaagaaagtcatgtctttttttttttttttttggcacagtttcgctcttgttgcccaggctggagtgcaatggtactatctcagctcaccacaacctccgcctcttgggttcaagtgattctcctgcctcagcctccctagtagctgggattgcaggcatgcaccaccacacctggctaattttttatttttagtagagactgggtttctccatgttggttaggctggtctcaaacccccaacctcaggtgatccgcccatctcgrcctcccaaagtgctgagattacaggcgtgagccacggcgcccagccaaaaatcatgtcctttaaagcaacatggatgcagctggatggaagtcatt

SEQ ID NO: 597820 - DNA, 567 bp, Homo sapiens
ttgctttagttttttataatcttaccaatttttgtctatttgttctgtcagttacaaaagagaaatgatgaatttccagcaatgatggtagaattgtctatttctagttttgacagtttttgcttcatatattttgaatagttcttattaggtttatgcaagtatgtaggatttttatatcattctggtcatttattttattaatttgaactgtttatctccttgccttgaagtctacttcatctaatattaatatagccatatcagcttttttggggatagtgttttcatggaattcttttccccttctttwactttcaacgtattttttttttatatactttaagttttagggtacatgtgcacaatgtgcaggtttgttacatatgtatacatgtgccatgtttgtgtgctgcacccattaactcatcatttaacattaggtatatctcctaatgctatccctccccactccccccaccccacaacaggccccggggtgtgatgttccccttcctgtgtccatgtgttctcatttttcaattcccacctatgagtgagaatatg

SEQ ID NO: 597821 - DNA, 566 bp, Homo sapiens
taagcacctcagctggtttcagttctttacctggtggggtgactcagacctttattcctgaagtgtctgggccattaagtagacctgcctggatttggttgttgtagttttctgttgatttttagtcacaggscatggtaataccatgccttaaaggatctcctgtattttagaatactcttccttccattttggagtagtccagtgtcctgttaataggatcaatcatgccagccagtacagtaattgccttctttgccatgttgattcagaggtatgaggagcccaaagtggccaggtagcagtcttaatttctgttcaatcaaatcattgttgtatcttctggttgaagaattcttccttttggaactaagacctctaggccagcaaagcataaggtcatgggaacaggaagcaagaattttgctagtgggctactaggggtaatagcaagtggttccactccatttccaccccttgattcctggacctgtaaatcctggctgtaggagaaacagcaccatatattggttgctgattcattctagtaactactattaaagctt

SEQ ID NO: 597822 - DNA, 544 bp, Homo sapiens
gtttcttgccctgtttttatatttatctgtagttctatagcaatggctcccttcctttccctcccccagtttttttcctttctttattgactacaaaaatggttctatttaagtagtagtaccatcaaaacctcaaaaaacagatgaactgttaataatattgtgccctactttatgcacaygttcactaggcttttaaatacccttttctacactagtctttatatcaagcttaatatagcttagtatagcatataggtggaaactggaaatatattttttaattataatttttaataattttttaaaaatttattttctaaggaagaagagacagataatgaagaaaactttattgatctcaacgttttaaaggcccagacatatcacttggtaagtttcatcagatacatgcaggaccaacaagcaatcaatgtacatgttctgctggaaatttaaatgagtagaaaccgttgttggccattgttttgtatgctgtttcaaaagtagctctcaaaattgctttcctatatataaaatgtta

SEQ ID NO: 597823 - DNA, 505 bp, Homo sapiens
attattaatcctcattgatgccttagtgwtattaatcctcattagttattattaatgatgcatatatgtgtctgtgttttctgcccaacttgagatgtaatataacgttgtggtcaacttgcctcagtgtgtgactttactctaatacttactaggattccagatttgggcaagtttccaaacttcttgtgcctcatcttcttaagctgtaaatgagataaaaatattacctttacctttgtcatagggtttttgaaaattaaaggagttactacatgtaaaacactataataatatctgtcacatagaaagtactcagcactggcaaaaaccaaaaccacatctttcctccatatttccccgtctgaaatctgatttgtaagctccttgataacggagatagctatcctttttaatattccccatagtgtaacacagaaggtactgaataaaaacctcttaaatgaatgaaggtattttttattgatcaattgaaaatatatca

SEQ ID NO: 597824 - DNA, 546 bp, Homo sapiens
gagaaaatatttgcaaactacccatctgacaagaacttaacatccagtatgtataagaaattcaagcaactcaatagcaaaacaacaacaaaaaaactagtctaatttttaaaatgrgcaaaagatcttaatagacatttctcaaaaaatacatagaaacggccaacagatatatgcaaaaatgcttgacatcactaatcatcagggaaacgcaaatcaaaaccacgatatcatctcaccccagttagaatggctattacccaacccctcgccccccaaaataacaaaggctgctgaggatatggagaaggggtaacccttgaacactattggtaggtatgtaaattattagtacagacactatagcgaacactatggaggtgcctcaaaaaactaaaaatagcactactctattatccaacaatcccactactgatgatatatccaaaagaaatgtaatcggtatgttagagatatctgcactcccatgtttattgcagcactattcacaatactcaagatacggaatctgcctaagtatccatc

SEQ ID NO: 597825 - DNA, 546 bp, Homo sapiens
gagaaaatatttgcaaactacccatctgacaagaacttaacatccagtatgtataagaaattcaagcaactcaatagcaaaacaacaacaaaaaaactagtctaatttttaaaatgagcaaaagatcttaatagacatttctcaaaaaatacatagaaacrgccaacagatatatgcaaaaatgcttgacatcactaatcatcagggaaacgcaaatcaaaaccacgatatcatctcaccccagttagaatggctattacccaacccctcgccccccaaaataacaaaggctgctgaggatatggagaaggggtaacccttgaacactattggtaggtatgtaaattattagtacagacactatagcgaacactatggaggtgcctcaaaaaactaaaaatagcactactctattatccaacaatcccactactgatgatatatccaaaagaaatgtaatcggtatgttagagatatctgcactcccatgtttattgcagcactattcacaatactcaagatacggaatctgcctaagtatccatc

SEQ ID NO: 597826 - DNA, 565 bp, Homo sapiens
cttttttttttttttttttgagacagagtctctttctgtcgcccaggctggagtgcagtggcacgatctcggctaactgcaagctctgtctcccaggttcacgccattctcctgcctcagcctcccgagtagctgggactttcaacccagtttccagtgggcagcagaaggctcactatggatgactctgaytagagaagaaggaagtcaaggaagagatggggaagaggagggggagttccccaaatgtaccttgccctctcccctgagtgtgcatgtgtggcaggaggttaaagttgatgtggtcagtaatgtccaaaggctataaagctagacagggccctatgattatatgatcaggggatttgtgtgctgtgccaaaggcgcccgccaccacgcctggctaatttttttgtatttttagtagagatagggttttgctggggttcctggtttagccaggatggtctcaatctcctaacctcgtgatccgcccgcctcggcctcccaaagtgctgggattacaggtgtgagccaccgcgcccggccgccaacttttatcatt

SEQ ID NO: 597827 - DNA, 565 bp, Homo sapiens
cttttttttttttttttttgagacagagtctctttctgtcgcccaggctggagtgcagtggcacgatctcggctaactgcaagctctgtctcccaggttcacgccattctcctgcctcagcctcccgagtagctgggactttcaacccagtttccagtgggcagcagaaggctcactatggatgactctgactagagaagaaggaagtcaaggaagagatggggaagaggagggggagttccccaaatgtaccttgccctctcccctgagtgtgcatgtgtggcaggaggttaaagttgatgtggtcagtaatgyccaaaggctataaagctagacagggccctatgattatatgatcaggggatttgtgtgctgtgccaaaggcgcccgccaccacgcctggctaatttttttgtatttttagtagagatagggttttgctggggttcctggtttagccaggatggtctcaatctcctaacctcgtgatccgcccgcctcggcctcccaaagtgctgggattacaggtgtgagccaccgcgcccggccgccaacttttatcatt

SEQ ID NO: 597828 - DNA, 610 bp, Homo sapiens
  misc_feature 1, 2, 3, 4, 5, 6, 7, 8, 9, 10, 11, 12, 13, 14, 15, 16, 17,18, 19: n = A,T,C or G
nnnnnnnnnnnnnnnnnnntacaatcctctagaatggcagaggcttgccagtgacctacttgtgtatcctggagattaatccattgatatacaggggctcacaaggatcttctttattcactgtttataaagccctattttgtatctgggttcttaaatttttataagtttctctttttaagtcttttacgaactccttccctacattgaggttaaagatactgctttcttctacacattacaaatattttacatttgtcttcaatccatctgaaatttatgtgatggaartcatagatgtaattttatttccatatggatagcccatagttttaatagcattttgcgaatagctcatttttctccactaggaggtaacactgattctgccgcaaactaagtttccatatgaatgctcatctgctttcaggctattttgtatatattctgataatatcattaatttatacttttattaggaatcttgctatctgatatattgtaattcctacctcagacttctttaaaatttatgcttacatatgaatttcagaatagccctcctggaattatagttgaaattatgctaaatttatagattgggcaaata

SEQ ID NO: 597829 - DNA, 641 bp, Homo sapiens
caagctgcacatgtggtggtggttggggtatggacttatcggggagaatcactgtttcaaaaaggcaaagaccaggaaagatcaatttggtagtggggtaacatcaaatccaattttctcactcaactttattaaaagcagctggctcatgacttgtggtaggcaagcaatgttatttatttaaaaagcaattctcagtgggctgcccttcaggttattctctacataagtctgtaattttatgtacttcctttctttaatgaaaaaatggtatttgcccttctgacttttcactttgataaccttattagtatcagaaacaagttagctgtagacggattacaatgaaaagtgttctcattttttctaataaaaacaggatattgtagatacatttcaaatttcagttgtccaaaaatgtagcccttctatattttgtagtggcagatacaagagatcagagagcccttaaaagtcacgttataaacatgaacatatgttcaatctcttgtaytaagttttcttcccaaaaactgccaggcatccaccacttacctcattttttgcaactgttaagaaaattgcctaatacagaagccttttgaaaactgtaaagctgggccatttctgtggtcagttat

SEQ ID NO: 597830 - DNA, 581 bp, Homo sapiens
tatctattggtgttcattcctctgccctagaagagttatctgccgataaggaaaagatgactttttggtgggtgggtgctttgaaaggatagtgagcatatacctggaaggacttcatggccttttttcttcccagctttctgttatcttccagaacatttacatttatcctgcaggaaaaagtttgggaaacatgaaggagtacacgacagatttttatgacaatggttataatagttgtaaatacattgtaaacataataatsatagctacacatgaacaagacaaataagatctttgattaaactgacttgaatgttgttgctagtgagttttattcctataatgtttaggtataaatcatactgatcctcgtagaactgtgtttagtagactaggggattaagcaagagcccacagatgtttgactggtgatgtgacattcacaggttcttaatcctgactacaccttataaacatgtagaaatcttttgaaatataccccatactgggcctactttcactgaagttctgatttaattcattcatgagggaagaagcaatgtttggtcaagtaccag

SEQ ID NO: 597831 - DNA, 581 bp, Homo sapiens
tatctattggtgttcattcctctgccctagaagagttatctgccgataaggaaaagatgactttttggtgggtgggtgctttgaaaggatagtgagcatatacctggaaggacttcatggccttttttcttcccagctttctgttatcttccagaacatttacatttatcctgcaggaaaaagtttgggaaacatgaaggagtacacgacagatttttatgacaatggttataatagttgtaaatacattgtaaacataataatgatagctacacatgaacaagacaaataagatctttgattaaactgacttgaatgttgttgctagtgagttttattcctataatgtttaggtataaatcatactgatcctcgtagaactgtgtttagtagactaggggattaagcaagagcccacagatgtwtgactggtgatgtgacattcacaggttcttaatcctgactacaccttataaacatgtagaaatcttttgaaatataccccatactgggcctactttcactgaagttctgatttaattcattcatgagggaagaagcaatgtttggtcaagtaccag

SEQ ID NO: 597832 - DNA, 500 bp, Homo sapiens
atgtttgactggtgatgtgacattcacaggttcttaatcctgactacaccttataaacatgtagaaatcttttgaaatataccccatactgggcctactttcactgaagttctgatttaattcattcatgagggaagaagcaatgtttggtcaagtaccagtatttttattagctcctcaggtgattgaatatgcagycaacatagaaacaaatgttcaccataggtgataggttagaaacagtaaaaatgcataatgagtaatcgttgaggtcttttttaaactctgaggttcttccagattaccattttcattcataaggtacttacatattattactgacacttaaatcattttggcaaaaattctacatgctctgtgctctaacatgcactacatttcctgggtgtaaggtctttgatctaatattttgggtacagtagtaattgccctaatcctgctgatttaaaaacttcaatgtgagtgctgtggattactgg

SEQ ID NO: 597833 - DNA, 573 bp, Homo sapiens
gaattcctgactctgtgtcactcgccacatgaccatagcaagttaattaacttctatgactctgctttcttatctggggatggggcacaaataattctacccagtcttgttttgagattattataacctaacctgtggacagtacctracattgtgctggcatagagtatgggcttcatgcatttcttattttgtataattttttacctttcctagaaactggaattagttctcaacattcttatgtgccatagaagactaggaaaagccccagtctctcaatacaaaaagtccctagattgtcatgagtatttttgagtaagatacttacataggatataagttatcaagaagcttgcatttctatgtaaattgggaagccctggtgatgtcatggctttattttcataatctgtcacgtggattattattgaaggcccactagactaaatttgctgtcacacaagatctcccctacagaaatgactcaaggagatctgatgaaaagtaatataatgatttttttaggtattatttgagagctgtcattctataaataggtaggttatagtt

SEQ ID NO: 597834 - DNA, 573 bp, Homo sapiens
gaattcctgactctgtgtcactcgccacatgaccatagcaagttaattaacttctatgactctgctttcttatctggggatggggcacaaataattctacccagtcttgttttgagattattataacctaacctgtggacagtacctgacattgtgctggcatagagtatgggcttcatgcatttcttattttgtataattttttacctttcctagaaactggaattagttctcaacattcttatgtgccatagaagactaggaaaagccccagtctctcaatacaaaaagtccctagattgtcatgagtatttttgagtaagatacttacataggatataagttatcaagaagcttgcatttctatgtaaattgggaagccctggtgatgtcatggctttattttcataatctgtcacgtggrttattattgaaggcccactagactaaatttgctgtcacacaagatctcccctacagaaatgactcaaggagatctgatgaaaagtaatataatgatttttttaggtattatttgagagctgtcattctataaataggtaggttatagtt

SEQ ID NO: 597835 - DNA, 544 bp, Homo sapiens
aaagatctgaatagacattattcaaaaggatacatacagatggcaaacaggtatatgagaggtgctcaacatcattgatcatcagagaaatgcaaatcaaaactacaatgagatatcatctcaccccagataaaatggcttttatctaaatgacaggcagtatcaaatgctgacaaggatgtggagaaaacagaatccttgttatgttgctggtggcgatgtaagttagtactgcttccatggagaacagtttggaggctcctaaaaaaactaaaaatagagctgcctaccatctagcaatcacactgctaggtatatacccaaaagaaaggaaatcagtatattgaacagatatctgcactcctatgtttattgcagcactcttcacaatagccaagatttggaagcaacctaagcgttcatcagcatggacacttcatgaatggataaagaaaatgtgatrtatatactcataaagaatgagatcctgttatatgcaacaacatagatggcaccggaagtcgttgtgttaagccagacacag

SEQ ID NO: 597836 - DNA, 533 bp, Homo sapiens
  misc_feature 419: n = A,T,C or G
catttttccagctctcccagtaagttacccaatatccatttaataaactccctttcttttttgaggagaggggagctattgctttaattgatcaggtttaaaaagccattgaattttcctaaaatattgattctcaagctttatcatgcatcaaaatcttctacaggacatgttaatacacagatggctgagccctacactgagaatttctgatcagtagttctagggggggcctgggaattctggcatttaatatgttttttatactattagcacggggatacaggttcagaacgtgctggtttgttacataggtatacacgtgccatggtggtttgctgcacccatcaacccatcatctacattaggtatttctcgtaatgttatccatcgcctagtcccacaccccgcaacatgcnccggtgtgtgatgttcgccatgctgtrtccatgtgttctcattgttcaactcccccttctgagtgagaacatgcagtgtttggttttctgttcctgtgttagtttgctgagaat

SEQ ID NO: 597837 - DNA, 533 bp, Homo sapiens
  misc_feature 419: n = A,T,C or G
catttttccagctctcccagtaagttacccaatatccatttaataaactccctttcttttttgaggagaggggagctattgctttaattgatcaggtttaaaaagccattgaattttcctaaaatattgattctcaagctttatcatgcatcaaaatcttctacaggacatgttaatacacagatggctgagccctacactgagaatttctgatcagtagttctagggggggcctgggaattctggcatttaatatgttttttatactattagcacggggatacaggttcagaacgtgctggtttgttacataggtatacacgtgccatggtggtttgctgcacccatcaacccatcatctacattaggtatttctcgtaatgttatccatcgcctagtcccacaccccgcaacatgcnccggtgtgtgatgttcgccatgctgtgtccatgtgttctcattgttcaactcccmcttctgagtgagaacatgcagtgtttggttttctgttcctgtgttagtttgctgagaat

SEQ ID NO: 597838 - DNA, 548 bp, Homo sapiens
gagactcattttgggattctgatctccaaaactgtaagattcaaaggacttaccctacatggatgctattaagttaacctttcagttcctcttgaccctgawatcccacgggggtgactttttccttttcttacactaatttccttaaatcatgattaactatatgaatttgagtactctctttcagaatgtattaacacattggatttacatggctctcaaaagtattctgaaatggaatgagacatattttgatcatgtgcttataggatttaggaatccaatggatatatacatatatataaacacacatacacatatacaaacacatatatatatacatatatacacataaatagaaaaacttacattcattttgaagaggatcagaatatgccacaccaatatatgccactttggcatatggattattttgagctgaaggcaactgagaatcaacagatgtagaaagaagtctactcagagcttcccttgtctgactaaaagcagaaacttatggaagtgagggctgcttggaataacctctt

SEQ ID NO: 597839 - DNA, 644 bp, Homo sapiens
gatttaaccaggcaataatccaggtgatctagaacaaagacatttaattgtgaattaacttgagttattaaaagaactgtaaaaggttaatggtgcttggaacacagtgattgaggttggagaagaagcaagtacttgatcatatagacacctttaaatcaaggtgatacatttgaattttattttagatgtaatgaaaagtcactgaaggcttttaagcatgggaattaaatataatttaattataatataatttaattataattatatataacttataaaattataaatatatttwtatataatatattgataatactaatatattattaacattaatatattatacattatgatatattgatataatttataaaattatagatatatttataaatttatataatttatatattataaatatataaataattataatataatttaatgatatacttttaaaaattactttatataagtaatgctctagagggattcaaaaacagaggcagtaaggctggttttagtaggatgtttattcattaagcaatttattcctaaatgccagataagacaactaatataatcccatgtaccaggtaaaaatatatctgagtcaacagttcacggtttacagaaactat

SEQ ID NO: 597840 - DNA, 584 bp, Homo sapiens
attcactcccctggaaagtgggctgaagccagggatccaagtggtctagctcagtggaccccaaccccaccgagcacagcaagctaagatctactggcttgaaactcttgctgtcaacacagcagtctgaggtcgatctgaaacatgctatcttggtggggggaggggcgtcctccattactcagcttgagtaggcggttttctgctgacagtgtaaacaaagccgccaggaagttccacctggatggagcccaccacagctccacaaaggtgctatagccagacctcctctctaaattcctccttgctgggcaaggcatctctgaaagaaaggcagcagccccagtctggggcttatacataaaactctcatctccctgggacagagcacctggaggaaggagcgggtgttggcgcagcttcagcagacttaaacattcctggctgctagttctgaatagagatctcccagcacagtgctcaagctctgctaagggacagactgcctcctcaagtgggtacctaacccccatamctcctgactgggagacacctcccagcaggggttgacagatacctcatac

SEQ ID NO: 597841 - DNA, 497 bp, Homo sapiens
aaccatgcaaataatggaaattaaataacctattcctgaatgattgctgggtcaacaatgaaatcaagaggaaaatttaaaattccttgaactgaacaatagtagtgacacaacctatcaaatctcctggaatacagcaaagctgatgctaagaggaaagttcatagcattaaatgcctatataaaaaagtctgaaagagcacaaatagacaatctaaggtcacacctcaagaaactagagaaacaagaacaaaccaaaccaaacccaaacccagcagaagaaaagtcataaccaataacagagcagaactaaatgaaattgaaactaaaaaatatacaaaagacaaattaaacaaaaactggtactttgaaaagataaataaaattgataggccattagcaagattaaccaagaaaagaagagagaagatccaaataaacccmattagaaatgaaacaggagatattacaaccaataccacagaaatacaaaagat

SEQ ID NO: 597842 - DNA, 565 bp, Homo sapiens
  misc_feature 1, 2, 3, 4, 5, 6, 7, 8, 9, 10, 11, 12, 13, 14, 15, 16, 17,18, 19, 20, 21, 22, 23, 24, 25, 26, 27, 28, 29, 30, 31,32, 33, 34, 35, 36, 37, 38, 39, 40, 41, 42, 43, 44, 45,46, 47, 48, 49: n = A,T,C or G
nnnnnnnnnnnnnnnnnnnnnnnnnnnnnnnnnnnnnnnnnnnnnnnnntatttatgcagtttcatccatgttgcatttaactgtagtttatttattttcattgttatgtagcatgttatgcagttttctgtcttgctttcttccttctttataatatattctaaagatcttgctaatttgtttaacaatatattgtgtgtaataaaatatatataaatatatatgtatattttgtctcgcttttttccctctttataatatattataaagaccttgctaatttgtttaaaggtcttgctaatttgtttaacaaaaaaatatgatattctctctatatatgatatatgtaaaaatatatggttttctatttggcttatgtacatataagaaagaaaattatgttacatattatatttgcttatatatgtatgtaatgaacgtctataaagaaaaaacaaattaattacactgtttagctctgctgaggggaagtaagtaagtgtccaggggacaggaatagaagaaagatcctttattgyatacactgttgtaccttttgaatgt

SEQ ID NO: 597843 - DNA, 622 bp, Homo sapiens
gagtaagaaaaattaaatatacataataagtamagataatttaagggtctgtatatcgtagcctacatttgaatttcactcaaaagccatataaaacaactctatgctttctccagtattacataaatttatgattgtgatagcaaggactgctatgcctaaaatatgaatgttttattttattcattactcagatcatgcattacaaaaatcaagacattttttcttccctatttaggtttaaaatcgtatttgtaagaagtccaaggatcatccaccagaaaggctttaatatataagccttaccagatgcaaaggttcatacttgtaatcctaatactttgtaaggccaaggcaggaggatagcttgagcccagtagttcaagtctagcctaggcaacacagtgagaccccaggccaagcacagtggctcatgcctctaatcccagcactttgggaggctaaggtgggaggattgcttgagcccaggaatttgaaatcagcctgggcaacatggagagaatctgtttctacaaaaaaaaaaaaaaaattaacattagtcaggcatcatagtgcacacctcaggaggctaaggtgggaggactgctgtagcccaggaatt

SEQ ID NO: 597844 - DNA, 543 bp, Homo sapiens
tagaaaaaaaatcagagaaaatctttgagacctaaggcaccgagacgtgacctagatgtcacaaaattctagttagtatatggagaaactagatctcctacatatttctggtagaaatataaagtgacacagccactccaggaaatagctttgcatcttcttataaatgtaaacaaatgtcatacaacccggcaattgcgctttttggaaattacaccgagagaygaaaacttatgttcacaaacatacttgcacacaaatgatcatagcagctttacttgtaataagttcacaatggaaacaatctagatatccttcaatgggtgaatagttaaataaactgtagtcactaatactgtaaaatactactcaagaaataaaataagctcttgatgtacacaacttgaatgaatctccaggaaattatgctttgtaaaaatacaatcccaaaaagttacacattgtatgattccacttatttaacattcttgagttataaaattataaatatggagagcagattagtgaattccaggcgttaga

SEQ ID NO: 597845 - DNA, 537 bp, Homo sapiens
gggtaattaggaaaggggtttaattgactcatagttccacatggcttggtggggtgcttaggaaacttacaatcatggctgaaggggaaggggaagcgggcactttcttcacaaggcagcaggagagagtgaaatgctgtgaagggggaacttacaaacacttttaaaaccgtcagctctcatgagaattcactcactatcacgagaacagcatgggggaaacgcctcttatgatccaatcacctccgtcacttaacacttgggaattacagccccttccctctacaggtggggattgtagttcgagatgagatttgggtggggacacatagccaaaccatatcaagcattatctcttaggacttaaaaaatgagaggcaggaggtgatagagaatgtaattatctaggtctaaaattgtcaaagatgagcgccaggcatrgtggctcatgcctgtagtctcagcactttgggaggctgaggtaggtggatgacctgaggtcaggatttcgagacctgcctggccaacatggcaaaa

SEQ ID NO: 597846 - DNA, 589 bp, Homo sapiens
gggtaaacataggtcaccaagccacagtagaaggacggtacacgtggagtggattcagagaagtgtgtacattttagtcagatgtgtaatctcccaaagactggctcaaaggtgggtgtcagtaaaagcccagattaattccaggtacatgatcttgagttcagtttttcagctgtaaagaagagacgatgatgcctaccacagaagatcatttgtgcaataaaaggattaaataagaatgtgagaaatgtgtgaagtgcmtaatgcaaagttaatcggtaaatgttctatatttttcatacaaccttgggcttaaaaacagattaattctaagctttttaatattattctggcataattgcatagtttggtgggcctatcagcatgtataagcaaatgttaatctgaaatgatctgcctatgtaacatgaaatttatattaatttagtccacaacaagttaagatctgattatctgcagcatgattagtttgggagctgataatttgaaaatttactcctttgagtaaataaaaatagccacttggatatctattcataaatttattagtctagaaggtaattctgtg

SEQ ID NO: 597847 - DNA, 580 bp, Homo sapiens
tttgaataaacttatagtatcagatagctttgtctttagcttgggtcaccccctattaggtatcatctcagttatttgccaatttcattttatggatgtatgatatggtttgaatagatgacctcaccacaaatctcatgttggactgtaacctccaatgttggaggtggagcttggtgggaggtgtttgggccatgggggtggatctcttacagcttgttgctgtcttcacaagaatgagtgagttcttgacttacctggttgttgtaaagtgtgacaccttctcttctctcttgctcctgcttttatcatgtgacatgcctgctccagctttgccgtccaacatgactaaaggctccttaaggctgccccagaagctgaccagctgcctaggccatgcttcctgtatagcctgcagagagatgagccaattaaacctctttttcttataaattatgcagtctcaggtattyctttatagcagtacaagaacagcctaatataatgtacatgccttgatgacaagtttcaggttatcacaagaaacatataataagtatatttaaaaatattcagcaaa

SEQ ID NO: 597848 - DNA, 529 bp, Homo sapiens
gcatgtaatacatatacaaaataagtgtcaatatacctgtttatgttatgagttaggcttctggcaaatagtaggctattagttttggggaagtcaaaagttgtatgcagatcttttgaccatgcaggggtatcagtaccctcaggttatccaggggtcaactgcatatgtgtgatgtctgcatttgtaacagtctctctgcaaccacgaaggacaggcatgactgatcccctgaaccccatcccacaactacctgttatgagctttcttgccatgtgattaaaaaaaaaacaacattgagaccatcctggctaacatggtgaaaacccatctctactaaaaatacaaaaaattagccaggcgtggtgtcgggcacctgtagttccagctactcgggaggctgaggcaggagaatggcgtgagcccgggaggtggagcttgcagtgagccaagatcgcgccmctgcactccagcctgggcgacagagggaactccgtctcggaaaaaaaaaaaaaaaaaaaaaaaccca

SEQ ID NO: 597849 - DNA, 560 bp, Homo sapiens
gcatacaagttaggtgcttccaacatatggtggtgggacagggataggacaatcaaccccatttcacgagggacaactcagaaagaatacaagggtgatgggtccaaaacaagtccaaaacttagccagacaaattccaatagctcttagggcttgcaagccatttttttttttttttttttttttggtttgatgttctgcattccagggccactgacrcagcagcatagccccaccagcccttcccctttgctttgtgggctgaccctgcccatatgatttggggagggtgctgcccctggggcttttcatggtggccgcctggcccactaaaatgcaggacaaagcagacttccccttggtctatgatgggagtggtggccttgatgatctctaaaattcctgcagcgtcattcttttgttttcttgaaagataatcatgttctcaaccttccttcattctatcctatttttttctctttcctttaattgcagcaggcagtatttctgctggtgtaatcctggcttctgctgaagtagttggttaaattcatggttca

SEQ ID NO: 597850 - DNA, 276 bp, Homo sapiens
tttggaaatgctctatttgaagtaccagtaaaacactactttatatgcttaccacttattttgwgcttgctgtttgtgtaatgttaatttctggttcacaaatatcactaactcatggaattatgtttccaaagtggtgatataaaatgtctttttcactaatcataacatcatggcattaaagcaattacattaagagttgtgaatacacatgagacagtttactaaataaaacaattctaagcagagtttccataaactttatagtattaggaa

SEQ ID NO: 597851 - DNA, 592 bp, Homo sapiens
agtgcttttaacattcctattattattatttatttattttttttagatggagcctcactctgtctccaggctggaatgcagtggcatgatctcggctcactgcaacctctgcctcctgggttcaagtgattytcctgcctcagcctcctgagtagctgggactacaggcaatcatcaccacgcccagctaatttttgtatttttagtagagatggggttttaccatgttggccaggatgatctcgatctcttgaccttgtgatctgcctgcctcggcctcccaaagtgctgagattacaggtgaaagccaccgcgccaggtctaattttcttatttgtatcaacagcctgtttctgatgatttagggattctctccgaggtgacataggctttcttcaccatgcccctcatttccttgtgcattctcactgtcagaatcactaccgaccatatttctactaattttctgttcaaggaaatttatacttttccatcccctgcttcataattcttcgagcctcttcccattaccaaattccaaagtcatttccacccttctggatatttctttcagcagtgtcccacttctagg

SEQ ID NO: 597852 - DNA, 560 bp, Homo sapiens
atagaaatatgccctgcacagaataaggtttaacacttatgtcctaataggactttagtagctaaggcctcgcagcagcaagggataacactagttgttagcaattcctctgaattactagccaccagcaagaaaaacttctcagccagctcttacaacaaattgacagatcctttttgccaggttcttctttatctgtcttgtatgaaaaayttgtgttctacagggagccctggggattttttgtttgtgtttggttagttggtatggttttttcttttaacttttatgcaagaaaccttctctttctcttccgtactaacagaggcagagacagaaaataaagtaaaactcataaaaagtagtctaatgacattccaggtgcccatacagttcaggcactgcatacagccctgatacttaatttatactgtatagacacacaacagactatcagtgtgtgtgtggtgtgtgtattagggatgggagataatctataatcttacataaagtgattggttctcatgacagatgacctttaaaagtgaatgaaaccaaga

SEQ ID NO: 597853 - DNA, 544 bp, Homo sapiens
gatcaattcagcttctaaccagatctgggttactaatttcctgagggaccctgtgttggtggtattcttctagcctatgagcactaacagctctttccagggttaagtcaccctgtgtttcttcttacgtggcaaagatggacttgtccagggaggacctttatgtcaacttaatggcatagacaagcagttcccatcagctgctaggaaaaattagaactcttatctacaaaacgctgggctcagaaatctcagcaatggaaatcaccttccagcccttttgaacaataacaggaatgaaaaacaagatgggctttgatgggtatttccataaatagtcttttttttyccctcaatgtttggggtaaggacccaggattgcatgtaaataacatagagcaaaacatgtcagggaaaagttcatgtgagtcttattgtctccccttcctctaccttgcccagggctacagaggataagcaatttggttattcccagcctcttcctttccctactagaaatccaagtaatttataagggtccaat

SEQ ID NO: 597854 - DNA, 613 bp, Homo sapiens
atgtatacccacacactatatatacatatatgtgtatatatacatacgtatgtgtatatatacgtatgtgtgtatatatacgtgtgtatatatatatacgtacatgtatgtgaacacaattatatgcataaagtacatggtatagctaagagctgataagatattaagaggaaagctccatttttcatcataaggcccatattccagctctagctctttctcttactgattaatcccaagagaaaagaagagctcagtgggtaggacagaagaggatttaggtttgttgggtagcaactgtatcccaggttctatttcaaatgttacacatgcattagctcttttaattcttatccaaaccctaccactaagcattattatctcagcttaacaaattagaaaattgaggctctaggaggtaatgagcttgccaaggtgtctgagcctcaattttctcttccaaaagtgaagaaaatagtatctacactatgaatctcataaagttgttgcatggatcaattgagctatatatatatatatatatatakctcatatatatacatatatacatatacatatatatatatatataacacatacatatatgcaagag

SEQ ID NO: 597855 - DNA, 372 bp, Homo sapiens
cctgaactaagaacactgtaagtttctatgtctcttatggatcactttccctctacagggttgctgtgaaaaaccaaatgaatattatagrttgaagtgctttgaaaatggcaataaaaattacccctgtctagaatcttctaccagtaatacttatatactcctctttctaggactctgaatggtgcctcacaaataactgaatttcctgatttaactggaactgcaaacctggagagtctgtaagtactgagtagactcttgactttgcccagaacatacactgccattagagcttgatcagtcttaacatcagtgagtcaaaatatgtcactgtgtgatgcctgaatgaaagaattatgtctggtttgt

SEQ ID NO: 597856 - DNA, 372 bp, Homo sapiens
cctgaactaagaacactgtaagtttctatgtctcttatggatcactttccctctacagggttgctgtgaaaaaccaaatgaatattataggttgaagtgctttgaaaatggcaataaaaattacccctgtctagaatcttctaccagtaatacttatatactcctctttctaggactctgaatggtgcctcacaaataactgaatttcctgatttaactggaactgcaaacctggagagtctgtaagtactgagtagactcttgactttgcccagaacatacactgccattagarcttgatcagtcttaacatcagtgagtcaaaatatgtcactgtgtgatgcctgaatgaaagaattatgtctggtttgt

SEQ ID NO: 597857 - DNA, 503 bp, Homo sapiens
aacattcatagtagatcttgccattttcaaagcattttcacctataatattcatttgttcttcccaatgaccctgcaaaatggtgtcttctcatttaggagaactgagaaagataccaatgcttagctagtgtatcaaccragtagaattagctgaagttgagactagaaccccagagcctcacccctagtacaaggtgctttatgttctcctgggggtatagatctgagagctctcccctttggctaactcatccactgagtacttgttacatgaggaaatttcactgtacatgactagttttgcgtcatgtgcatgggaattatttagcccattctgtaggttatgtgtaactttccccacttactagctggtcagcttaggcaagtcatttcatattgtatgggtagaattatggtgtctccctcataaggtagccacaggaattaaaccagataattcaagtaaagctataaacatggtacctttatataagaagtgct

SEQ ID NO: 597858 - DNA, 503 bp, Homo sapiens
aacattcatagtagatcttgccattttcaaagcattttcacctataatattcatttgttcttcccaatgaccctgcaaaatggtgtcttctcatttaggagaactgagaaagataccaatgcttagctagtgtatcaaccaagtagaattagctgaagttgagactagaaccccrgagcctcacccctagtacaaggtgctttatgttctcctgggggtatagatctgagagctctcccctttggctaactcatccactgagtacttgttacatgaggaaatttcactgtacatgactagttttgcgtcatgtgcatgggaattatttagcccattctgtaggttatgtgtaactttccccacttactagctggtcagcttaggcaagtcatttcatattgtatgggtagaattatggtgtctccctcataaggtagccacaggaattaaaccagataattcaagtaaagctataaacatggtacctttatataagaagtgct

SEQ ID NO: 597859 - DNA, 503 bp, Homo sapiens
aacattcatagtagatcttgccattttcaaagcattttcacctataatattcatttgttcttcccaatgaccctgcaaaatggtgtcttctcatttaggagaactgagaaagataccaatgcttagctagtgtatcaaccaagtagaattagctgaagttgagactagaaccccagagcctcacccctagtacaaggtgctttatgttctcctgggggtatagatctgagagctctcccctttggctaactcatccactgagtacttgttacatgaggaaatttcactgtacatgactagttttgcgtcatgtgcatgggaattatttagcccattctgtaggytatgtgtaactttccccacttactagctggtcagcttaggcaagtcatttcatattgtatgggtagaattatggtgtctccctcataaggtagccacaggaattaaaccagataattcaagtaaagctataaacatggtacctttatataagaagtgct

SEQ ID NO: 597860 - DNA, 503 bp, Homo sapiens
aacattcatagtagatcttgccattttcaaagcattttcacctataatattcatttgttcttcccaatgaccctgcaaaatggtgtcttctcatttaggagaactgagaaagataccaatgcttagctagtgtatcaaccaagtagaattagctgaagttgagactagaaccccagagcctcacccctagtacaaggtgctttatgttctcctgggggtatagatctgagagctctcccctttggctaactcatccactgagtacttgttacatgaggaaatttcactgtacatgactagttttgcgtcatgtgcatgggaattatttagcccattctgtaggttatgtgtaactttccccacttactagctggtcagcttaggcaagtcatttcatattgtatgggtagaattatggtgtctccctcataaggtrgccacaggaattaaaccagataattcaagtaaagctataaacatggtacctttatataagaagtgct

SEQ ID NO: 597861 - DNA, 445 bp, Homo sapiens
tgggtggccatgtaatctgctaaaattctgggtcgggaaattattctacaaggggagaatggatactgggggacagtcagtactctctactcaactgattagtcaggcactactggggcaacctactttcagacagtattcaaggccctatacggataccaagagaatatccaggtttgagtagttcccagtctttcatgtgtcataagacaagtacacactataacacaaggtagactataaaattcatagtaagacacaaagtgctaccaaaggagttcaaagtagagacactgaccatcagaaactgagctgtccaaatgctttccaaactgatggtcaatctctctaytttgaagtcctttggtagcactgaggttgctttgaaaaacagggagtgaaaggagagcattttaggtggaacaaagggctagaggggggaatg

SEQ ID NO: 597862 - DNA, 621 bp, Homo sapiens
gcagctcttcctcaagttcaaatgaagattttttttttttttgagacagggtctcattttgtccagagtaggtaggactataagtacatgcaaccactctcacttccccaagtgaaaatatcctattagaaatgtttagatagctaggtgtagtaactcacacctgtagaccaggctactctaaaggctgaggcgggaggatcccttgagctcaggagttcgagtccagtcctgggcaacaaagcaagattctcctacccttcgtttctaaataaataaatacataggctgggcgtggcggctcacacctgggattacagaatcccagaactttgggaggttgaggtgggaggatcacttgaggtcaggagtttgagaccagcctggccaacatggtgaaaccccatctctactaaaaatacaaaaattagccgggcacrgtgatgcatgcctgtagtcccagctactcgggaggctgaggcaaaagaattgcttgaacccaggaggcagaggttgcagtgggccgagattgcgccactgcactccagcctggtgacagagtgagactccgtctcaaaataaataaataaataattaaataactaaatacataaatattta

SEQ ID NO: 597863 - DNA, 624 bp, Homo sapiens
tctgttttaggattatttgagttgccttgtaatcaagttttttcgagtcaaataaaggcttactattttagtactgcctatataatacattagggatcctcaagtcaggagcctaagatctactggtatatcctgaagcttccccatcacagaacacagatgtgcagacatggccataaacaatcccacagatacaaacataccttagattcacacaccacacacagacacatggactcacagaggtgttggtgttccctactctgaatccacaacttttccatcaggagtttcctacccccctacacacactgatttaaaacttctgaataaataaaattactcacaaaagaacattctcccagctaaatgttttggaacttgtattgtaagcagttgattgtagtgattacttggcaagtctataccactactatttagtcagtaaatcttcctcccattagaatgtataagtgtttacaatataytgcatgatgtccaatatatcacacgtgtgatatatgctgtaattttacttacaatggagatgcacatctgccaaacaaaatactgggttgtagttcgtgatgaggaagataaatgcattaaaagggcaaataaata

SEQ ID NO: 597864 - DNA, 586 bp, Homo sapiens
gtgccagtgtcccactttttctcactgatattttttgtgcagctttgatgcaagacttaagagttgtcaaaaaaaaaaaaaaaagcatgatatgttgggaggttaaagtgggaggatcacttggaggccaggagtttgagatcagcttgggcaacatagtgagacacccccactgccatctctacaaaataaaaattaaaaaacttagctaggtgtggtgacatgtgcccgcagtcccagctagtcgggaggctgaagcaggaggatcacttgggcccaggagtttgaggttacaggttacagtgagctatatcatgccactgcactccagcctgagctacagagcaccactccagagtaagaaaagaaaagaaaagaaaaaagaaaagagcatgataaacataggctgaaccaccaacyctgcagataccatattgtaccaacaaaaggagtgccctacccatacatacacaaggccagtttggaggtttagggtatattgtgcccctttaaagttctattgtcctggttttaaagtatttaattgtacttctccttcttcctttaagcacgtctaaaaataaaa

SEQ ID NO: 597865 - DNA, 473 bp, Homo sapiens
gaattcactttatttttctccacgttattatttttcttggattatacattcactctttaagaagcactctacccttgataggggctgtgagctcattgtctttatacatgcctggccttgtataaagagtaatggcaaaaaccacatttacttttgtaccaactgaataacttctacagcaggccttctcaacactggctacaaataagattcttctggaaagacccaaagcctagactgcagcctagaacaattaaaatcagaatctctggccaggtatggtggctcatgcctgtaatctcagcgttttgggaggctgaagtgggaggatcacttgaacccaggagtttgagaccagcttggacaacayagtgagacccctgtctctctataaaaaattaaaaagttagctgggcatggtggcctgcgcctataatcccagctacacatgaggctgaggtgggaggatcact

SEQ ID NO: 597866 - DNA, 604 bp, Homo sapiens
tacccagacccactgaatcagaatctgcattttaataagatcccaaggtgatctcatgcacattaaaatttgagaagcactgctccaggccagagagaaatgcatggatttccattgtttaaaatacaaaagaataaagaaatgtggtcccaaatcactgggacatctgtcttaatgtctgtgatacagtagcaacaagttacatagttttctttaggcttactgttccattatgcggtgtgtgcctgccaggtttcagaaacacaaaactaaccactaaatttcatccttaccaatgctctttactccaaaactgatgctaaggaatacttctggcttcccaagttttaaatattgaagtgctcttgaaatttaagtgawctataactccttgcttactcacaggaagattgtattagttatctattgctgcataactatcccaaaacttaccaacctaaagtaacaaacacatatcacagtgttggtgcttagctgcgtgatttggctaagggtcacttatgaagttgaatcaagctataggctggggcttcagtcagtcatctgaggctccactggggctgaaggatctatttccaagctt

SEQ ID NO: 597867 - DNA, 617 bp, Homo sapiens
tctgcctaaatctaaaaagaaagaatttaattatkcaaaccacagagcgttactgaggacattttactatcacctgggatagtggtaggaaaaggagcttgggcagcggcatttagaaagacaagctttaatgttgtgttttggtttaatgataagttgggaacctctactgcatgttgactgtacttcccagattttccagaacggccataatttcagatattgtgtcccactgtctgtgtaaaccattaaaataccccctaagtaaaatatttagacatgcaaactacatctcatcaactgtctcttatacttagaaggtgtgtgaaagtcatttatcctttatctctttattttcaggttgacaaatatggccactattacccagggaatgttttctcttttcaacctatatttctggaatacaataaactataaaccaatgccacaatcataaaattctaaatgtgatgcgaatttttcaaaagtgaaactgcctttgcaaaaatcataacagtgagaaaattatggcaatgaaagagatctgatgaaaccaactccatcttgcgtctaaccttcaagctgtccttgttcattcctgggcataggctaaacta

SEQ ID NO: 597868 - DNA, 617 bp, Homo sapiens
tctgcctaaatctaaaaagaaagaatttaattatgcaaaccacagagcgttactgaggacattttactatcacctgggatagtggtaggaaaaggagcttgggcagcggcatttagaaagacaagctttaatgttgtgttttggtttaatgataagttgggaacctctactgcatgttgactgtacttcccagattttccagaacggccataatttcagatattgtgtcccactgtctgygtaaaccattaaaataccccctaagtaaaatatttagacatgcaaactacatctcatcaactgtctcttatacttagaaggtgtgtgaaagtcatttatcctttatctctttattttcaggttgacaaatatggccactattacccagggaatgttttctcttttcaacctatatttctggaatacaataaactataaaccaatgccacaatcataaaattctaaatgtgatgcgaatttttcaaaagtgaaactgcctttgcaaaaatcataacagtgagaaaattatggcaatgaaagagatctgatgaaaccaactccatcttgcgtctaaccttcaagctgtccttgttcattcctgggcataggctaaacta

SEQ ID NO: 597869 - DNA, 617 bp, Homo sapiens
tctgcctaaatctaaaaagaaagaatttaattatgcaaaccacagagcgttactgaggacattttactatcacctgggatagtggtaggaaaaggagcttgggcagcggcatttagaaagacaagctttaatgttgtgttttggtttaatgataagttgggaacctctactgcatgttgactgtacttcccagattttccagaacggccataatttcagatattgtgtcccactgtctgtgtaaaccattaaaataccccctaagtaaaayatttagacatgcaaactacatctcatcaactgtctcttatacttagaaggtgtgtgaaagtcatttatcctttatctctttattttcaggttgacaaatatggccactattacccagggaatgttttctcttttcaacctatatttctggaatacaataaactataaaccaatgccacaatcataaaattctaaatgtgatgcgaatttttcaaaagtgaaactgcctttgcaaaaatcataacagtgagaaaattatggcaatgaaagagatctgatgaaaccaactccatcttgcgtctaaccttcaagctgtccttgttcattcctgggcataggctaaacta

SEQ ID NO: 597870 - DNA, 621 bp, Homo sapiens
atgggagttcagcaagactgaggtacaaggtaagtatattatgtctatgattgggtaaagagaggcactggcagccccaaaaggtcatactttccactggaatcagaagttgcaaaaatgcaggaagaaggcagtggcaaggctgagtacaatggctcatgtgtttaatcccagcactttggraggctaaagcaggaggagcatttgaggccaggagtttgggaccagcctgggcatcccatgggatgggatagctagaccccatcccccatctgtacaatttttttttttttaattagccaggcatggtggtgcatgcctgtaataccagctacttgggagactgaagcaggaggctcacttgagctcaggagttctaagctgcagtgagctgggatcatgccactgcactccagcctgggtgacagagtgagatgcaatctctaaaaatcaaagacggcaatgacattccaagaaacacagacaaccaagggattctataataacctttgctattcatgctatttccacctattatccaaccacttatgctgaaaagatacagaaggaagggaagcatagagcaacccatagttcctttttctctctgcccttttctca

SEQ ID NO: 597871 - DNA, 428 bp, Homo sapiens
cggttacatttccttattattaacaatcagagcaatcaaacgctcactcttgatggttttctgccctgcatgcttctaaggatccaaagcaaccctcaagaagggtgcatacacaggaggctcatcaagcatatcacactgcctcttcagtctagaaataggatgtccaaagaggcattgtgatcaaagtacacacaatcgggagagttataaatagtggaaacttgtacttcagcaaattcccacgtgccagaaataggaggygcccttgcaatttgagaatcttaagtttaggataaacataatatgtgctcaatatatttgagattttggaaacggtcaaactcaagtttaaagccacacctgccactttctggttgggtgatcttgtgcatataccctaacctctaaattttgtttgtttgttt

SEQ ID NO: 597872 - DNA, 665 bp, Homo sapiens
gcctaacataacctacaagttttggcctctgcagacctctccagctacctccacaactagagccactctcatttttgctttccagcccatgtcctcctccttcctcagttggcttctgttaagttcctctaatgtgtagtgctccctcctgccacagagcctttgcacatgctgttcctctgcctcctccccttggcttactaattccagctcaagagttacttcctcagggcagccttctatggtgacacagagtaattgaggttctctcatgatatagtttggatggatgttcatcccctccaaatctcatgttgaaatgtggttcccagtgttggaggtggtgcctagtgggaggtgattggatcatggaggcaatgaatgggacaaccagatctcatgtgaactcactgaacaagaactcacttatgacccctcacatgagatgtggttgtttaagagtttgggatgtccttcttgcttcctctcaccatgtgacatgcttgttcctgctccatcttccaccatgagcaaaagctccatgaagcctcaccagcaactgagcatgtrtgggcaccatgcctcctgtacagcctgcagaaccataagccaattaaacctatttcctttataaattacccagcctcaggtattttttataggga

SEQ ID NO: 597873 - DNA, 548 bp, Homo sapiens
agggattgttggacaagccctgggcaagatagtttgctagctgaactctcccatagggaaggtttggagcctgcctggtgatgtcccacttctcaaattatcttgttgtaaatgtctggctcccaaagcctagaatttactgggctgagcacagctatatcatattctccactgggcaccatttaggattcactgctcacaggaggaccaactcccttctggccccatctctgcttatggagatgttggagagggggaatttcattacccgcagaattcaatctagcccacctacatcccaaaatcaacctgtcaggactggtgaggaccgacagcctaatccycagtcctggctgtgaggaacctggccagatattggggtcactggggcacatgttgacagttcatatggaaaactgtgcaggatacacctggacaattagtcccagtttttctcgagggaaagatggaaggggccatttctttgttgataagattcagagtcaactggcagtttatcctgggtctgctgaatatccaagaatttc

SEQ ID NO: 597874 - DNA, 421 bp, Homo sapiens
gcagaactcctcaaacaggaagaatattcagagtctgagcagccaaaaaaaaaaaaaagtgatgcatccattctatgcatgggtaaatgaaatgaagttcagaaatgaattggatgctgggaataytaagaagtggctttgttcatcccttccatgggtgacattctcctccctaagctgaagttctctcctgaagtcagcgttcctcttggctatagggaggataaagtccaggcttaatgatagcagacatggctcaccaaggacaacatgatggacaaacagaatttcttctcctgcaacccaagttatgagcaggggaacccaggaaggtctatcggaaaagggctcaccccagtgcatggccaggaattcctgggggcagatttagtgtatgtctctatctagccaattcattgat

SEQ ID NO: 597875 - DNA, 526 bp, Homo sapiens
aaactaactgatccagagtttacagctagtcagggcagagctggaatttgactcggggtagtacagattaaagcgctaacagtttaataaggatttaaataaaaccacagaatgaaaaccccacatctagctgtcaagaggatatcctaagttaaaagaacagaacagcattgaggtggctagagggtgactgtgggggaggggtaggaagaaagagaccagagggtaagaaggaagctgattttgttggggagagttatggctaggccttgggaaaccaagtccacaactgtggcttatttacagaggccagagaaatctcagtgatgctctcttaacacctccttctcccatctgcgcctggttttgtccttgatcctgatttggtgggggagattttctgcaaggctcaggatggatatagaaggacacacatctttctttgtaaatagggccacttattgtcaaaatgggacacatttgagagtaaaagacagcatycttcattacactaaagtagcaggca

SEQ ID NO: 597876 - DNA, 520 bp, Homo sapiens
gttggcatattcatggcttctctccctggctcaggaacacattagattttcctggaccctgtgcgcttttgccttcatggggctccttccaccataactatagcaacattaaaaattatttttgataaaactttaaatatttaaacattttatttttttctatttaggcaaaatgtaatcrgttttcattgatttttttcactgaagttttgtttttctgatatgagaaaaaataaaacattccaataaccctaagattttattttttctttctgattgtaaaaaatttaaaacactatggtgagcccctaaaagtagtgggtaagttggccccactctccatggaaggtaagccccatgagggcaggaatcccatctgcctactctctctccttggaatcccttcctactttttctccttgaaatcccatcttcctgctccctcttgttggaattccatctccctactctctccttggaattctgtctgcctactctctcttcttggaattccatcttc

SEQ ID NO: 597877 - DNA, 577 bp, Homo sapiens
acgtatatttcatgcccttgacccttcagcataataaaattaactagcatttatcatgtgtttaccatgagtcaggcactgacaccaaacaatttacatgtatcatctcatctaaccttcaaatctatgaggtacacagtatcatacaaagctattcaacagactaggaaactgagactcaygtattatttcgtatgcccttttaatggatgaggaaatagagctcagagaaattaagttactcactaggaagcggcagggctggaagtcggacgaagactttatctttttggcttctgatcttgaactcttagctgctgtgccaaactgtcttctgatgtaaacagtgaggtacctacacatattttttaatggttttaaaaaacgtttttctgtttgtaacaaacagcctcaaaatcccagaagcatacaataaacatttattttgatgctccagaggtttgcggtttggctggggtttggctgacgtaggctgggcttggctccaggcttcttgttgggctcaggcctttctgttctacataagtgcattctaggggtgcaagcttcaggagca

SEQ ID NO: 597878 - DNA, 657 bp, Homo sapiens
cccaggtttaggaaccctgagcttgagcagtgtaacccaatctggtggctaaggaacttttaaaaaaaaatacagattcttggcattccagtgcagaggtttttgctctgaagggttgagatttagccttggaatctgtatttccaactagaaatttaagacactttggtttactaatcagaacttggaaactgttgcttttggtccttgttatgcccagacaggaaccccaaattaaagattattttaggatttacacagaacaatcctcccttaaggccctcctaacactgccctctccagaaatctggcaaatttgcttcccagcctcagggttcacaaggtttgcctacaagtggaatctctaaatagtccaggcaatctacaatttctcttcctccgcttcctttcacttttaaaatgaggaggaattcgaggaaaatgtaatccatatgtttcagaatcatttacacttaaatcatgaaagtactgcygtggtttttaagagctatttgatgttcaaaacaccttatgaggatcttaaaaataagtgttttaaagtctccttttactttcagttggattttgctctgggtaaatgaattcaaacacagtgaagcaggaggcgggggtattgtgccggaaaacccaagccat

SEQ ID NO: 597879 - DNA, 594 bp, Homo sapiens
acccattcttttcctcttgtagcattgtgcttggtacataactaggcctcaaaaaagtttgctattattgttatcattcatatgaaagtgtccaacctaaaatccccagtggggccagcagatatcataaacagtgactggtggggattttctaatccaaacaatgcatgaacactcctgctcactcccgctagcagtcctgcaatgccaaaagcattctggttttctgagagaagccagaaatccatattgtaggtgaacttttaaaatgttggctcaaagaacatgttaacattaggcaggtaaaataaaacacaccgagggccagtctgcccatgcctcatttgtgacccctgagctaaggtctgtccagtctatgctttagaatctgggcttaagtttccatcctgactcttccacctacaggctgtgtgaccttgaacaagttacttaacctttttgtgtctcaatgtccttagccaggtaatacttgttctgtggggttgttgtgtggaataaattagataacgcagccaagctccygagtgatatcccacgcatggtaagacttagtaggtgatcattgttgctgct

SEQ ID NO: 597880 - DNA, 465 bp, Homo sapiens
ttgaatgtgttatgagccacctggggagtgtgttaaaatgtagatgctaattctgtaggtcgggggtggggcwgagaccacatttctgatgagctcccagggggcgctgatgctgctggcccagggaccacactttgagtagcaagacattaaccatggcccagcctctggtctaagcctcgggtagcttcaggaaaagatgggggccccaggaggaaatgtcctacaaacaaaataacctccaaagatgaagagcatgttctaggatgggaaccagaagtaatatgacccaaatcatatcatgacctcatttttaaaatgaaacaagctgagaaagttcaaatcacttgtccaaggtcacacagctggaaaggagctgagctgagatttaaatcctgtctttaaggctgggaacggtggctcgctcctgtaatcccagcactttgggaggctgaggtgggcaga

SEQ ID NO: 597881 - DNA, 465 bp, Homo sapiens
ttgaatgtgttatgagccacctggggagtgtgttaaaatgtagatgctaattctgtaggtcgggggtggggcagagaccacatttctgatgagctcccagggggcgctgatgctgctggcccagggaccacactttgagtagcaagacattaaccatggcccagcctctggtctaagcctcgggtagcttcaggaaaagatgggggccccaggaggaaatgtcctacaaacaaaataacctccaaagatgaagagcatgttctaggatgggaaccagaagtaatatgacccaaatcatatcatgacctcatttttaaaatgaaacaagctgagaaagttcaaatcacttgtccaaggtcacacagctggaaaggagctgagctgagatttaaatcctgtctttaaggctgggaacggtggctcgctcytgtaatcccagcactttgggaggctgaggtgggcaga

SEQ ID NO: 597882 - DNA, 500 bp, Homo sapiens
acaacctctgctacggacctcatctctctctctctctcwcacacacacacacacacacacacacacacacacacacccctgaaagatggctaccttcactcagacgtggcatgaagatgctgggatatgggctttggggagattgccttggagagcaccctcagataggaactgcagctgctggggtgagggtgaaggatggggaggaggtgtcttttagatgctgtcttggcctgcagtctgcctggacacacagacagcagcatacatgctgtggaaagagcatcctctcctgctccctctcctcccatcctgcactgggacaaaaagcctaaccctagtctaagtgaatcccaaacatgaggagtcagggatgcaagaggctttggagcttgctcttttttcacttcttggctttgtagttggggaaactgagtcctggggatagaaaggggcatcttcaatgcctccagtcagtggtggcagggctgggtcagacc

SEQ ID NO: 597883 - DNA, 500 bp, Homo sapiens
acaacctctgctacggacctcatctctctctctctctctcacacacacacacacacacacacacacacacacacacccctgaaagatggctaccttcactcagacgtggcatgaagatgctgggatatgggctttggggagattgccttggagarcaccctcagataggaactgcagctgctggggtgagggtgaaggatggggaggaggtgtcttttagatgctgtcttggcctgcagtctgcctggacacacagacagcagcatacatgctgtggaaagagcatcctctcctgctccctctcctcccatcctgcactgggacaaaaagcctaaccctagtctaagtgaatcccaaacatgaggagtcagggatgcaagaggctttggagcttgctcttttttcacttcttggctttgtagttggggaaactgagtcctggggatagaaaggggcatcttcaatgcctccagtcagtggtggcagggctgggtcagacc

SEQ ID NO: 597884 - DNA, 517 bp, Homo sapiens
catgtgtatttctttctcttgtaaataagcccagaggtgatcaacacagagctgctatgaatgctctgctcctgacattctaaagaacctagattcttctcagctcaatgttccatcatccctagagtgtggactgatcctcatggcccaagatgactgctgaagctccagccatcacacttcaagtacctggatagggaaggaggacagaaggagctactttctcccttaatagggctgccagatttagcaagtacaattacaaattacccaattacatttaaatttttgatacataacaaataattctagcatmagcatttaggacatacatattttttaagtctgttttttattttgaacttatatataatttggtgtcctgtattttatctggcagccctaccccttaaggatatttctccaagtatctcacaacatttctgcttgtatttattgtccaaaacccagtcacatgaccaacctctctgcacctgagactgaaaaatgttgtatt

SEQ ID NO: 597885 - DNA, 562 bp, Homo sapiens
cttctggctttgagattcccagttctgtgatctaatgtctggggcctcaggcttaagcctctaggtacctataggcaggaaacaaagaaccccaaacaaagaagccacaaagaggcaggaagcccgtacatcatgcagcagcctcggtgttggaagccctgttgaagtgccgacagcgtttttatgtttggagaatcgtagtaatggggaacacatttttattaaatagatgcagtatcagggtgtctgctagtagctattttcttaaactcacacagtaggtattgattaccgacccaaagccatgtctcctaggaactgtaagttatgtccttcstgcctttctgaaaaccatcttaagctgttgtgtggttgtcagttctttcaatgagaagctaaaagattttttaatgtatttttggtgggggtggggtggatggaatgttggcccaaagtgaagcatgtgtagtcaagcctgctgatccacacagatctaatagattaatttaatttatttttttcaagacagagtcccgctctgttgcccaggctggagtacagt

SEQ ID NO: 597886 - DNA, 520 bp, Homo sapiens
ggctagcagtgacttgaacagtgggagctgggagcatctggaagcttctttttttttttttttttttttttcggagtcttgctctgtcacccaggctggagtgcaatggcacgatctaggctcactgcaacctctgcctcctgggttcaagcaattctcctgcctcagcctcccaagtagctgggattacaggcacccaccaccatgcccagctaatttttgtattttcagtaaagacagggtttcaccatgttggtcaagccggtcttgaactactgacctcaggtaatccacccacctcttaaccatctctttggtgcctgggctggcatacctggaatgctaggctcaactgaaacctacatgttgatcaagctggtcttgaactactgacctcaggtaatccacccacctcttaaccatctctttggtgcctgggctgggatacctggaatgctaggctcaactgaaacctacatrtgggctcttcttgtagcttgggcttctcacaacatggcag

SEQ ID NO: 597887 - DNA, 600 bp, Homo sapiens
aaaggtgtgagcagggtttaaagaaaccaacaaggggcagtgtagcaacatgagggagctgttaccgctgtaggccggagggggaagaggagctggggtgcctcattagccaaacccagccagaaactrgagagcaagggagtgtaatgatgcagttccccagggtgcagagcggggtagagaaaggtagagatagatatacatgggcagaaagaattaatccagcacacagagctaaaagaagaagaaaaaagaaaactatatatgcaggatattttcttttatgtaaaaacatagaaatgaaaggaaaaccaattccctaagctgtgtatctgaatggatatacggtgcaaaggtgcaaccatgttcattttaatgttctttgttgaaagaatgaaaaattagaaaaaatatatttgtcaatagaagatagcctaaactaacccccaaactatatacccatagatatatcaatagatatatctatatgaatatgtatctatatggaaatatctatggatatctgtctagccatagagatgtatctatagaaaatagaaaatagcctgaaccaaccctccaaactatatatccatagtt

SEQ ID NO: 597888 - DNA, 563 bp, Homo sapiens
aacaagcacttatgggctaatacttcttgctctcagttatgaattcttaagagtcctatattcggtaagttagcccaagtttgatgtttcctgacatagctaacactcattttagcttgactcgccccttccactttcctggaggactgaggcctctgagctgaatgtaaatagcatttgacactgagagcctcagtaataccttaagttatctgggagaaaaaagacaagccgttatcactttagaggctttggggtaaccccaaactatgggattatctgctttaagagaacttgtaacctcactagccttctggtagagtaagctcaacccacccagtaaacatgcctattaagtactagcaaaaacttgtatyctctacaagctggcatgtgggtaaactccaattatcggtcttctggataagctctccttctctggactggctctattagaggaggcattctgttttctgggtggccgaacgtgcagtgaacaggatgacagacccgtttaaccactgaagcaagttaggctcaatgaagagcctgtgtaccatggc

SEQ ID NO: 597889 - DNA, 563 bp, Homo sapiens
aacaagcacttatgggctaatacttcttgctctcagttatgaattcttaagagtcctatattcggtaagttagcccaagtttgatgtttcctgacatagctaacactcattttagcttgactcgccccttccactttcctggaggactgaggcctctgagctgaatgtaaatagcatttgacactgagagcctcagtaataccttaagttatctgggagaaaaaagacaagccgttatcactttagaggctttggggtaaccccaaactatgggattatctgctttaagagaacttgtaacctcactagccttctggtagagtaagctcaacccacccagtaaacatgcctattaagtactagcaaaaacttgtattctctacaagctggcatgtgggtaaactccaattatcsgtcttctggataagctctccttctctggactggctctattagaggaggcattctgttttctgggtggccgaacgtgcagtgaacaggatgacagacccgtttaaccactgaagcaagttaggctcaatgaagagcctgtgtaccatggc

SEQ ID NO: 597890 - DNA, 563 bp, Homo sapiens
aacaagcacttatgggctaatacttcttgctctcagttatgaattcttaagagtcctatattcggtaagttagcccaagtttgatgtttcctgacatagctaacactcattttagcttgactcgccccttccactttcctggaggactgaggcctctgagctgaatgtaaatagcatttgacactgagagcctcagtaataccttaagttatctgggagaaaaaagacaagccgttatcactttagaggctttggggtaaccccaaactatgggattatctgctttaagagaacttgtaacctcactagccttctggtagagtaagctcaacccacccagtaaacatgcctattaagtactagcaaaaacttgtattctctacaagctggcatgtgggtaaactccaattatcggtcttctggataagctctccttctctggactggctctattagaggaggcattctgttttcygggtggccgaacgtgcagtgaacaggatgacagacccgtttaaccactgaagcaagttaggctcaatgaagagcctgtgtaccatggc

SEQ ID NO: 597891 - DNA, 527 bp, Homo sapiens
ctcacaggattttacgctaaagatctcatcatcaaaactgcaarcacgtcatatactaatgttattgccacctccttgacagctgtctatagtacccatgttctttgctctgataggactgtctcacttcacaaaaatgactcctacaactgcaatgggtgtcagcccaatatgcgcatcagtagtaatgctgtcagtaacttcacagctctgtgacccttcccctcctgaaatgctgttgacaatgtgatcccacctgaatcatgtgtgaggcactgatcaatacatcaagttgaagcttagacttggctctaagcctctgaactcggttcattcttatggcttaaaactagtgcaggccccacataaacctggatcttccccatttgggcttgcattatcaacagatctctaactcatgagggaaaacaaggttcggatggggcccacctgccttgggtcaagtgtgaacccacacctgacttgctcagccacctcaggggcatctttccaaattgagcccactg

SEQ ID NO: 597892 - DNA, 589 bp, Homo sapiens
tcctgggctgttgtctccaaatgtttgctaggattacctactcttytccccccccctttatgttcttgtagaattgtagggaccagggcagtgccacatcaagggcaaggaaaccaatcctgacagtcctgagccctccctttcctattgaaaatggagtgagaattgctcactgcatggcaagtcctgccaccattcctccctgcaccagtggtagacattgctaatccatcacggaacttggcttatagtgagcttctacatggatctggagttctccatattcctggcagctactagcagttgattgcaatatagcaaacacttggtattccctagggagtcaagaggatgggttgtaacaagtctgttttcaacattctacactgctggaacagtagtgctctatgctctgaaacaatagctggctcagcctggtaacttgtctttccctgaacctcccttgggtgagagtaaagaggccaggctctggaagtccctatccttacctaagctcaatgtggttatgaggttggagatggcaaagtcaaagacctccaagatgagattgtcttgggctcatgcatca

SEQ ID NO: 597893 - DNA, 589 bp, Homo sapiens
tcctgggctgttgtctccaaatgtttgctaggattacctactctttyccccccccctttatgttcttgtagaattgtagggaccagggcagtgccacatcaagggcaaggaaaccaatcctgacagtcctgagccctccctttcctattgaaaatggagtgagaattgctcactgcatggcaagtcctgccaccattcctccctgcaccagtggtagacattgctaatccatcacggaacttggcttatagtgagcttctacatggatctggagttctccatattcctggcagctactagcagttgattgcaatatagcaaacacttggtattccctagggagtcaagaggatgggttgtaacaagtctgttttcaacattctacactgctggaacagtagtgctctatgctctgaaacaatagctggctcagcctggtaacttgtctttccctgaacctcccttgggtgagagtaaagaggccaggctctggaagtccctatccttacctaagctcaatgtggttatgaggttggagatggcaaagtcaaagacctccaagatgagattgtcttgggctcatgcatca

SEQ ID NO: 597894 - DNA, 588 bp, Homo sapiens
gtgccagctttgtactcaccacccaagaactcgagtgtcctttatagtggtacactgagacctcactaccttctaccctcgagagggaagtagctcctgggctgttgtctccaaatgtttgctaggattacctactcttttcccccmccctttatgttcttgtagaattgtagggaccagggcagtgccacatcaagggcaaggaaaccaatcctgacagtcctgagccctccctttcctattgaaaatggagtgagaattgctcactgcatggcaagtcctgccaccattcctccctgcaccagtggtagacattgctaatccatcacggaacttggcttatagtgagcttctacatggatctggagttctccatattcctggcagctactagcagttgattgcaatatagcaaacacttggtattccctagggagtcaagaggatgggttgtaacaagtctgttttcaacattctacactgctggaacagtagtgctctatgctctgaaacaatagctggctcagcctggtaacttgtctttccctgaacctcccttgggtgagagtaaagaggccaggctctgga

SEQ ID NO: 597895 - DNA, 579 bp, Homo sapiens
cttctaccctcgagagggaagtagctcctgggctgttgtctccaaatgtttgctaggattacctactcttttccccccycctttatgttcttgtagaattgtagggaccagggcagtgccacatcaagggcaaggaaaccaatcctgacagtcctgagccctccctttcctattgaaaatggagtgagaattgctcactgcatggcaagtcctgccaccattcctccctgcaccagtggtagacattgctaatccatcacggaacttggcttatagtgagcttctacatggatctggagttctccatattcctggcagctactagcagttgattgcaatatagcaaacacttggtattccctagggagtcaagaggatgggttgtaacaagtctgttttcaacattctacactgctggaacagtagtgctctatgctctgaaacaatagctggctcagcctggtaacttgtctttccctgaacctcccttgggtgagagtaaagaggccaggctctggaagtccctatccttacctaagctcaatgtggttatgaggttggagatggcaaagtcaaaga

SEQ ID NO: 597896 - DNA, 579 bp, Homo sapiens
cttctaccctcgagagggaagtagctcctgggctgttgtctccaaatgtttgctaggattacctactcttttccccccccctttatgttcttgtagaattgtagggaccagggcagtgccacatcaagggcaaggaaaccaatcctgacagtcctgagycctccctttcctattgaaaatggagtgagaattgctcactgcatggcaagtcctgccaccattcctccctgcaccagtggtagacattgctaatccatcacggaacttggcttatagtgagcttctacatggatctggagttctccatattcctggcagctactagcagttgattgcaatatagcaaacacttggtattccctagggagtcaagaggatgggttgtaacaagtctgttttcaacattctacactgctggaacagtagtgctctatgctctgaaacaatagctggctcagcctggtaacttgtctttccctgaacctcccttgggtgagagtaaagaggccaggctctggaagtccctatccttacctaagctcaatgtggttatgaggttggagatggcaaagtcaaaga

SEQ ID NO: 597897 - DNA, 588 bp, Homo sapiens
gtgccagctttgtactcaccacccaagaactcgagtgtcctttatagtggtacactgagacctcactaccttctaccctcgagagggaagtagctcctgggctgttgtctccaaatgtttgctaggattacctactcttttccccccccctttatgttcttgtagaattgtagggaccagggcagtgccacatcaagggcaaggaaaccaatcctgacagtcctgagccctccctttcctattgaaaatggagtgagaattgctcactgcatggcaagtcctgccaycattcctccctgcaccagtggtagacattgctaatccatcacggaacttggcttatagtgagcttctacatggatctggagttctccatattcctggcagctactagcagttgattgcaatatagcaaacacttggtattccctagggagtcaagaggatgggttgtaacaagtctgttttcaacattctacactgctggaacagtagtgctctatgctctgaaacaatagctggctcagcctggtaacttgtctttccctgaacctcccttgggtgagagtaaagaggccaggctctgga

SEQ ID NO: 597898 - DNA, 588 bp, Homo sapiens
gtgccagctttgtactcaccacccaagaactcgagtgtcctttatagtggtacactgagacctcactaccttctaccctcgagagggaagtagctcctgggctgttgtctccaaatgtttgctaggattacctactcttttccccccccctttatgttcttgtagaattgtagggaccagggcagtgccacatcaagggcaaggaaaccaatcctgacagtcctgagccctccctttcctattgaaaatggagtgagaattgctcactgcatggcaagtcctgccaccattcctccctgcaccagtggtagacattgctaatccatcacggaacttggcttatagtgagcttctacatggatctggagttctccatattcctggcagctactagcagttgawtgcaatatagcaaacacttggtattccctagggagtcaagaggatgggttgtaacaagtctgttttcaacattctacactgctggaacagtagtgctctatgctctgaaacaatagctggctcagcctggtaacttgtctttccctgaacctcccttgggtgagagtaaagaggccaggctctgga

SEQ ID NO: 597899 - DNA, 588 bp, Homo sapiens
gtgccagctttgtactcaccacccaagaactcgagtgtcctttatagtggtacactgagacctcactaccttctaccctcgagagggaagtagctcctgggctgttgtctccaaatgtttgctaggattacctactcttttccccccccctttatgttcttgtagaattgtagggaccagggcagtgccacatcaagggcaaggaaaccaatcctgacagtcctgagccctccctttcctattgaaaatggagtgagaattgctcactgcatggcaagtcctgccaccattcctccctgcaccagtggtagacattgctaatccatcacggaacttggcttatagtgagcttctacatggatctggagttctccatattcctggcagctactagcagttgattgcaatatagcaaacacttggtattccctagggagtcaagaggatgggttgtaacaagtctgttttcaacattctacactgctggaacagtagtgctctatgctctgaaacaatagctggctcagcstggtaacttgtctttccctgaacctcccttgggtgagagtaaagaggccaggctctgga

SEQ ID NO: 597900 - DNA, 590 bp, Homo sapiens
tgggaacaggggtctgggcagtttgtgcccagggacgatgggtaggcagggagatgcttatcctagtacctttaaaaaaaaaaaaaaaaaaaaaaaaaaaatagtagtaatgtatggtccaggaagagacaatctcaggatgactgtccccagcatctaaagtatgactcaggagcaaggcttcagtcttgtagctagaaatgcctgcctgcccctgtctcaggtcatgggtgggcccagatgaatgcacggatcctcacctctcaccccgaaatagatcttcacaaatcgtgaacccaaaatgaacacttaagaggtgctttacatggacagtctcaggctaccctctttggaggtatgtatagggaaggtggacaaaacttcagtttttcttaaaagtgcaagtgacagggatctgctttctctgggcttggctttcctatttccaaaacatggtcggtcttggtgactrttcagtggagtgaacatctttatttcaacaggaacaaactattgtataagtggtcacaaagcccagttgactgatcagttatgtccatgccttctggttctgcccattactgatggtg

SEQ ID NO: 597901 - DNA, 575 bp, Homo sapiens
ttatttgggtacttgtgacctgggtactccctgcagcagacatttctagtttatggcatcccatttccccytttttttttcttaccaacagaaccccagttttttaaagggcagcagtgctggcaatgtgttaagtgaaacatgcttatttttcccaggctccatgtggtaaccagaacctagtgggtggtgcagctaaggaagaaaactgtgcaacgggagctgtagtcatacggtaaagtagccacagctacagaagtcaagaggggccttgaagagggagaaataccccatcctctctctcctcccgccctctgatcttctggggtgctcccattggtcgagctggtctggaagccggagagcaagagagccccagtggatctagatgcagttttctatacgtatagctcctgggcacagagcagtgtggatgtgggtggagaatgctcggaggggcagagagaatattcagctcagccaagttggcagggctccctgaatcccttgcacaagaatgaatccattggaatctcccatcccctcaggacaaagaattctccaatgcctcttgg

SEQ ID NO: 597902 - DNA, 602 bp, Homo sapiens
gaatggtgaaacacagcaccttagacagctgtaagtcagcagtcctcaccccaggcacttaggtactctttttgaagtgaggtctcaccctctacggctggaggactttcaaataactatgccatcaactaatctgccttaactgaggtagaattcttcttctacaagcagtttataaggtcatctagtggggaagagattcaaactttttctaaaactgctcctcctacgtgcaacctacctccaactcccacaagcagcatctatgcagtcaaaacacagtgagctgttggtaactgcacggattgtagaaagtttgttcagactacagcatgaatttggctggtgggctcttgtagcagggagatggtgagagttcccgtggttttgcacactcagtttaatgttgatctacctcccactgtcttgaactccagcatctggccaaacatctagagaacagacttcagtggagtaggggtctgagcgtggggaggggaagcaagatttcaagggctgagggtgaaactgctgtcaygtgctcagccatcctgcctcacacaccttcccaggaaccgaggctgcaggttccattgggtggg

SEQ ID NO: 597903 - DNA, 606 bp, Homo sapiens
tgccactactcaaatcactggccaaatattgaacagagtgagtcagttctattgtgctccaataagaacatgactccattaacctatgttgtccaactatacaaccctccaatcaacaaatactccytgtataacgtttccaggagctaacagggttgcctaaggtgttctgcatcagggtttattctagaatcttcaggacactataaagcatcttgataacttgccttgagacgtctttccctttcacaccacctgatgtgaagagccctttttagtgtatcctttctgtaatacctctccccaaaatgtgtaacctcaatcatgaggacacctgccaagcctgaaggaacacttagcaaaactgaccagaaccctttaaaagggtcagtcaggctgagctgtgatgactaaatgcaacatagtattctagactggattctggaaccaaaacattagtgaaaactaaagtctgaaattccatagcttagttgacattttatcaaggctaacttcttaattctgatagctgtatatggatatattagatgccaaggggaagttgggtaaaggaatataaaggaaatattcttttgacttagtgtt

SEQ ID NO: 597904 - DNA, 597 bp, Homo sapiens
taaagagcagcgttaggcatgtgtttcctctttcaaaataatccttcctatttaacctgtaaactccatacaattcagcaatcataacatggaaggttagtctgtcattcagttgaccattgttaatctgaggttgtgtaatggttgtctattcagtgtgcctattgccatacagtgaaataggattctattaaataacttacacccagatcatttaactcctgatgcacttaagactcagratattcactagttgtaatgtagcctcaccttgattcaccaactgtctacatcttgccccatctttctgagcaatgccctgcccacttagagattaatacacccctcccagagctgtcaggagtaaagtatggaagaagccagaattgctgcctgtacaagtagtacctatcctggccaaagtacatgaaccctctccctaggacctctgggactcagtaagcttgtctgttgataagcaacaggtctccatcttcaggagcttaattggctgagggctagagctggaccaatcccaggcagccttactgatggagaacagaagcagctggctccaggcttgggagggaggggagt

SEQ ID NO: 597905 - DNA, 657 bp, Homo sapiens
ctggtgcaccagtactcgtgtaagtgactaaataccactatgtccttgcccccacagtctagcctactgggagacaggtcagtgtattacagcctgataaatggccttgggtcaagagaatgctatagaactctcagaagtgctcgctggtccctgaagcttgatggaaaaccagcaaaagctgcttggaataactggtatctaagcaagaccttcaaaaggtaagatttggaaaatgctctctaagctcactggaagctgactgggtcactttgctccaagtgactccattgttgcataaaccactggacatatcmttattcaaaaaatatgaattcaggacaaactctctcccttccataccctacccatacagaaggagttgtacagcaaacagaagcagtcttaagcacaggaagccatagctggaaagtgtaccactatcctagctctctgcacaccctcagagtagaaggaatgccacgagtcaggcattcctcttcccttccccagtgcaagcacgtggggtcatagcacttcctgccatggcttatgaggggctccagcaggggtcaatcagacttccctgttcatcagaaaccctagatgaacagatggcagacaatgcctagcacgtcagccctgggactgtgttcc

SEQ ID NO: 597906 - DNA, 581 bp, Homo sapiens
cttgaccctgttccctggaaagcactactctaccctgagtcttcctaagtctagtcttgaagccaagaaaactgacattctctttccccaaactttgctttttttggaagaggccctcaaaatctccaggcttgtcactctgtgcaaggcattcattcccaaggttgcattatattccaagatttctgttagagcttcagctactrtctggattctaaccaatgggaagattttaaaaaagggataaatgaggtaccactgctctaaggatagtgcctgggacctgaattcacaagttctacttatgttccatttgctgtctctttagtgagacgaccacacatagctaccagaaaaactgcctattctgggcaatctggtttacctaactaaaaagagaagttctgttactgggaagaggtaaggactgatatttagggctaacttgtaatctttgttgaatggctttagtgttcaaaaactggtactgtgtcttgctgcatgtcttggtgcattagctactttcatatctgtaaaatgggcatactgtcaacctcataggcttgagggttggattagac

SEQ ID NO: 597907 - DNA, 506 bp, Homo sapiens
cctaccatatgtcataaacaccctaccaagatgagcactaccactcatggctcatataatacccttttcccatgagttatacttgagtacctctgtatagtcctaaaccaagaaaagtgatccaactggtattccttataatttagtaatcagaccaggctggctttctgaaaagtaacccagcctcatctagaatccctatttagctctatttacacctctactttcctgaaattaggtgaggctgttgaacaaagccatataagattaggytgtatatgaatcgtgaaggtatgcacactatcccttcccagttccagggatggttagtcattctagcttgagtctggaaccaaagtggtcttcatcctcccacactccaaacttgaggctcctctgagcagaggcatgtaagtaaagccagaatatgactatcaaattgtagcaaccacaatactgcttcctaatacggctgagggggacatttccagttaaatggcttgtta

SEQ ID NO: 597908 - DNA, 506 bp, Homo sapiens
cctaccatatgtcataaacaccctaccaagatgagcactaccactcatggctcatataatacccttttcccatgagttatacttgagtacctctgtatagtcctaaaccaagaaaagtgatccaactggtattccttataatttagtaatcagaccaggctggctttctgaaaagtaacccagcctcatctagaatccctatttagctctatttacacctctactttcctgaaattaggtgaggctgttgaacaaagccatataagattaggttgtatatgaatcgtgaaggtatgcacactatcccttcccagttccagggatggttagtcattctagcttgagtctggaaccaaagtggtcttcatcctcccacactccaaacttgaggctcctctgagcagaggcatgtaagtaaagccagaatatgactatcaaattgtagcaaccacaatactgcttcctaatacrgctgagggggacatttccagttaaatggcttgtta

SEQ ID NO: 597909 - DNA, 597 bp, Homo sapiens
ggggctggataagctctggaaagggaaactaccctgggccctcatgtaggagggagggagggccatgataggtacgtgagtggctgtggtcatagygctagaatggccatgcctgaatgtccatctctacctgtgcccctgaagcagtccccagtatatgtggagctctgcatctatacttgctatactccaaaagggtggtgtctgctcaacctggtgcccaggttgtctgagagaattgactacgtctaccttttttctcctacttcaattaacaacttggcactgaacttccacttctttagtgtagattagtctgtctcaaagactaacatccccatgacagtctggtatcccaaagcctttatccagatgccttcagagaaccaggacagagatgacgtacctttcccatctcttccgcatatttgctgttcccttccttgggatgctgtctggcctgagctggccacattttcagggttttactgactcttttaacccatatgttcaagtactatgttgggtagaatacccccattcggggtggccactttggatccctattacgtcaatctagtgcatgtagccaagaaa

SEQ ID NO: 597910 - DNA, 557 bp, Homo sapiens
ttcgcacaactcatgaccatcttgttagagaaatgtagctgttcttaatggggagcctgattgcagttggcatctgagcacagggaggctgaggctcagaagggcagatggtagcatctgcctgagactttagtatgggaaactgaacttcaactcctatggtacagagggaaggaaactggttcaggcccaccggaccagtcacttcctaatctgaaatcctgaactgggccctcggggaagcattacttgataactaagggcatgaatgtggaagtctgtcttggaaggagaacaggatgtccatctgtacttccttaggcaycgctctgggttccactgttcttggttctttcttatttgctgtaggattgccccggtatgcagacttgggagcctcctgtctgcagggcaggcttcctgatggtgtcagcactgttctaggttgcagattctacctccttgtggctaggggaacatcctatcatgacaactgggtctcatcagatgaacctgatgttcatgaagtgactccttggttagctgtttgtttaggg

SEQ ID NO: 597911 - DNA, 610 bp, Homo sapiens
tgtattcaaaatgcttggtcaataaaaggtctgtcttttattgtattatccatatgaaggtggtataaacaaggcacagtgacttcaatcgggtggggtcttcacctctaacttgcaagcacttatgccacctactagaaaagtaggatcttagaaggtccataccagttattcccaccttgtgtctcttcctgaccagctaattataaatacagaataacctgtaagacacaacctggaagacacccaggatccttctaagaggtggatagaacccttcttggcaggaatyccatggaggtcacgggtagctcctggcatcctgcctagaggtgcatgccagggtgtcccacagctgaggatgctaaaatagccatatcatgaagctgaacaatgtccctttgtcatggttgcttcccctgctttatggctactacataagtgagatccttgattctttttcctattttgctagattctgatattgatggggcttacaacctagaaatttaattccagaatccagttcatacttacaaaaggctgtctaaagatttccttcctgtactcttgataagcatcgtgggctcggtggctcaggttctgatgg

SEQ ID NO: 597912 - DNA, 610 bp, Homo sapiens
tgtattcaaaatgcttggtcaataaaaggtctgtcttttattgtattatccatatgaaggtggtataaacaaggcacagtgacttcaatcgggtggggtcttcacctctaacttgcaagcacttatgccacctactagaaaagtaggatcttagaaggtccataccagttattcccaccttgtgtctcttcctgaccagctaattataaatacagaataacctgtaagacacaacctggaagacacccaggatccttctaagaggtggatagaacccttcttggcaggaatcccatggaggtcacgggtagctcctggcatcctgcctagaggtgcatgccagggtgtcccacagctgrggatgctaaaatagccatatcatgaagctgaacaatgtccctttgtcatggttgcttcccctgctttatggctactacataagtgagatccttgattctttttcctattttgctagattctgatattgatggggcttacaacctagaaatttaattccagaatccagttcatacttacaaaaggctgtctaaagatttccttcctgtactcttgataagcatcgtgggctcggtggctcaggttctgatgg

SEQ ID NO: 597913 - DNA, 516 bp, Homo sapiens
atgtccctttgtcatggttgcttcccctgctttatggctactacataagtgagatccttgattctttttcctattttgctagattctgatattgatggggcttacaacctagaaatttaattccagaatccagttcatacttacaaaaggctgtctaaagatttccttcctgtactcttgataagcatcgtgggctcggtggctcaggttctgatggctaaagaagaatctatgacttggcactggagagaattcctggccaaagaacagcagctattaaatgtgttcaagatcagagctagataaaggcatctagtgaaatgctactctcatagctcatatggatgagctgggtgtttggccagcttcgatttccaaaactgagccagccttaatcgggcttcggcattgtctgatcttctgtctaggctctccctttgccctrtggcatcaggtatggtggcaaccacatcacagttgtactaagtgtccatcctgagactggttacggagaaa

SEQ ID NO: 597914 - DNA, 269 bp, Homo sapiens
atctccttttcatcccatctcctcctcacactaggttctttctgaagtcactggagggagcagaaagtgttattcagggaatgtttcagaaccaacgatgcgaagaagcaagatcagagaagtctcagcttcttcactgccatatatgtagcgaggaggtggtaaaaagttttcttcactytgagtgtaattgggatatcatacaaggcatggatgaaggggtggtcataaaacaattttatttttgtttcccattagtctgtagaatg

SEQ ID NO: 597915 - DNA, 588 bp, Homo sapiens
cccctctttcaaactggctttaaaattaaataatctttttttttttctctcccaggtaggacctgccaactggcctgtctcttgtttctccacgttttggctctaactagctaactttggcttctgggtttgagcaggtgggggccaggcaggcaggagaaaggaaaggagtatggaagttcttgcttgactggtactgtcttaagatggttctaagctctctgcactgacttgtcctctcatgggcacttatgtacgttccttggagttgtcccatcactggggacccctcacttgcctctcttttgacttctgctcaaagagcaccaccttagctcattgcttaagccttcaggagcctccaggaattatgcaatactttggctgctctctcctgggacctgtgcacccttccatgtgtccctgttgactacaggtgacccacaccagccaacagctctctctcacacatagtccacagtgggttcacaggatacactcagaatccttggctccaatgaartctgcaggtgaagatctttcctaaggcaaccacttctgtttcagctgagataacccatctatttt

SEQ ID NO: 597916 - DNA, 541 bp, Homo sapiens
  misc_feature 1, 2, 3, 4, 5, 6, 7, 8, 9, 10, 11, 12, 13, 14, 15, 16, 17,18, 169: n = A,T,C or G
nnnnnnnnnnnnnnnnnnagtttatctccctcttcattaggtttctatctctttgagcttctaaggacatgaaagcacgtaagttaggaacctgcataatagaaactgaattttatgacttggcaaagccttagagatctattcttctcttttatgttgcacttggaanaattaaagctcagagaggggaaggcatttgctcaaggtctcacagcaagttagtagcaaatctagcacaagaaccagttctggtctccacctgttatggagcctgttgagggagagaaagaggctttgagccctccagggttggttcatcatgggctgtgatcacaggagccggagtctcagctccatagtcagccactgccaaacctgatcccagggaacccactcacctgaagaggtgacctgtggccacttattaaatgacacaccttttaaatrgcacaccctactgcaaaccttgtggctgaaaatttaaacagtgagactggccaagaggaaaagtagtgatagcagccagcatggtacaaatgtg

SEQ ID NO: 597917 - DNA, 581 bp, Homo sapiens
tttgccaagtcataaaattcagtttctattatgcaggttcctaacttacgtgctttcatgtccttagaagctcaaagagatagaaacctaatgaagagggagataaactccaccgtgtgaaggatgtgttgttattttccttttaagacagtggttcttaaagtgtgctttcctggtccagcagcattggcgtccagtggaaacttatcagaaatgcatattctcagtctctaccccagaacccgtgagtcaggagctctgggctggggtctacctgtctgtattttaaagagcccttctggtrattccaatgcatgcttaagtgtgagaatcactgttctaagtcgcctgaagctcacttccaagagggtcattgtcgatcatcattagttattgtcagcatcactgtgtgctgaccatgtgcaaaacacgtgctgaggctttacatacatatctaaatgaatcaccacagaccctatgaagagggtgctatgatgttcatccccatttcacagataaagaaactaatgcacagaaacattaatttgtcatgtgttactctgcaattaagtggcagagct

SEQ ID NO: 597918 - DNA, 564 bp, Homo sapiens
tgctttcatgtccttagaagctcaaagagatagaaacctaatgaagagggagataaactccaccgtgtgaaggatgtgttgttattttccttttaagacagtggttcttaaagtgtgctttcctggtccagcagcattggcgtccagtggaaacttatcagaaatgcatattctcagtctctaccccagaacccgtgagtcaggagctctgggctggggtctacctgtctgtattttaaagagcccttctggtgattccaatgcatgcttaagtgtgagaatcactgttctaagtcrcctgaagctcacttccaagagggtcattgtcgatcatcattagttattgtcagcatcactgtgtgctgaccatgtgcaaaacacgtgctgaggctttacatacatatctaaatgaatcaccacagaccctatgaagagggtgctatgatgttcatccccatttcacagataaagaaactaatgcacagaaacattaatttgtcatgtgttactctgcaattaagtggcagagctaggactagaatttagctctctctgttttaaagc

SEQ ID NO: 597919 - DNA, 581 bp, Homo sapiens
tttgccaagtcataaaattcagtttctattatgcaggttcctaacttacgtgctttcatgtccttagaagctcaaagagatagaaacctaatgaagagggagataaactccaccgtgtgaaggatgtgttgttattttccttttaagacagtggttcttaaagtgtgctttcctggtccagcagcattggcgtccagtggaaacttatcagaaatgcatattctcagtctctaccccagaacccgtgagtcaggagctctgggctggggtctacctgtctgtattttaaagagcccttctggtgattccaatgcatgcttaagtgtgagaatcactgttctaagtcgcctgaagctcacttccaagagggtcattgtcgatcatcattagttattgtcagcatcactgtgtgctgaccatgtgcaaaacacgtgctgaggctttacatacatatctaaatgaatcaccacagaccctatgaagagggtgctatgatgttcatscccatttcacagataaagaaactaatgcacagaaacattaatttgtcatgtgttactctgcaattaagtggcagagct

SEQ ID NO: 597920 - DNA, 562 bp, Homo sapiens
cttgggaagtctactggccccctctgagcctctgtttcccaatttgtaaaatgatggtgagccttatggttagagttctattaattgcagaggatctatttatgaatgtatggctttttctgtgggttcttcccatggagggaaataccctctaaggaactggtgggtacagcactgagcagaaatgaaaggaagtagaagccagtctccaattgagaaggaaactctttacatttgtgactttcaaccttagctgctcattggaagcagcgttgaggtcccctgtccagagatggtgatgcctgggcatgaggaagtttaaaaagctccccaggggattctgatgcttaaacagaggtgagtttccaagaccagtctcatgatcttgctaaatctaattatttccccttcccttgtgctatggagctggcaattagatctccctaagaggggcaggtatatgatgcgtgctttaaaacagagagagctaaattctagtcctagctctgccacttmattgcagagtaacacatgacaaattaatgtttctgtgcattagttt

SEQ ID NO: 597921 - DNA, 625 bp, Homo sapiens
ctcttttgcaatagcactttgcattttctcctaaattccttccagctgtcaggtaggagagccccctgataaggatttccccagtgtgggagagaaacatttaccagaggtaactcaacacaccaggctccctcccaacagtttccaagcatatggaatatattgtggtcagagggaaatatattttaagaatttctcctgcatcttttcagatacattccaccaaggattactacaggtgtcatgaaaagtwggcttttgctctttcccagtaagaaggaggcagactttggcagcagagtcagctccatgggtatgggagccagaaccagcctcagccaactgctggagatggagccctagatctaaactctctcaagttccgaggttggttgcttctctgttttccctggtgggtgtgtcagggtagaatattagtgagaatgataaacatttattgagtgctatgaaattagcatccccctactctatcctcttaccatatattttctccttctaatctattatgcattcatttggatttttctttctttgtggtcagacttcccccacgagggcagcaattttccttgtgtttttcccccagcttctagaatatctcctt

SEQ ID NO: 597922 - DNA, 601 bp, Homo sapiens
cttttcagatacattccaccaaggattactacaggtgtcatgaaaagttggcttttgctctttcccagtaagaaggaggcagactttggcagcagagtcagctccatgggtatgggagccagaaccagcctcagccaactgctggagatggagccctagatctaaactctctcaagttccgaggttggttgcttctctgttttccctggtgggtgtgtcagggtagaatattagtgagaatgataaacatttattgagtgctatgaaattagcatccccctactctatcctcttaccatatattttctccttctaatctattatgcattcatttggatttttctttctttgtggtcagacttcccccaygagggcagcaattttccttgtgtttttcccccagcttctagaatatctcctttcacatagttggtactcaataaatatttgatgaatggatgggctaacctttttacattcagtctatcacttaatgttcacgacaatcccatagggtagaaactgttcttaactttcattttataggtgggaggaatgaaactcagagaggttaagtagcttgacacaggtcacctagcct

SEQ ID NO: 597923 - DNA, 391 bp, Homo sapiens
ttaatcaacagaggtcatgaggttggcattccatggcacaaaatgtggttgctcagataatgggagttacgggcaaggctattgcctgtggccagagtaggcagagttkagcaatgataatgcaacatttcattcaaccaactttccaagacccattccaagttggacccagaggttacatcataattgcagtcttagatctcagaccctgtgagtcttgctggttggaagcccttccaccagatagttccatcttattgtaggaataatcaaagggccctgacatgagatgggggtatagctttctttttctcactgaaccttacagagcccaatttcctgttccccttctctacctccagcactgtgtcatcatcccttattgatgcaa

SEQ ID NO: 597924 - DNA, 391 bp, Homo sapiens
ttaatcaacagaggtcatgaggttggcattccatggcacaaaatgtggttgctcagataatgggagttacgggcaaggctattgcctgtggccagagtaggcagagttgagcaatgataatgcaacatttcattcaaccaactttccaagacccattccaagttggacccagaggttacatcataattgcagtcttagatctcagaccctgtgagtcttgctggttggaagcccttccaccagatagttccatcttattrtaggaataatcaaagggccctgacatgagatgggggtatagctttctttttctcactgaaccttacagagcccaatttcctgttccccttctctacctccagcactgtgtcatcatcccttattgatgcaa

SEQ ID NO: 597925 - DNA, 597 bp, Homo sapiens
ggcagagtgatgtcacaggtgcatctgtcagaagctcactgtaccctgaccacttctcactttatatcctctaccctgaacccctcccccatgcattcatttggaagacattggattgtcccagtaagggagcattaaaagtgcagccaagtgcaacttgcatgttttccaccttctcagcgagcctgaattaataggtcagtccaaagtgactcagaggaaatcaatattcttcccctggtccctgagctccacaatggacctgactcaactgccttcttttrtttaacccttccctgtaatgttggcaacaaaacatgtatgatgactcactaaaagttctttctcatgtggcagaaactcctgtgtttactctccccagaactctagctgagaccacctctccctttttcattcccccactccccaggcatatctgctttgaatcattgccaatccagggagcagggattccactttaacaaaaggcagaacttgacttcagagctgattcaagccttggagtaatttcatccctccttactcacttgaatctagtggaagtcaataaatagaatggtgaggaaggtgttgatg

SEQ ID NO: 597926 - DNA, 547 bp, Homo sapiens
ttctctgatggctttctcatgatgagactggggtggtgggtttttgagaagaacacagaggtgacatgcccttatcatcatatcatatttggggtgcctgacctggaaagattttgagctgttaccaagcagaacattttcccagcctcactgtcagacagtcccgggtccaaatcccaatcccaaataaatgctaattgtaagatagttagcactcatgtggtagtttctgtgtgctgaacatcatgaaaaatgctttccctggtttatttcacttaaaactggagatcctccaaggcaggtgcacttattggccccatattgtacatgagaraactgaggctcagaaaggtctggtaacatgtctagagtcacacagcagataggtagtgaggctgacctttaaaccctaggaagtgtgacttccagatccaccacaccgcactgccttctgattatttgtatgtgaggtgctttgctcagtgctggcacaaaaaaacttaaaaaatagtggtgacaacatcatttctgaacctgatatttactg

SEQ ID NO: 597927 - DNA, 576 bp, Homo sapiens
atcttaagctaggtcattcccattgctagagtgaaactgcaaaggaagatcactgtagaagtctatggaaggttgttggttcttcatggctaccatttctatgagtctacagcaaaacatttggctgtgggcttgaggtggtttttgggtcagcagatcctttgagaaggagagctggacacagaacagaaaagagggagtataaattggaacccatgggcacctctgtgtctgtttccttcagcctctaaccaacaatgacattcaaagggtaatggctgccacctcactttcacctcctgtatcttacccaagttctaatctggaacaatatgggaatagaattctgggaaatgtagttcctagcacaatcaagttgacaaaagaacaacccagcacaagtggggagccattaccacccccgattctgargtagtccactaggacctggaaagacaggctatgtgaagagggacacatctgccaggtgtcacctgtcaactatagatggagagaccccactaatcaatagcagcactgcagtgaggaagctacaaggctaggagaattaacacc

SEQ ID NO: 597928 - DNA, 534 bp, Homo sapiens
gccccagctggggctctgaggtcattcagatgaacaagacagaggctggaaacatcttcccatccctggcttcccccctcccgctcatgcagaaggtcctgagcctccagagcatttgtaaatgaatgctccctgctgagcctcaggctacattacacccgctccctcctgtcctcgactccgcatacctcctgctcggggaacatctgcctctcatcccccaggagctcgtttctagccccagagtcagaatctgcatggtttttttttttttttttgcctggaaatatcgattccaggccgagattgaaccaccactctctcccagtctcctccctctgtcatctccctcatcacagtgcactgagcactttctaggaggttctgacgcagacatttaatttgaacaggaactggggcccagggtggtggagagkgtgtacggggcaaagagatgatggaagaaaataaattctccttcacataacaattagaggaagacagtcccaaacaatgaccagaccatccccgcgg

SEQ ID NO: 597929 - DNA, 534 bp, Homo sapiens
gccccagctggggctctgaggtcattcagatgaacaagacagaggctggaaacatcttcccatccctggcttcccccctcccgctcatgcagaaggtcctgagcctccagagcatttgtaaatgaatgctccctgctgagcctcaggctacattacacccgctccctcctgtcctcgactccgcatacctcctgctcggggaacatctgcctctcatcccccaggagctcgtttctagccccagagtcagaatctgcatggtttttttttttttttttgcctggaaatatcgattccaggccgagattgaaccaccactctctcccagtctcctccctctgtcatctccctcatcacagtgcactgagcactttctaggaggttctgacgcagacatttaatttgaacaggaactggggcccagggtggtggagagtgtgtayggggcaaagagatgatggaagaaaataaattctccttcacataacaattagaggaagacagtcccaaacaatgaccagaccatccccgcgg

SEQ ID NO: 597930 - DNA, 582 bp, Homo sapiens
aaattcatatcttatttaagccctatttattttgggctttgcaataacagctgaacctctatcttgaacaattatacccatcaattttgtttgttttgttttgattttctgaagcacgttccaggagaggctggtacaatggtcccgtgggctactaagtcttcgatgttacttgcaaggcaaggacgtgaacaccccaaactctcccagtgccatccactttcaccaagtagccacagttgcattctcagatctcagatccagatctcagggcagctgcctctggaacacaccattttatccagtgctcattcccttggccagggctgtattacaggcaaaataaacacggttgactgtttccatcgcaacttcacgctttacaggaaggaagttggawcttggacaagggacaggttttcctcaaggggaagggaacagccctctttggacccttcttgaagtggattaggttggctccatctcagctgagattaataagtgtcatgcttcaggacaaataaacttgggatttgcctcatggactctgcttctacttggctgttctggggtccttcttcc

SEQ ID NO: 597931 - DNA, 500 bp, Homo sapiens
aaatgctgtcacaaattggataatttgagaagaatttaataagactacttaataaaagtgtgagtaggatgtagggttgctataagtgttagggaatgttttgtgaataataatagcaaatttgtgaggggaagggtgtcctatgtttaaagagatgagaggaagtagcagttattggaactcatggaaaaattcatgtgaaggtggctacttgagaggagtgatgacccttggtcraggtcacattcagcccaaggcaaactccccaaagtaaacatcccgatctaactctattcctattttcctacttcccagtggagcttcctattggctgaacccaaccagaagctagtgtgcctgggagcccattggtgctatctacacaagttcacctcccaggcacagaaccagatgaagaagggtagggagtagacctagagggcacatggaaaatatctgtcccaaggagatatgagcaatgctcagatattattagaact

SEQ ID NO: 597932 - DNA, 401 bp, Homo sapiens
ccctgcccttccctggatgaaaatcgccacctctcggcccgtggctctgaaatcagcagctccagcctaacttggcccctgaatgccatgttaatctgcccacccattctacagagatttattgagcagctactgtcccaggcactggagaatgtgttgtacatgagacagaggggtcgctgtcccacagagcctgcgcacttgctggtgggaagggcccttcagtgtacctgtaagcaaatgcatgaggtgcctgcagagagtgattgtgctgcaatggaaagacagcagagtgacrggatggaaacctgtgggagactttcgtgaaggtggccagggaaagcctctccaaggaggtgacacttgagctgagacctggcctgtgaggtgacttcagccag

SEQ ID NO: 597933 - DNA, 542 bp, Homo sapiens
gtgaccttgggaaagtcatatcctttctctgaaatgaattctcctcttttgtaaaaacaaaagctaatatttattgggtgtttgctgtgtgccaggcactgtgaaaaacactttgtatgtattcactcctataatctttatagtaacttcataaaatagattcgttttcttatttctaggtgaagacactgaggcacagaaagattaacaaacttgccccaaatcacacagctagtaagagctggagcccagatgtaaacccaggcctcgggctccagggtccttgctttcaccactctcccatgktgcccctgtgaggtgggaatagccaggctgtcttcatgggatggcagctagggctggaaatcacaagcgtctgatgaaaagaatctgccagcgtgaaccctaatacccgccagcctcatccatagatatagagatgctccctcggccccactccactcccagccctggcccctccctgagcatctgagcagccctcttgccttccccagtgcctgtcctgtcctcacgtctgtctg

SEQ ID NO: 597934 - DNA, 459 bp, Homo sapiens
ggcgcagtggctcatgcctgtaatcccagcactctgggaggccgaggtgggtggatcacctgaggtcaggagttcaaggccagcctggccaacatggtgaaaccgcgtctctactaataatacaaaaaaaatttagctgggtgtggtggtgggcgcctgtaatcccagctactcaggaggctgaggcaggagaatcgcttgaacccgggaggtggaggttgcagtgagccgagatcaygccactgcactccagcctgggcaacaagagcgaaactccgtttcaaaaaacaaaataataataaagttatgaaaaccatgctctgggctctgggaactctggtcttctttgtgggggcagggctgctcctgggctacaatctcacaggcaggaggaagagggctgggctgctggaggagggtgggggaatggcttgaagaaggggttgcttctaggaattc

SEQ ID NO: 597935 - DNA, 573 bp, Homo sapiens
aagtatatttagagtatatactaagagagcacaactctaagtgttgactcttgagtggaaagacatgggatttgagtcacaggaccttgatctaaatcctgtttattgactgtgttatctggggctctgtgagcctctgttcactcatgtaaactggaaataataatgccttaccttcagggatgttctaggaatgaatgatgaacacatagtggtggaaggctttgcacattgaggcacataaatgatttcctttccctttctgaggggtcagtgctgtgatttggaggggaatggtggagtgactatggagagtccatgcttaaagaatggaaaccactgcattttactaagcttgttggctctctgtggtttgataatagggtrgggatggggtggatttggcttactgggtcagggaggatctccctacagggtaagggctcacaggaatggaactgcctatctctctttaatcctgagccagtggttgatgttttggtagctttggcttctcttcagctgtgggctctagctgcatagggcttgatacttgtgggtaatttgcaacta

SEQ ID NO: 597936 - DNA, 587 bp, Homo sapiens
tatgcactgtcaagccgaagttggctgacccaaactgtggagggagacaagcaggagaagctaggagtccyggctccaactcaagcttaaccatcaactgtatcaccttgtgtttaagtcatttttccagtctgatctcagtttcttttgatgcaaagcaaggttcagttaggtgctctgcttgtctggtttgttcatagcactgctatctcctgttttcaaggaaatttgggagatgtattttctaactgtagattagttctctccttgcttcatgttaaataggcatccttaggtcttggctaaaaggaattacagactgttggtgttgggagggaacttggagattacctcttacctgatgggtatccacactattcgcaatgcaaaggagacagcagattgatttcctgtcagactcccagggcagagaggcccattgggtcccaagggctcaaagcacttagcaaggatcacctgacctttcctgagaagaggcacactaagaagactaagagagagagggcagtctatctcttcttagaggtggacaggatgcctggtgggcatcactgcctggggcaagt

SEQ ID NO: 597937 - DNA, 630 bp, Homo sapiens
taaactgtactatgatttatttttgtacatctcatttggcactttttgtaggttttcactaattgttaattttcacattttatctccttggttgcaaattgtcttttccatagcacttggcacaatgaagggtgttggttagtgactgcctggttctcattctttctgcgtyctcaccttcctttcagtcacagcctgtctttgccccaggaatctgcccttgttaatcctggctatttttcagcctgtcagtatctctgcctgtgttgcctcaaccagtgttccttgcacccctttttcctattaaatctcagcatctcagagaagcagtgtgggccagtgggaagtgctcaggctttggggctgggaggatctgggtttgaatcccagctctgctgtgtggttttgagcaagtcactctctgaggctttggccttttcaactctgaaaatggggaaactattctttatcattaggtaaaaatacataataggccctcaggaaacatttatctccctctcccctccattctcaattcctccttctccatgcagcccttcccaagtaccccaggtgatactcacctctgctcttactgagatcctgtggcatgtacagtgtcagagacat

SEQ ID NO: 597938 - DNA, 623 bp, Homo sapiens
ctttggggctgggaggatctgggtttgaatcccagctctgctgtgtggttttgagcaagtcactctctgaggctttggccttttcaactctgaaaatggggaaactattctttatcattaggtaaaaatacataataggccctcaggaaacatttatctccctctcccctccattctcaattcctccttctccatgcagcccttcccaagtaccccaggtgatactcacctctgctcttactgagatcctgtggcatgtacagtgtcagagacatagggctaagctttgtttatgtctctcaacttagasagcggatgcctgaggtccagagatgtggagcgacttgccacaggcttccccaagcaggtaagtggctgagccaggtccagcactcagtcctgcgtttcaggcaggtgtctgtctctgtacccagccaacacatgggctccttcagcttgagggctgtctctatccccacagcatcctgcacaatgttgaatgaacatggagaaggtgcttaataaatacttgttggtcaactatgtgtgtgagtcctacttccctggtgggagtaaagattgttatgttcagcttttgtccctttttggtattcattgcaggc

SEQ ID NO: 597939 - DNA, 609 bp, Homo sapiens
gggttgtaagaattgcatgaagaaaactactaatagagcctcacagagtgctaggaaacaagggtgcccaaatagtgtgtgtttctttttcccctttaaatggagagagagaaacataccagaaaatacckattaatgctagtgatggaatgccatctatacatagacaggcaggacaaacaaaggtaaaccaagtgaaatttaacaattttggtgtcctaaaagcttccaataaagactaaaaaggctctaatgtatatttgttcaataaataagactggcgtcaaattctgtttgaaagtggggcatatatcctaaataaataaattttaaaaaagccagttttcattttagaacaggataatctgaacaattggaagctattagatgggcagtaagggggggatctaaggagtgtctcttttggggccagagggagtgttctccttggacctaacatatgtaccttttttctttttctggcctgaaaaataagtgttggatttcacaactgactccctagctaccctatgttcatctccttccaaacattcccaaatagcatcccaaattgactcagttgtagcttcatggagtaggaagtccagg

SEQ ID NO: 597940 - DNA, 609 bp, Homo sapiens
gggttgtaagaattgcatgaagaaaactactaatagagcctcacagagtgctaggaaacaagggtgcccaaatagtgtgtgtttctttttcccctttaaatggagagagagaaacataccagaaaatacctattaatgctagtgatggaatgccatctatacatagacaggcaggacaaacaaaggtaaaccaagtgaaatttaacaattttggtgtcctaaaagcttccaataaagactaaaaaggctctaatgtatatttgttcaataaataagactggcgtcaaattctgtttgaaagtggggcatatatcctaaataaataaatttwaaaaaagccagttttcattttagaacaggataatctgaacaattggaagctattagatgggcagtaagggggggatctaaggagtgtctcttttggggccagagggagtgttctccttggacctaacatatgtaccttttttctttttctggcctgaaaaataagtgttggatttcacaactgactccctagctaccctatgttcatctccttccaaacattcccaaatagcatcccaaattgactcagttgtagcttcatggagtaggaagtccagg

SEQ ID NO: 597941 - DNA, 484 bp, Homo sapiens
agtgtctcttttggggccagagggagtgttctccttggacctaacatatgtacctttttyctttttctggcctgaaaaataagtgttggatttcacaactgactccctagctaccctatgttcatctccttccaaacattcccaaatagcatcccaaattgactcagttgtagcttcatggagtaggaagtccaggatccagagggagaatgacaagtccagctgctcctctgagatcctggaactagaggttggagaggaggctgggaaggggccactgttcagctaaaaatagcagcatcagcaactaaagagcagccagagatcagaacctggggcagccccaggcacgcattcccagcagagaagtctgagcttagctaaatttttccctgctccttaggaaggggtagtgggtactgcctgatcttctgtgtcatctgtgcatctgtgcctgcccacagtgggcagctagcatctcccc

SEQ ID NO: 597942 - DNA, 587 bp, Homo sapiens
agtgagttttcaccctagccacacgttggaattgcctatggaacctgaaaaacgctgatgcccaagcttcaccccagatcaatgacattaaaaagtctctgggtctgagwtgtaggagtgagtattgtatcagagttccctgagtgatttcattgttctgtcagggtagacagccactggtctcagtgacatctgaggcttcttcctgtggcagtgccactcactgcccctcttcttctgagtgacatgaccaaaggtgtgacttgcagtcactgcagcagctgctactctgtgcccacttcacataaacgtctactgagcagctagtatgtgcccagcattagagagacacagagatgaggctaacagtatccccaggaagtaaattaatgtaaccactccatttccttaaatgtttatctggtgagccagaagccagcttttctgatgaatgggattttctgagatttgtcctgtcttctccctctgtggaagaaactgtgactatatctggtacgtttcagttaaatggagatgaagcaggtggtaaaaaagacacacacagaaatagatggaatgcaggcaaa

SEQ ID NO: 597943 - DNA, 606 bp, Homo sapiens
gtttagccccctttccagctattccaatttaattggctggaggtggaagtgggggtgttgaaacagaggaactggacattacgctttctaagagttcccagatgattctagcatacattgagaggtgagaacagytggtttctggtccagaatccaaaacactttgtggtagctacaggaatgttgacagtcccaagaagataatctcatttgtctacttttgtttttgttgtttgtgcttttgaggtcttagccataaaatatttgcctagactaatatcctgaagggtttccctatgttttcttctagcaatttcatagtttctggtcttacacgtaagtctttaatccattttgagctgatttttgtatagggtgagagataggggtctaatttcattcttctgaatatagatatcccattttcccagcaccacttattgaaaaggatgtccttttcccaatatatgttcttggcacccttgttgaaactaaaaagcttctgcacagcaagggaaacaatcaacagagtgaagagacaacctgtagaatggaagaaaatatttgcaaattgttaatccaacatgggactgatatccagaatat

SEQ ID NO: 597944 - DNA, 577 bp, Homo sapiens
agagagaggcagagaaagatttgacacagatgcaagaggagaaggcaatttgaccctggaggtagagatggaaatgatgcagccacaagccaaggaatgtcagcagccattggaagctgggagaggaaaggaaccaattttctcttagaaactctggaagcacagccctgctgacccctagatttcagccccatgaaacggatttctggcttccagaactgtgcaataatgastttctgttgttgcaagccactaagctcatggaaatttgttgcaccatcaatgggaaactaatacactccataaacaaatacacattgctgtgtaccaataaaactttatttataaaaactggtggatggcccaccagctacagattgcttaccccagagtgagacattaagaggtctttgtgcacaagatgtatgggagagagaagtcagatataaatatttggaagtcattattcagaaaaaaacaaaaactaaacatctaaacatgaaccctcacttgagttccctttgccaggacagaaagataaggaggaagcaaaaactcctttaaaaatctcccgtcc

SEQ ID NO: 597945 - DNA, 579 bp, Homo sapiens
tgaatgtgctgtgcaacactgtttgtagtggaaagtggttcctaggagggacaggagcacagcatctcttctctgatggggaaggaggaaacagaaaagagaagccaagtcaagtggtagagtgagtattcccatgtgttttaggtacagggtacagggatcttgtagcagatcagggataaacatcttgttaccaacctgagtttggatatttccatgttagtgtccctggcgtgcctttatagtgactctattcttttgcagtaggcaaaatcaagctgatgaaaattatatacaagataaaattatccgaagggaattaaatacaaacgtggatgctggaagacattagttggtcagaaattaaaacaatagggcagyaaatatttggaggttagagagaggactttttgggaagtgtattagttatttattgctgtgtaacaaattgctccaaaacttaacggcttgaaataacacacatttattgtctgacaatttctgtggttcaggaatttagacacagctttctgggtcccctgcttcatggtctcttaggaggctgcaatcaagatatcg

SEQ ID NO: 597946 - DNA, 457 bp, Homo sapiens
aaaaaaaaaaaacagccctgttgctattgagcaacttgaagccgggggacttttaaaaaatcatgttcgtacctctagtgcctagcacagtgtcttgaacatactcagcactcaggaaatatctgttgaattagttaattgatatcaagatggattacaaagtcctaaagaatccttcttgcctttcctctggcacaacaactattagtctttwttttacaaacaaggaaagtaaaccacaaaactcctacagatggaagcaaagttgatgacaatactcctctccccacctcttcctcctcccctcaatgtcatcatcattggtccacaatagacaggagatggggagatacaaatctcctgggaaggaaatgcactacccactaccttgtttaacttgttctctttctaaatcttgcttctcatttagaaagtcctttctatgttctagttgagt

SEQ ID NO: 597947 - DNA, 593 bp, Homo sapiens
acaacattccatgtgatgtgttctggagccctgccccttyaaggaacttccagaatgtctagctcggtaacagaatatgtgctttataaatgtgtattgtttgataactgattaacatttgccaagccacataaaagcaagtgaaatgaataacaactcacttacctattttggggacaacttttaccattcaggacatagaaatagcctttctagtggaaagcccatgtgaccagaacttattgacctatggtagtgtataaattaaagttcctgattgggccgtctttaatattttccaggacagagattagagggaggtgctctgggctgctgataccttagtgatatctacccatgaaggaggagagagtgaaatccttagatatttagtatatctctgaatatgttaaatgtatattcagagctctctgaacttctcagtgtagtctgcaatggttaggtagtttactattttcaagaagtaaaattattagattttttttaaaaactgcttaaagactaacatcagttatctggaaacatacatggggtaccgtcttttccagtgatactttaaaaatgactattta

SEQ ID NO: 597948 - DNA, 565 bp, Homo sapiens
tcaggcatcactttataccagaggccatcagataagcaattatcatctcctcagtagactgggagcttcctgggagaagtgggctatctcttccacaatgttcccatctaggtccttctagtcaccaggcagaagcccagaggaggctgtaaacacactcccatctactccaccctcctcattcagccacaaacatccctgcttcaggagcagagggtggggtggaggtgacacaaagcaggcagaaacaaaccctgagtgtgaygggtagaataatttctgaagtttacaaggcacacctgtgagcctctctgcgtagaccagtctatcctaggagaaagatgggcaggaaaaggggagccctgaggagcagaagaagagctgactctgatgtttcctttctccttaacagtgctctgtactccatcacaggaggttcccacaggtcccagacccacagccactgcacctggagcaacaggactcaggaaggagctgggaccaggggcattcgcaggggaaaggggcagaggtggaattttctgaatgcagttaagacaaaagg

SEQ ID NO: 597949 - DNA, 566 bp, Homo sapiens
tccacttcatataccaccctgaatctggctgatggaaggaagctgtattctctggatgaatgagggcttggccagagagttgatgttctccatagtttaagctggatggggcccttggatgggtgtccatctatctaaggagaccctgtcttatcagcatcccagacccagatgaatcttagaaatcctgaaagatttcaggttgccagaagcggctggacacaaacaaaaggcccttcacagagtaattaaaataagcaagaaggtaaaggctctgtgtgtctaattctgcactcagctgagggagatgtgatggatgaaccccaagaaatgggcatsagccaagcctgtttccagaaaagcctttcccttattgtgagaactggtattagacaaagtaataatcattttcagttgaatcttgtgaaaaactgaatttaacctgaaagtaggtattgcatttctttaaattccatttcatatggttccactccatatccatcttctaatggagaggatggtttcttaactgtcttgtttgtgaactgtctgtgtgttcatactat

SEQ ID NO: 597950 - DNA, 509 bp, Homo sapiens
tcccatttctaaaaggagagagagctttcctcctcttcctccagcctccagtatttctggaaagggtaaaaataacataaaatttgcgtgtaaggactccttggagaaactcttttaagaagtagtcagttccagcagccctrctagtcaggaggcttgcatcctcaagttagtcccagccctcacacttggagagagagagggaacagcaaacaaggacaaggtggcattcattcatttccccttttcaaccacatccttacatcctctgcacaaatgctccattgctcccataatgagctgtccctcattagagccccaccctacacctttgctcaccccattgacacagcacatctcacactcactcatcctgccaggaccagcaggctcacagccttcccagccacacagccaactggactcttctccccactcttatggacttgccacctgcaacaatcacttaacacttacctcactctgctttttctcattaaccagttttt

SEQ ID NO: 597951 - DNA, 619 bp, Homo sapiens
tgagaaagaccctgtctcaacagcccccaccacacacacaaaaaaacccagctgatccatacgcacattacactttgggaagttgtgtactaaagtatgtctttccattccagagttgcctcagaggcagaagatggagaaaagcatgctgtagcctggcctaaacaggacccctaaaatctcatctaacactactcatcacccctctggcccctaccatgggaagacccctctccactgcccagagattccagagattcagccattaccctataatcatctattattcaaattcagctttggaataaaaaagctatctgggaggtagataaattccctctccagggcattaagagtggatcacatcttactttttggtggcagkagtgtttatgaataacacctgtccaaactgctcagaattttggtagcttaaaccattccttcatgtatcagatgttttaatttcaccacaaatcttccttcctaccctcagagccctaccttctctaactactttcggtagcataaatactgtcaccaagatgccatctctaagatagccctaaaggacagagaagccagtctgcttatgcctctttatcccacctgcaccccc

SEQ ID NO: 597952 - DNA, 569 bp, Homo sapiens
aacttcttaataaaaattatttgaataaatgaatgcaaaacatcaatccttcttgttacatttcttttttccctctccagagtataaaaggaaactagcttgtcactctcctgtgggtgcccaatttaggactccacagatcccagggaggacaaaatgtgggctgttcaacacaaatccagaaactctttaggatgcaagagtccaaggagccagaggtytaaggcattgggaaagatctttctgcatttctggggtggtgtggagtgtgtgagaagttgaggagaatgggctctggagccctggcagggagaattcttggtgcaaataaagcagaggaaagggaaatgggaagaagcctagactggaagcagcaagagtgaatgtcaggcatgcactgcagtatcaatgctccaacctgtgtctcccactcaggaactcagttcagcagtgaaacaggcagcctggcctcggcttcaaagtctccctatctctagcctttcaggcctttccttagcctccttaggtctgcagcatgccttactttgatccctggtacctgtcccatc

SEQ ID NO: 597953 - DNA, 614 bp, Homo sapiens
atgtggcttctccgcccctcactctgttaatcacatcttgaacacctggaatatataagataatgggagcccacagtacatatatgtgtatactgtctgtttggccaattgcagtccagtcttatccttgcagggaaggctccacttagcacaaggaacaaaggaaggattaggatatttgccccttgctaccttggttccatactctgccctgggggtagtgattctgggatagccaaggataagacccaactgggtactctgcttggctccttagagatcatatcactggtacatttctcttctcactactccagccaccaaaaggcagatagtcatgttaatatctcctccaggaaaatgtattaattagtatattcttgactcatttaactagtgactaaatacttttctgagtctcagtttctttattcagagaattaggataatatctayctgtggtagtcattagtaccattcattaagtacttctagctgcctacatgtttgggcacacagttagattgtacttctctacatccttggtcatgtgacctgctttggccaatgaaacgtgagcagaagtcaggtatttcatttccaagtggaagctt

SEQ ID NO: 597954 - DNA, 606 bp, Homo sapiens
tatatatgacatatatatcatactttgatatatatatgacatatatgtcatactttgatatatatatgacatatatrtcatactttgatatatatatgacatatatatcatactttgatatatataccatgtggtacatggtaaatatattccatttttatgtatgtatatatgtatatatttcatatatacacacgcgcgcacacacacacacacacacacacacacattgtgaaatgattaccacaaatgtgggtctctttctgtattctgctattcctgatgatccttcttcatggtatactttttccttgtgttttttatctttgtatcttgatcactggccttgaagccaagaatgataacattcttctgcaatgatttttattttcttttgacagcccctgggataccaccagtccagttctaccttaacaaaatgcttaagattccttcgacctaggttgcagtcaactgggtttcaggtttgcattaacagctagtttattctaggctacctttatcttgagggtgaagcttcccctctgagaggaagcctagcttagagtgaatgttgtttatcaaagtcttctggggcagaggccc

SEQ ID NO: 597955 - DNA, 606 bp, Homo sapiens
tatatatgacatatatatcatactttgatatatatatgacatatatgtcatactttgatatatatatgacatatatatcatactttgatatatatatgacatatatrtcatactttgatatatataccatgtggtacatggtaaatatattccatttttatgtatgtatatatgtatatatttcatatatacacacgcgcgcacacacacacacacacacacacacacattgtgaaatgattaccacaaatgtgggtctctttctgtattctgctattcctgatgatccttcttcatggtatactttttccttgtgttttttatctttgtatcttgatcactggccttgaagccaagaatgataacattcttctgcaatgatttttattttcttttgacagcccctgggataccaccagtccagttctaccttaacaaaatgcttaagattccttcgacctaggttgcagtcaactgggtttcaggtttgcattaacagctagtttattctaggctacctttatcttgagggtgaagcttcccctctgagaggaagcctagcttagagtgaatgttgtttatcaaagtcttctggggcagaggccc

SEQ ID NO: 597956 - DNA, 606 bp, Homo sapiens
tatatatgacatatatatcatactttgatatatatatgacatatatgtcatactttgatatatatatgacatatatatcatactttgatatatatatgacatatatatcatactttgatatatataccatgtggtacatggtaaatatattccatttttatgtatgtatatatgtatatatttcatatatacacacgcgcgcrcacacacacacacacacacacacacattgtgaaatgattaccacaaatgtgggtctctttctgtattctgctattcctgatgatccttcttcatggtatactttttccttgtgttttttatctttgtatcttgatcactggccttgaagccaagaatgataacattcttctgcaatgatttttattttcttttgacagcccctgggataccaccagtccagttctaccttaacaaaatgcttaagattccttcgacctaggttgcagtcaactgggtttcaggtttgcattaacagctagtttattctaggctacctttatcttgagggtgaagcttcccctctgagaggaagcctagcttagagtgaatgttgtttatcaaagtcttctggggcagaggccc

SEQ ID NO: 597957 - DNA, 480 bp, Homo sapiens
tgcttgtgactgggatatgtttcctgcaggagtgaagccattggtagtttcttttaaggccccgcctcctcacctggagactactggccaggtggctgagctgggctgcctcagagggggcaggtgccctgctatctcctgctggctcagcctgcgaggctcaaggtacatcctgcctcactggagttccttctcctaagattaagagcttgagtggcccagcccagaataataaatacatgaactggcaggcattagaaggcgtcagcatcgataaatcatcatattctgggcagtatcttcagaaacccgttcttatcaaccacttmaggagagaaggatccaagggccatggtgaatatctgtctcaacccagaaaggaaggagctgaggcaacagggtctttggtagtgctggaagggtagagagtaggccctgggtggaaatatttttaaaaggagaaaggtaagagaaagggtt

SEQ ID NO: 597958 - DNA, 627 bp, Homo sapiens
atagaaaaaacattaagtattttttacacagccaaaaaaccacccctgcctgtctgcctgaggtgccacctgtcactcctgctagaggagcacatgaatcttatcagaaatcagaatgctcaaggtcttaatcactgcaaatgcatacatacatactgagattacaagtgttttctaaacatcacatttaaaataactggaaggagtataccaaaatgacaatttctgttgctattagaaggccaggattttggatcgttgctttttctttcctctactttccaaataccctattcactatttattacatgattttaaaatgtattcattaatggacactatgcttaggaagtggaaccaagtttctcaggggcgttaaacaggaaaaaagttaagggtaactatgaccttacagggcactggccattacacaaagaaaaccactatgtcatgatcacagactcttcacgccacatctcaggtggccactggatataccccagagtaggaccacaaagggatctaatgaaagagagtggagaggtgcraacctcaccaatactggaaaacaaggatctcttacacagagggcagagtctcccagggatcccgcccaagtgtgagttc

SEQ ID NO: 597959 - DNA, 559 bp, Homo sapiens
ggcaaatggccaagaaagcccctagcccacttctgtagcttgtccaagagtgcctggcacattccacccctcaattattcccatcaattgtgaacagatgggcacaatactctaagtcatagtaaagtgacttgtatctggccattatccaagtgaaatgaaagaaggtgctgttgtctatctggctcaactacaatatgggattcataaaataatgacccctggttcgataatgacaggagccccaagctgccaggatgggtacttttgtggcaaggcagctcagagatcacccttcataaatttcaaattggttgcagatttgtgggtgagacttgccttgttagtgtcttcctttaatttgcgactctattgcytctccatattgcctcaacctgtcaaatatctgataagattttcccatttaaatttgattcaggttaggattacctaccagtttaggaaggctccaatttattctaaatagatgtttctgagaataatatctctggaccttaaagtgtccctgagaccaattatactgtcagagtgattattt

SEQ ID NO: 597960 - DNA, 410 bp, Homo sapiens
tcccagatcattcattctccaggcctgtgggcatccacatcaaagccttataggatcacccccaattgtctccttcctctagctccaaggtgtttttgaagatcagagccataagtatgattactgcttgagggtctctgcatttctgaggagtctcccataggctgaaggcccagaaagtaactcagaaaggggttgaaagatagmtaccttttggattgagaaattgttttacttcatcacaaaataaagtacttacagtttggggtttaaatactgggacttgtattgtacctcctctaaatcatcccagaaaatgaagcagagaacaatgttcaatgtagaactgcccatggtgccagatgattttgagtcacatacagagccaggtacagctctcaaatgttatg

SEQ ID NO: 597961 - DNA, 581 bp, Homo sapiens
ctgaaaggtaagagtttaaaatttatctgaactcggaatattatagtttgttttggctccagtggcatgtttccataatgtatttaaatcacaaatccctgctctgaggcaaagtcaaaacacctggtcttagtcctgaggtgaggccctcagagctggaatagtgctttgccctgtacaggggccattatccgatttatatacaatgcagaagattgtctagaacctagagaagcactaactacagtcttatccttttcctccttagcaaaatggaagctcctccttgcacagtgcagccccttcctcactgtaggttattccaagtgagaagagtaaacatgacttctaaatgccatctaacgatatatgcatatctaaaggagacaaggatgactgaatgcatcttcatgtgtaggaagtgaagtgtctgttgacattaagtacttcttcatgagtgagaggaggcccatgatggagatgacaccagtacctccttctagcactctgaattcccaatgtttactactgctgtctctgaaactgcrgcatcctcaccaggaccacacagggaacaaagg

SEQ ID NO: 597962 - DNA, 570 bp, Homo sapiens
tccccatctaatgctgcattatggcatgcatttctttagcctaaatctgtcagtgacatgaaaatacatgttttgctggacacataataggttgaacacataataggttctaacatggatctgcataaagaagaaagaagaaaggctataaaggtagaagaataaatgtataaatattacaacaggacactgagctgagtggctctttaccatagaccttgctcatagttctcactacaggcttgctctgagccaacttccaagttctctccttctccttccaaacttccctgtatgtcatcttgctcctgggccacctgactgatgtttaatkcctggatatttgctttcacctctgcatgaccaagccttggccaagtcactgttgactcagttgcaacatctgtcccctgctgagggctgttgtagctttcatagctcacagtccagcttgaatctaaccttttctgtggtcattcagagtagcaagaagcattgtgttttggatttactgcagaactcacacacttaactgtacacagtcagtttttatagctatcactgcatcca

SEQ ID NO: 597963 - DNA, 597 bp, Homo sapiens
attgtcactctggcagtttgtttgcttgttttaccatagctgttgtttttttcctgaccttccttggacattatacaagtagagtcttggaaccacaaggaaccacagctccaactggcaaagggtggcttggagggctggctgacactgcccctcccaagctagaaccagggctggccttggagacatgagattcaggatcayggccggggagctttttagatggctggaagatagtcactttttctttcctctactttccaaacttcctattcaccatttattatatgattttaaagtgcattcactaatggacactatgctcaggaaacagaatcaagtttctgcttttttttttccctgtctgacactcctgagaaacttggttccacttcctaagcatagtgtccattaatgaatgagctttcaaatcatataataaatagtgaataggaagtttggaaggttcagatggaagggaaggaggagttagaagagaaagcctggagaattctaattccccacatccagaagtgtagataaggagtcaagaggaggcagcaggatcaagccatgtggtattcagaaaggaagaga

SEQ ID NO: 597964 - DNA, 511 bp, Homo sapiens
atatgtacaaaaaatggagaaaataatacagagttcctacacaccccctcactccacccagtttcccttattagtatggtacacatgttacaattaatgaaccatgttacattattaactgaagtcaatagttcactcagattagataaaaacattagttattttctgttccaggttctcatccaggacattacattttatttgattgccatgtctccttaggcttctcttgactatgatagttttttagaccttccttatttttcatgacyttaacggctttcaagagtattggtgaggtattttgtagaatacctcacttttgaataccttaatagcaacttgtctgattttttttttttttttttttttttttttttttagaaggagtctcactctgtcacccaggctggagcgcagtggcacaatcttggctcactgcaagctccgcctcctgggttcacatcattctcctgcctcagccttccgagtagctgggactacaggtgcc

SEQ ID NO: 597965 - DNA, 511 bp, Homo sapiens
atatgtacaaaaaatggagaaaataatacagagttcctacacaccccctcactccacccagtttcccttattagtatggtacacatgttacaattaatgaaccatgttacattattaactgaagtcaatagttcactcagattagataaaaacattagttattttctgttccaggttctcatccaggacattacattttatttgattgccatgtctccttaggcttctcttgactatgatagttttttagaccttccttatttttcatgactttaacggctttcaagagtattggtgaggtattttgtagaatacctcacttttgaataccttaatagcaacttgtctgattttttttttttttttttttttttttttttttaraaggagtctcactctgtcacccaggctggagcgcagtggcacaatcttggctcactgcaagctccgcctcctgggttcacatcattctcctgcctcagccttccgagtagctgggactacaggtgcc

SEQ ID NO: 597966 - DNA, 579 bp, Homo sapiens
aagaataactaataccaatcctactcaaactattccaaaaaatagaggaggagggaatatttccaaacacattctacaaggtagtattaccctgatagcaaaaccaaacaaagatacatcaaaaaaaaagaaaactgcagtccaatatctatgttgaatattgatgcaaaagtcctcaacaaaatactagcaaactgaattcaacaacattaaaragatcattcatcatgaccaagtgggatttatctcagggatgcaaggatggttcaacatatgtaaatcactcagtgtgatacatcatatcaacagaatgaagcacaaaaaccatatgattatttcaattgatgctgaaaagcagttgataaaatttaacatcccttgatgataaaaactctaaaaaaaacatggtatattagatatatactgaggagtatatttctaacataataaaagccatataccacagacccatagctagcatcataatgaagggaaaaagctgaaagcctttcctgtggaacgtgacaaggatgctgactttcaccaccgttatccaacatagtactagaagtcctagct

SEQ ID NO: 597967 - DNA, 304 bp, Homo sapiens
aaattcagttaagttacaagatataaaatcaacatacaaaaatcagtagcattttatatrccaataacaaacaatctggaaaagaaatcaagaaagtaatcccatttacaaacactacaaataaaataaaatacctaggaattaaccaaagaagtgaaagatctctagaatgaaaactgtaaaacattgatgcaagaaattgaagaggacacaaaaaagtggaaagacattccatgttcatgaattggaagaatcaatattgttaaaatgttcatactacccaaagcaatctactgatttaatg

SEQ ID NO: 597968 - DNA, 515 bp, Homo sapiens
cttaggctcaagtgatccacctgctttggcatctcaaaatgctgggattacaggtgtaagccaccgtaccaggactgatttattatattttaaattctgatataagaggccactgcaataataaggtaatttttttatttctaaaaagtgaatacaagttaacytgtaattatctgaattaataaatgttttcagaaattaaaataacttaaacagtcccttcttgtctaagaagtaaaatgatgaaaaacaaaaaccccagatttactttatgaataaatataaagagaaggactttcaatcaatgtgaggcccttgaaactgaactcaacctgataattaagggagtctagttgatgtggaatttcaaagtaatatttgaatgagaggtaatttttaaacaaataaatttccaggtcatatagtggttagatagttgacttttgaacatcagctgtcttggaaatgaagaataagactgtgctgcatgttaggaagcctcttgactcacaata

SEQ ID NO: 597969 - DNA, 515 bp, Homo sapiens
cttaggctcaagtgatccacctgctttggcatctcaaaatgctgggattacaggtgtaagccaccgtaccaggactgatttattatattttaaattctgatataagaggccactgcaataataaggtaatttttttatttctaaaaagtgaatacaagttaacttgtaattatctgaattaataaatgttttcagaaattaaaataacttaaacagtcccttcttgtctaagaagtaaaatgrtgaaaaacaaaaaccccagatttactttatgaataaatataaagagaaggactttcaatcaatgtgaggcccttgaaactgaactcaacctgataattaagggagtctagttgatgtggaatttcaaagtaatatttgaatgagaggtaatttttaaacaaataaatttccaggtcatatagtggttagatagttgacttttgaacatcagctgtcttggaaatgaagaataagactgtgctgcatgttaggaagcctcttgactcacaata

SEQ ID NO: 597970 - DNA, 635 bp, Homo sapiens
tgagattttccttctgaaaatctcagttttaaaactcttgacttgtcttcaaagtwaaaaaagaaaagagtttattacaaatatcatagcaaggttacaagttctttgattttacacttgtgagaactagtttcaaagtaagttctcaattcaattctttgaattaaattgaaaaagaaaactgcgccggagagaaagggtcaacatctaaagagagaagctagaaattgttctaatggtgactgtcatgtgagggtgtcataagaccctaagatatctatagtaaaaagaaatttccatctctgtcagtgaggctacaggaaaacaggcaccttctacacttctgggaaacattggtataactcctctgagaggcattttggcaatatctgtgaaattttcatatgcatctacactcagatccatggatctatggaaatcctgttcaggttggactcaatctggaagctatttcttcccaaaaggaactgaatacaaatctcactgaaagcctcagtatgggagaacacagaagtactgatagacaaagagctgtgaatgtggaaaacagtgctgatctcaaggcataagaagctggttgcaggttcagcacaatgtattcaagaaaagctaaa

SEQ ID NO: 597971 - DNA, 635 bp, Homo sapiens
tgagattttccttctgaaaatctcagttttaaaactcttgacttgtcttcaaagttaaaaaagaaaagagtttattacaaatatcatagcaaggttacaagttctttgattttacacttgtgagaactagtttcaaagtaagttctcaattcaattctttgaattaaattgaaaaagaaaactgcgccggagagaaagggtcaacatctaaagagagaagctagaaattgttctaatggtgactgtcatgtgagggtgtcataagaccctaagatatctatagtaaaaagaaatttccatctctgtcagtgaggctacaggaaaacaggcaccttctacacttctgggaaacattggtataactcmtctgagaggcattttggcaatatctgtgaaattttcatatgcatctacactcagatccatggatctatggaaatcctgttcaggttggactcaatctggaagctatttcttcccaaaaggaactgaatacaaatctcactgaaagcctcagtatgggagaacacagaagtactgatagacaaagagctgtgaatgtggaaaacagtgctgatctcaaggcataagaagctggttgcaggttcagcacaatgtattcaagaaaagctaaa

SEQ ID NO: 597972 - DNA, 621 bp, Homo sapiens
gtgtcataagaccctaagatatctatagtaaaaagaaatttccatctctgtcagtgaggctacaggaaaacaggcaccttctacacttctgggaaacattggtataactcctctgagaggcattttggcaatatctgtgaaattttcatatgcatctacactcagatccatggatctatggaaatcctgttcaggttggactcaatctggaagctatttcttcccaaaaggaactgaatacaaatctcactgaaagcctcagtatgggagaacacagaagtactgatagacaaagagctgtgaatgtggaaaacagtgctgatctcaaggcataagaagctggttgcaggttcagcacaatgtattcaagaaaagctaaacctatgaaccagggagatgtcttgctaaaactctgaacttttgagcaactgtagatggcgattttgagaattcttttaaatgagttgtaagaaagcagtcaytgttgggcaaactgatatgtgacaagaaaagagggtgttactttgaggagggtcagtaaagcctggataatctaggaagtgaaatccagttaagaacagaaacatttcctaagaattacctaagaatttccaccacttc

SEQ ID NO: 597973 - DNA, 636 bp, Homo sapiens
tgtactactttcctgggtttctctctgcttctagttttcctcttgagttttctcaaatgctattttctttatggcattcttcaccaagactggctccattgagcatgcaaagtctattctgagttttttggtgttagcttaaatctcatatactctgccactgccttccctagctccttgaaggaacaagcctgtcctcattcttgtatcaattctcaaagaggcagattgtctccattaactattcttcctctgtttctgaattttagcccatttgccagattctctgtttcccttctactagtctccttttcagggctctccccctagaggtccagtcaggaggattggagtttcctgccccatctggactgaccttttggaactatctctgacaccaacaaacaaaacggaactactgggttagcttctctgtttttagtcaccctgttcagggggattcctttacaatcaaaacaaggaaaaaaagaaaactgttcattwttaatcctttttttatttctgctaatggtgctacacagttacttgagctgaaaacattaagcaactttgatttttcatccttttcttttgcatcccacactcaatcaatgccaaattgtaatgattaagtat

SEQ ID NO: 597974 - DNA, 577 bp, Homo sapiens
  misc_feature 208, 209: n = A,T,C or G
tttcatctgcagcaacatagatggaactggaggtcatatgttaagtgaaataagccaggcacagaaagacaaatattgcatgtggtcactcatatgttagagcaaacaaagtggatctcatgaagatagagtgtagattgatggttactagaggctgggaagggtaatgggggggggatgaagagaagttgattaatggtaaaactgnncgggtgtataggttgatagaagaaataagacctagtgttaggggatcagtagggtgactatagtctaygataatctattgtatattttaaaatagctagaaaagaataatttgaatgtttctagcataaaagacaaatatttaaagtgatcaatatcccaaatacactgatatattctttacaaactatatgaatgtattaaattgtcacatgtaccctcaaactatgtacatctgttatgcatcaataaaacaaaataaaaatatacattgtgcctatagttaacaatactatatcatacacttaaattttgctgttattaataaaataaaaacaaaaatttaaaaacatacaaataaacaaaaaac

SEQ ID NO: 597975 - DNA, 577 bp, Homo sapiens
  misc_feature 208, 209: n = A,T,C or G
tttcatctgcagcaacatagatggaactggaggtcatatgttaagtgaaataagccaggcacagaaagacaaatattgcatgtggtcactcatatgttagagcaaacaaagtggatctcatgaagatagagtgtagattgatggttactagaggctgggaagggtaatgggggggggatgaagagaagttgattaatggtaaaactgnncgggtgtataggttgatagaagaaataagacctagtgttaggggatcagtagggtgactatagtctatgataatctattgtatattttaaaatagctagaaaagaataatttgaatgtttctagcataaaagacaaatatttaaagtgatcaatatccyaaatacactgatatattctttacaaactatatgaatgtattaaattgtcacatgtaccctcaaactatgtacatctgttatgcatcaataaaacaaaataaaaatatacattgtgcctatagttaacaatactatatcatacacttaaattttgctgttattaataaaataaaaacaaaaatttaaaaacatacaaataaacaaaaaac

SEQ ID NO: 597976 - DNA, 559 bp, Homo sapiens
ctatctgggtatcccttagcccagtcagattgacacataaaattacccatcacagaagtcacgataggtgctacgatttaataaagacacaaagaatccttggcttatgcagattttacatctgtagtaccatctgcccaagagtgactcaaaggatcttgatatgtaggtcttgtaactggactgtggtgtgaatttgaagcagcctactacaggaacaatgccttggctggtgtgtaagtctgtctgacctccctgtgtctgtacatctctacttatctcataagtrgtaatggtcactaaaagcctgaaggagccacttaattttttcatttatatttgtggcatcttatgggggaaataacatgcatggcaaaatatacagactgcaggcactgaaactgaatcatttgccaatgtcagatttttcttttttcttttttgagacagagtctcactctgtggtccaggctgcagtgcagtggtgtgatctcagctcactgcaacctctgcttcctggttcaagcgattctcctgcctcagcctcctgagtagctgg

SEQ ID NO: 597977 - DNA, 559 bp, Homo sapiens
ctatctgggtatcccttagcccagtcagattgacacataaaattacccatcacagaagtcacgataggtgctacgatttaataaagacacaaagaatccttggcttatgcagattttacatctgtagtaccatctgcccaagagtgactcaaaggatcttgatatgtaggtcttgtaactggactgtggtgtgaatttgaagcagcctactacaggaacaatgccttggctggtgtgtaagtctgtctgacctccctgtgtctgtacatctctacttatctcataagtartaatggtcactaaaagcctgaaggagccacttaattttttcatttatatttgtggcatcttatgggggaaataacatgcatggcaaaatatacagactgcaggcactgaaactgaatcatttgccaatgtcagatttttcttttttcttttttgagacagagtctcactctgtggtccaggctgcagtgcagtggtgtgatctcagctcactgcaacctctgcttcctggttcaagcgattctcctgcctcagcctcctgagtagctgg

SEQ ID NO: 597978 - DNA, 571 bp, Homo sapiens
aaacattttccaatatgcataggattgtttcttcttcttactcccatagcacattgctagctgcatatagcttttaaatcattctgttttattaggtgcttttccatatatctgtctgtaaatacctggagggcaggaatcattccttatttacactctgcttcatttaaaagagaccaaggcaacgagaggcttcctctttttagctctgcatttcctagaacacagcacgtatgaatttctgtaacacatccacacacaacactcaataaaatttggtcaaatacatgggaagatgaatgaacaaacaaatgacaaaagatttatgatggattttccctgactatgagcatcatcwaaagtttggaaaatacaaggaaaaaataagtaatctgtattcttaccatagatattttggaaaatatctttctggttagctgatgctgagcaaatggcttagaaaatcaccaattaggtgtcatttggtataggtatagggtggatcacagttgcatagagctttgccctgtcagcacctggcagaggggtgtacttgtgggtaacaggacac

SEQ ID NO: 597979 - DNA, 566 bp, Homo sapiens
ctaagtgttcaataggctcatttaaaaagtttctacagtagcagggaaggagtttatgcatagattcaacattgacttcccccattggggcttatatggctagttcaactcctgagtaccaatgatawctgctgcagtgacgaatatccgtggccctggtccaaccccaagccccagaataggaaccagtcatctagtggcaggttgattacacaggtcttccatcatggagagggcagcagttttttctcactgcaacatgtgtatactatagatacaggtttcttttccctgcatgcaaaattcttacctgcgtcattatccatagatctactaactaattcactgatatccccttaatgattgcttttgacctggtaatttatttattggcaaatgaagtaaagcattgagctaattaattctgttgaaattcaccaatctctccatgtatcccatcacccagaagtggaaaggcatttagaaagatagaaggtaaattgggagacccagtttaggtaccagccgggaaatatgaccttgcagggttgtagtgctagcactcc

SEQ ID NO: 597980 - DNA, 594 bp, Homo sapiens
atattaacagtaacccaaacaaacatttttaaaaagtgcttcattccattcagaatttagttattataactttggtttgtggaatagtttcactgagttctaaagccatttgaaaagtgtcaagcaatataacagaagaatagaattcatgttttgtaggaccaaaagcttaaacaatttgggcaagacagttgttaagaaaaatattatagaaatatcttaacatttgcaaatgttacaaaaacatatgaccatgtgctccagcctccaattataaagtttttccccaattatccctctcctgatattcacacccttgtgtggttcttcttccatrttgtattgcagttggtttgtgagaccaatggaatacagtagaagagatgatatgtcacttctgaggctaggttataaaagacatgatgacttctacatttcttggatcatccactctgggagaacatagttaacatgttgtctgaaacctcagacagccctggggagaagcctgtgtggtgagaaactaaggcttccagcttacaaccaagtcagtggaccattttggaagcagatccttcagtcctggtcaagcct

SEQ ID NO: 597981 - DNA, 561 bp, Homo sapiens
atgtacttatcacttggctttggcatttatgttatagggccattcccatatcctatgtatatatgccatatctacatacatacagccatccctgtttcactggtacccctttcctcctctgctccctcatggattattttaaagcaaatctcacaatctcaaacatcatatcatttttaggggaaagttttaaatgtcatgtaagaaacctcctccacctggaggaattccagcacctggaactcagtgctttttgtaaatggagtgttttttgtaaagttgcaaaaaaggccagttcccattgcttgacaacacatgatgaggacagtgagagctgtaaggttaagctcgcctgctggagggaaaggcacagcttattcccacaatctaccttcatcccattcaagctggaytttgagcttataaagggacctgacagtgccgggcaggctgaaagtatgaagtgaccagcatgaaagccagggggagtggcaggtagtgtcaagaactgaggctagataacctgggttatctagttgtatgctctttaaccatttactg

SEQ ID NO: 597982 - DNA, 587 bp, Homo sapiens
accatccttatcgtatcatagcatgaataaatattaccaatttgactcaacactggttgtgttaactttgatcacttggttaaggtagtgtctgtccaacttctccactgtaaagtaactctcattccttgtccatactccattctttaggagcaaattgctaaattcagcccatattcaaggggggaaaaagggattcagcttcgcctcctagaagaagagcatctacaaaaattgtctggaattccaatggaaggaagatttatctcttctcccttgtttgkttatttatttatttaatcattttttaaatcggcatgaacttctagacatttattctatactttggattataatccaacactatgttttttgttttttgtttttttattgagatgcagtcttgctctgtcgcccatgctggagtgcagtggcacgatctcagctcactgcaatctctgcctcccgggttcaagtgagtttcctgcctcagcctcctgagtagcttggattacaggcgtgtgccaccatgcccagctaatttttgtattttcagtagaaacggggtttcaccatgttgatcaggc

SEQ ID NO: 597983 - DNA, 635 bp, Homo sapiens
agaaattgtgtttgtttcagtaccagccatttatttgcctgtcacctgtaacaatattttgatggaatcacatatattttactctatgggttaaaatctgtgtagattacactgttaatctgtgtagtatttatctgttaaatgaatttcccatttgaaagaaaaactaactgaggtaggtaacctagcaagtttagataaaaaaaaatctagccttacaaaaaaagtaagtatcacaggataatttatttataagaacaaaaatcttcttgttccattaaaaaatcttaagcagaaaatctctttatgtgcacttaaaatataattcaatttaacaaaatttaatttgcgcataccttttcagtaacacmctgtttcagccgagcttccctagaaaacaaaacctgaggcaaactttacctgctaaaagtttactgaaagtaaaattccagggtaggaaaggtgagagaagatggaaatgagtcaaagaaggaaggaaagtaaatacaacgtggtatgttatcaagctggccacaaactctcaaagaatacaacttgctcagttacatggaacttctctggagaagacatacaaaatccttggggccagggtaaaccatggctggagaagaaat

SEQ ID NO: 597984 - DNA, 608 bp, Homo sapiens
ctcctctctttcccctcagagaacagagatgaccacatgaccaggaatgttagtaaacattttctcctctacgtggatgaaaacctgccttcagtagaagagattgagacaggcagctgtgagagagagcatgaggacattgcctgagttcctggattcatctgtccctgaagctggactatgccccagacttccaagctgaaaaaaccagtatagtcctgagctttcattgcttatacttattcaagttgggtttctgtagctcaaagtgtcctggctaatataggaacttctgcaaaatgcacaaacttggcctccaagtctggagtttctgatgtggtaggtatgaaatgtagctgaagcatgtgcattctttttaagcttctctaagctctatatcctggctcaaattgagaaccattgcttttttttttttttttttttttcttttkggatttcaaattcacaggacaaatttggtcatattcagttcatggtatgttatcattattggttcatgcaatgtcaacattcctctcttattttgctaactatattttattgccatactccacctccctgaagaccacaattctagtatatttaat

SEQ ID NO: 597985 - DNA, 576 bp, Homo sapiens
ttattgttaacatcttggattagtatggtgaatttgttatagttgataaacctatattgatgaattattattaactaaagtccatagtttacattagggctcactgtgttatttagttctatgggttttgacaaatgtatatcttgtatttaccatcacagtttcatacagagtagtttcacagccctaaaattccccttttgttccactttttcatctctcttcccccttctaaagccctgacaaccactaacctttttattgtctccatagttttgccttttccagaatgttgtatacagttaagtcctcacctaatgttgtcaagaggctcttggaaactgtgactttaagcaaaatgacctataccaaaaccagttttaccatagggtaattgatatttacaagagttaagttcctaaggcatatttctggtcacaaaaaaaaaaaatcactaaacttctaaataaagactccaaacacttctaatattaaayatagaaataaatgtgagctacacatacacttaagacagagtaataaaaacaagtaagataattatttatccaatttttg

SEQ ID NO: 597986 - DNA, 509 bp, Homo sapiens
tctctaaaaaacaaacaaacaaacaaacaaaaacacaaaagagcttctaattatgtatttattttaattttcaatttttgtgggtgcacagtaggtgtatatatttataggatacatgagatattttcatataggcatacactgcataayaatcacattggggtaagtaaggtctccatcaacttaagcatttatcttttttttgtattacaaacaattcaattatacttttaattattttaaaatgtacaataaattattgttggctgctttcaccctcttgcactatcaaataccagatcttatttattttatctaactatattttgtacctattaaccatccccacttcctcccacccagtttgtatagcttgtgttttacatttagatctattttctattatattccttaatgtttttatgaagtagtaaggcattatgtttttaggatccatctgttttcctatgtatccatttaatctgtggtttaattgttgtatagacctc

SEQ ID NO: 597987 - DNA, 608 bp, Homo sapiens
ttttggggaaaaatggtaaaatccatgtaaccaggtcaactaaaaacctagagttcccaacaatcagtgatacaataatcacagcattggtaataaaagagacgtcattaaaacaatatgtaatgaaaccatttacatttctgtgattgggttcaagcaaatatctctctgcccttaaggactagacagtaccaaggtaatgttaaaataaataagttgaagttaaaaaaaaaatttgaagtttataatttgatcatgaaatctccagaagaccaaaataaataaartcaagtagggcatataagtctatatccaagcttcattagagactgacacactattgctcagtgagtccaacatagcagtttttcctccaaacaccagcaactgggctctatatttagctaagtaagtttcccaatcctaagaaatccattcatatatgatggtaatgagaaagcagctatctaatgttctatttaccctaaatattgtgatctaataacattcaggatttgtagacttcaaagcatttaataagcacttgataaaatatccttcacaatctgcctaagtctaaagatatcattataacattttatgtgtgg

SEQ ID NO: 597988 - DNA, 562 bp, Homo sapiens
ttagctctaattaattttaattaactagctcaaattaattctaacttggcaagccctatcaggtctatctcaaaaaatttatagtaatcctaatagagttaaagagggcctaataatcaacacttacattcccatctccagttaagaaccaactgaaaatagacacaaaagtcagacaaatggagacaaatggaggtcaaaatattacctttatcagtattacagctaatattgacagctcattcttctgcctgcaggtaagaaggcatcctaatagtgaactcacagctagacagccttcctacccagtcccaggtggcatggaccaccacagacttcactgtgcagggcagagagtgcctgatcctgtagtacytgcagcagaggtatagggcagactacacattttggatgcaggcagacagatcttgaggagggaggttgtaggaggagcatgctggcattatccagcactgcctgtatgggctgaaagtctgacaagttctgggaggagtgagtgatgatgagtaaagaggcaggaaggttataagcaagttatagg

SEQ ID NO: 597989 - DNA, 598 bp, Homo sapiens
caggaaggttataagcaagttataggaaagaagattacccgcctctaaaactcccccaatttttgttctcttaccccatttgcttaaccatcaactagtggcgtggcttccctccatggggcacaagattaaaaatcctcatcccatcttcaaaaaattattcctccaacaccaaccatggctgttctgggatgctggtgggcagtgttttatttttaaccccatggactctaaaatgggccagaatagcacattgattaaattaattctaaaacctgcatccaaactgaaaattatttctctttttatttcctttcccaaactatgtctagccacattgtctaatataaggtttggcaatgatgaaaataacaatataaaaatactccaataataaaactgccaacaacaaayaaagtcccagatttgaatattaattgccttcttagatggattttcctgggaggaaattaaagttaaaaattaaatctcaatggaaattagtccaaggattttagaggtcaaaagaattaaagtccaaaatcacattctcatgcacttgggagttaaaaatccaaagaaattgaagtttaaagtt

SEQ ID NO: 597990 - DNA, 622 bp, Homo sapiens
aaggtctttacacttaatctttctcctacttggagtattctctgcctaggacatctccctactgcctccctcttatcatggaggtctccagcaaaacctcttcaaggaggcctccttcaccatccttatcactgtctatcatattagcttgtattattttcttcacagtacttattactctctgaaattatttatttgttaactctcttctatgaaaatacwcattttctgagagcagagattttgtctgccctgtttactgctataatccaagtgctgagaacaatgcctagcacagaggagatgctaaaaatataattttcaatgaatgagtgagagctaatatttgtacattggacatttggatattttgatggtatttgggagctgacagagctcgtggttttgattcacattcatggacacattgagaccataagtatagcatctagggagggtgtaagaaataggaacgttgggaaaatgttttcaaatttctcaaagatagggttagatagtagaaactatctaaaaatgtccaaagcttatggaataagctatctgaatcactcaaagtaattcatgattctgtttgttccctgagatgagagttaaggtgcac

SEQ ID NO: 597991 - DNA, 305 bp, Homo sapiens
gatggtatttgggagctgacagagctcgtggttttgattcacattcatggacacattgagaccataagtatagcatctagggagggtgtaagaaataggaacgttgggaaaatgttttcaaatttctcaaagatagggttagatagtagaaactatctaaaaatgtccaaagcttatggaataagctatctgaatcactcaaagtaattcatgattctgtttgttcyctgagatgagagttaaggtgcacatgcttaatctaagtgcattggaagaatgtacccaaagtatacattcctctggtc

SEQ ID NO: 597992 - DNA, 507 bp, Homo sapiens
aaaaccccgtctctactaaaaatacaaaaattagccgggtgtggtggcgagtgcctgtaatcgcagctacatgggagactgaggcaggagaattgcttgaacccaggaggcagaggttgcagtgagccaagatcgcaccactgcactctagcctgggaaacagagtgaaaccctatctcaaaaaaaagaaaaaaaaaagtaagaaattccttcttttttcagccaacactacccaggcttttgctccggaaatcaracataatctaaggtattcccccaaacagtaacagaaaccataggatccatattacaaagaaagattctataatcttcagtttaatgcatatatcatgagaagagtctaaactgcttaacaagtataattatttttgagattgcatttgatcaaccaaaatcctgtgtaagtcttcacaaatcctttcacaaatgtctgttgcagaacagtttctttattcagaaagtgactgaaagagaatttcatgacac

SEQ ID NO: 597993 - DNA, 597 bp, Homo sapiens
tgatctgtgttttcccagataaatgaaatttattctcaaaaattggtgttctaaatatcttaagaagaayctaattaattttttgatgtgttgttgaatttgactttctagtttttttaaatgtatctgtaaatacactaaaaaaatcagcaacacatcaaaaagataattcaccattatcaagtgagattcatcccatggatgcatggatggttcaacatacacaaatcaataaatgtgacacgtcacattaacagaaccaagaacaaaagccatatgattattttaataaatgctgaaaaaatatttgataaaattcagtattcctttatgacaaaagccttcacaaactgggcatagaagaaacatagctcaaaataataaaggtcatatatgataaacctacagctaacattagtatggaaaaaactgaaggcctttcctctaagatttggagtaagacaggaattgccacttgcactacttttattcaacatagtaatggaagtcctggccagatcaatagggaagagaaagaaataaagggcatccagattagaaaggaaaaagtcgaattactcttgttcacagataaca

SEQ ID NO: 597994 - DNA, 620 bp, Homo sapiens
gcatttatatacggcaacagtgaacaatctgaaaaagaaatcaagaaagcaatcccatttaaaatagctacaaataaaataaaatacctaagaatcaacttaatcaaagaaatgaaagatctatrcaaagaaaactataaaacactgataaaaacagttgaagaggacacaaacaaaagatattccatgcttgtggattggaagaattaatattgttaaaacgacaatactacccaaaacaatttacagattcaatgcaatctctatcaaaataccagtgacattcttcacaaaatagaaaaaacttctaaaatttctatggaaccacaaaacactccaaatagccaaaacgctcctgagcaaaaataacaaaactagaggcatcacacgtccgactctaacacttactactggcagaggggtggagtgagatggcagaatagaaggttgcaataattgtcttgtccaccacccatgggaagaccaaatttaacatctacacacacagacacaaacacacacacaacactttcataagaaccaaaaaattaggtgagcactcacagtaccttgtattaacttcacattactgaaagaggcactgaaaaggtcaggaaaaa

SEQ ID NO: 597995 - DNA, 620 bp, Homo sapiens
gcatttatatacggcaacagtgaacaatctgaaaaagaaatcaagaaagcaatcccatttaaaatagctacaaataaaataaaatacctaagaatcaacttaatcaaagaaatgaaagatctatacaaagaaaactataaaacactgataaaaacagttgaagaggacacaaacaaaagatattccatgcttgtggattggaagaattaatattgttaaaacgacaatactacccaaaacaatttacagattcaatgcaatctctatcaaaataccagtgacattcttcacaaaatagaaaaaacttctaaaatttctatggaaccacaaaacactccaaatagccaaaacgctcctgagcaaaaataacaaaactagaggcatcacaygtccgactctaacacttactactggcagaggggtggagtgagatggcagaatagaaggttgcaataattgtcttgtccaccacccatgggaagaccaaatttaacatctacacacacagacacaaacacacacacaacactttcataagaaccaaaaaattaggtgagcactcacagtaccttgtattaacttcacattactgaaagaggcactgaaaaggtcaggaaaaa

SEQ ID NO: 597996 - DNA, 564 bp, Homo sapiens
tgactgactggctatacatagagttcgcactacctgctccttgggttcaattagcttgctggaatggctcacagaactcagggaagcactctccttatgtttgctgattttttaaaataaactatattacaaaggatacagatgaacagccagatgtggtatgcgggaaggggcactgagtttccatgctgtctaggcaccagcatgtgttctgctatccagaagctctcagaacccattttgagtttttatggaaacttcataatgtaggcatgattgattaaatcattaacaattggtgatcagcttaaccttcagccccttttccctccccagaggttggagggtggggctgaaagtgccaattctctagtcatgtcttggtctttccagtgatcagccctcatcctgaaactatctagggccccccygagtcaccagtcatctcattagccttcaaaagacactcatcactgcatagattttaaggattttagaagttgtatgtctggaaatgggatgaagaccaaatatttcacagtatcacaatatgaaatgtccagg

SEQ ID NO: 597997 - DNA, 593 bp, Homo sapiens
taggtactggcataaaccaggaagacttcatgataaagagcatctgagytaaatgtggaaagcagaataagattttgacatgcatgaaaatatctttagtaaagacaagaaaactggaggtatgtttgggaatggaggaaggtgaagcatggaggcaactaaggtagggtgtagggaggcggtggttagttttcttagagggccttggatatcagcctaaggatattagtcttttccccatgggcaaaggaatcacccagtgttttcctcaagggagtgactaaattggaatagcaactgagaaagatcactcaaggaaagtgtaaacaggaggttgggggaggtcaagataggaggcagggaggttagaagggagcctgttagaatagactcttctcaacactccttcttatgtggccatgctcttcctggtgacctgccttgcatccagccctccacttaggactcccaggtggtcccactggtcccagttgaccctcagatagctctctgctgcccccacctggcctaggcagcccctgccacaattcacttgcagggccaggccctcttacacatgtactaatatcatg

SEQ ID NO: 597998 - DNA, 593 bp, Homo sapiens
taggtactggcataaaccaggaagacttcatgataaagagcatctgagttaaatgtggaaagcagaataagattttgacatgcatgaaaatatctttagtaaagacaagaaaactggaggtatgtttgggaatggaggaaggtgaagcatggaggcaactaaggtagggtgtagggaggcggtggttagttttcttagagggccttggatatcagcctaaggatattagtcttttccccatgggcaaaggaatcacccagtgttttcctcaagrgagtgactaaattggaatagcaactgagaaagatcactcaaggaaagtgtaaacaggaggttgggggaggtcaagataggaggcagggaggttagaagggagcctgttagaatagactcttctcaacactccttcttatgtggccatgctcttcctggtgacctgccttgcatccagccctccacttaggactcccaggtggtcccactggtcccagttgaccctcagatagctctctgctgcccccacctggcctaggcagcccctgccacaattcacttgcagggccaggccctcttacacatgtactaatatcatg

SEQ ID NO: 597999 - DNA, 553 bp, Homo sapiens
gttagttttcttagagggccttggatatcagcctaaggatattagtcttttccccatgggcaaaggaatcacccagtgttttcctcaagggagtgactaaaytggaatagcaactgagaaagatcactcaaggaaagtgtaaacaggaggttgggggaggtcaagataggaggcagggaggttagaagggagcctgttagaatagactcttctcaacactccttcttatgtggccatgctcttcctggtgacctgccttgcatccagccctccacttaggactcccaggtggtcccactggtcccagttgaccctcagatagctctctgctgcccccacctggcctaggcagcccctgccacaattcacttgcagggccaggccctcttacacatgtactaatatcatggtgaataatatgactcctaggactactggccaagactcagagcacattctacataccaggcactgtccatgtcttttacatgcatcaggtgcttaacagtaacctcataagaactttatgaagtagctcatgttcctatttcac

SEQ ID NO: 598000 - DNA, 571 bp, Homo sapiens
aggtgggagacagagcagggtggtgttttaatggagacacagtggggtgggaagatccaggtcgggacgcagctggcagtctgcaggagagagcaggcctggagaggtgtcggggagagccaaatgcaaacttctcccacttcccagtgttgcctggggccagccctgggcacaatgataatgtttctataaaacaattctcaggaagcctggtaggagagccgtacctttccacaattaagtgcatccttccaacttaaagacctctctgggatcagctgagattgtgaatgtgttttgagtatacacgaagtgtcatatcagggatggcagggaaagctggggggatgtttctgcatgtgcacgcccctgtgcacattctcagtgttacaaacttccttatgtccagtaagtcatctcacaaccccaaatgcttattgtmttctggctgatgcagcagcagctgagcccctccccagacagacaaatgaagggatataaataagagtgggaaggaaacctttcagggagtgttgcttaaattattattggcaagaaacagaaatcattt

SEQ ID NO: 598001 - DNA, 474 bp, Homo sapiens
tgtgtgtatgtgctgcagcccacattgtggagcggaggtgtgacagacttagctaattattgctcccattggagagcaccattmaggacagcctcttggggtactggctggccaacggatgagccactttggatgggatgttcacttcccagacaatcattggccacctggcactaagagcagcttatagctgcttccctcaacagaagtgcagatgggttggttttagacaagagagaatgtagaaacttggaggtcaccatagaagacacttctgaggcaggaatgcaactaggaagtcatcctaagaatgagatgaggaattaggggaaaaaggaagaagagagacatacgtagaaatggaaaaaggactttctgggaccacaaatgtcagagctgaaacatatgttaatgacaatctagttaaacgtctctaatttacaaatggagaaattgagcctcaagaccaacatt

SEQ ID NO: 598002 - DNA, 500 bp, Homo sapiens
actttctgggaccacaaatgtcagagctgaaacatatgttaatgacaatctagttaaacgtctctaatttacaaatggagaaattgagcctcaagaccaacatttgggaccataaaccagttcttccttcacttctaaggctatcttctctctttcaaactgcscatctaggagaagtttctcaaagcagatgatttaaggggtcagccaacctcttcatatatgaaggatggatctacattgcttattgagattcaccgagcaatgcttaagtaaagaccttgtgtgtgaaggacacttgaagtacatatgattgggaactatatgtaaaaagatcaaaccacagaaatgaaagaaaaattaaaattaaattttgattaaatatttgaattagaaatggctttgtaatattaaaaccaatacaagtaccaaagggaaagatggatatatttgaatgattaatatatactacttttgtatgtgaaaaattaagaaattaa

SEQ ID NO: 598003 - DNA, 500 bp, Homo sapiens
actttctgggaccacaaatgtcagagctgaaacatatgttaatgacaatctagttaaacgtctctaatttacaaatggagaaattgagcctcaagaccaacatttgggaccataaaccagttcttccttcacttctaaggctatcttctctctttcaaactgcgcatctaggagaagtttctcaaagcagatgatttaaggggtcagccaacctcttcatatatgaaggatggatctacattgcttattgagattcaccgagcaatgcttaagtaaagaccttgtgtgtgaaggacacttgaagtacatatgattgggarctatatgtaaaaagatcaaaccacagaaatgaaagaaaaattaaaattaaattttgattaaatatttgaattagaaatggctttgtaatattaaaaccaatacaagtaccaaagggaaagatggatatatttgaatgattaatatatactacttttgtatgtgaaaaattaagaaattaa

SEQ ID NO: 598004 - DNA, 395 bp, Homo sapiens
ataatacaggaatgggtatctgggaatttgtcataaggaaaaaatgcagaatttaaagatgtttataaaagtgcttatcaaaatgaataattaagaaaagcctgttgtgccatcacagaggaatgtttaagtaaaccatgtttcctctgtgaaacatggaatgcattcatatatgcaggaacatgcagcttttagaatatttccaacaatgtgtggaaattgtggcatcatcgtgttaaatcaaacctgtgtgtgaaacctgcatgtgaaccctatacaaaacaggcacagcagaaaagacccatttagcatgtgagccaaaaagttttcatttcttctgcttaatggatcattctatatttytgttttgttttttgcttttctcttgaacctaa

SEQ ID NO: 598005 - DNA, 567 bp, Homo sapiens
cagcaaatatgaagaattgaaagagtaagggaagaacacaaggagcagtgtgccgggccttgtggctgggtccctgrcctccatctactctttccccatggtatgtcagccttgcaattcgggagagactgattctacccccagctctgggggttgatttacactttgacaggtataaatcaatcagggtactccctattcctcactttgcaaaaggttggttttggtaacccagggttaggccaaaaagacccagtgattctcccagggcccaatagagtgaagtgaagttctttgaattgatgctcatgaaattccctctctcccctccagaattgaatagggaagaatttggccctgactgctgctggtcaccatcttgaaatattgaaggcaaatttgacctatgagcaaagtcagcaccgagaggagggcagaagctggaggactgcagaggaactggactgctctttcccccactttggggctttttcattcagtgaacaagtgcattaagttggtttgagttttgttttattttttaaatagtatgaattacaagaattc

SEQ ID NO: 598006 - DNA, 567 bp, Homo sapiens
cagcaaatatgaagaattgaaagagtaagggaagaacacaaggagcagtgtgccgggccttgtggctgggtccctggcctccatctactctttccccatggtatgtcagccttgcaattcrggagagactgattctacccccagctctgggggttgatttacactttgacaggtataaatcaatcagggtactccctattcctcactttgcaaaaggttggttttggtaacccagggttaggccaaaaagacccagtgattctcccagggcccaatagagtgaagtgaagttctttgaattgatgctcatgaaattccctctctcccctccagaattgaatagggaagaatttggccctgactgctgctggtcaccatcttgaaatattgaaggcaaatttgacctatgagcaaagtcagcaccgagaggagggcagaagctggaggactgcagaggaactggactgctctttcccccactttggggctttttcattcagtgaacaagtgcattaagttggtttgagttttgttttattttttaaatagtatgaattacaagaattc

SEQ ID NO: 598007 - DNA, 590 bp, Homo sapiens
aatttgtatacagtgtctggcaaaaaagaaatcagtaaattcccatcctcactccttcatgctaagaaatgaaaaactggtggccacagatcacttataggacctgccacatactgacaattttcaagattcaatagaaatatttagcctttgactccataatgttttttagtctattagttaaataaattgattgattaagtttagtaatatttctaccactttagctatattagtcagaatagactaaggtgtgctgcagtaacaaattaactctggaatcttaatagcttaataacatgaaggtttattttacaatatcaacatcagtcatcagagggggttttacttcacgtagtctctcagggatccaagctgacaaagatcacactatcttgtaactgcacaatctgaaatgcaaggtctccaagagctctgcagaaaaggaagagagacagagaaggtacacaggagtttaatggccttgaatcagaagtgacacctgtcactcccactcagggtcacttgttctaaactagatacatggcgcaagycttgcaagaaagcctgagaaatataagagtgcctgg

SEQ ID NO: 598008 - DNA, 617 bp, Homo sapiens
tgtgtcagtcgatcattttttcatctgtaaaagggggagacataaccaaagaagctaagacccattcttgaaatctagcctttctttttagcaaatggccacagggatgtaaagataaaagagagatgatttgtaccatcaaggagcttacaattctccaggagacacaaggtacatagatgcataactctctaattcaagctaggaaatagtacttaactaagagtgttagcaaaggctaaaagaatggtgaagaaagaaacatatttccacttaggaggatttcataatagctttattttttatttattatttttttgagacagagtctcactctgtcacccaggccggagtgctgtggtgcgatcttggctcactgcagcctcagccttgggctcaagcctcccgagtagctgggactwcaggcatgcaccatcatgcctggctaatttttgtattttttgtagagacagggtttcactatgttgcccaggctggtctcaaactcttgaactcaagcaatctacttgcctcggcctcccaaagtgctgagattacaggcatgtgccaccatgcccagccttgataatattaatagctttataggatagttacag

SEQ ID NO: 598009 - DNA, 598 bp, Homo sapiens
cgatgtagtatacactattggtcatctgctgacacccacttaccgttcctcctgggctaatagaacccaattttttttcacatatgcactctcctccagaagggattggcctattcgcatcctcaagggataaactgtcattgttctaagccattcattcattcattcattcattcattcaacaaacacaattgagcacctattttgtagtggacattgtktaggcactaaagataaagtcattaaaaaaagtctttgtcttcatgaagccttaataaacacacagttatatattatataataactttgcaatgtcagaccaaacaataaatgtcatgaagagaaataatgccaggtaaaggtatagagaaaaataggcttgctgttttagataaggggatgaggggaggtgatatttgagctgagacatgaatgaagggagggcaccagcctgtgactctgcaggggaaaaatgttccagtcaagggcaacagcaggtgcaaaggcctcagggtaagaataaacctgcacgttgaggagcagccagaaagccaatgtggctggaatgttacaaacagaggctgggtcatagaaatgg

SEQ ID NO: 598010 - DNA, 589 bp, Homo sapiens
agttcagtgctctttctgtggaaacataagatgctcactgcaaaatctcaaaggtctggaaagtctcaaaatagaattcttttcctcttttcttccccagtacctcaatcatcttgcttctctttctaccttcctcccctttgttttgttgcatctgattcaagtaggctaccctggatctggacaggaatagagatgggaaggagaaaggtaaagaatataccagggcaatctagggaagtctgtagggcaaaagtaaagcaatgatgtcaaaggtgccaaactgatgtagaggaactcatttggtatatccaaggccactactcaagtctggccccacaggcttacttaaatcatcagagtcaattcttagttcaataycaattttgtttacacagttcatacttctccttttcagacatgggagactatgtacatggagttagatgtgaatggcatgcgaaattatttcacccctatgggcctaattctgttatctataaaatggatatactgtctcatgagagtaagcaaaacaatataatagttatgcctcttacagggcctgacatatagtagaaacttaaat

SEQ ID NO: 598011 - DNA, 589 bp, Homo sapiens
agttcagtgctctttctgtggaaacataagatgctcactgcaaaatctcaaaggtctggaaagtctcaaaatagaattcttttcctcttttcttccccagtacctcaatcatcttgcttctctttctaccttcctcccctttgttttgttgcatctgattcaagtaggctaccctggatctggacaggaatagagatgggaaggagaaaggtaaagaatataccagggcaatctagggaagtctgtagggcaaaagtaaagcaatgatgtcaaaggtgccaaactgatgtagaggaactcatttggtatatccaaggccactactcaagtctggccccacaggcttacttaaatcatcagagtcaattcttagttcaatatcaattttgtttacacagttcatacttctccttttcagacatgggagactatgtacayggagttagatgtgaatggcatgcgaaattatttcacccctatgggcctaattctgttatctataaaatggatatactgtctcatgagagtaagcaaaacaatataatagttatgcctcttacagggcctgacatatagtagaaacttaaat

SEQ ID NO: 598012 - DNA, 600 bp, Homo sapiens
aattcttctacatgagaccctgagaggtagagatgggaagaagatggaagagggagaagcatgacagaggatcccaaaagatggtatggcagaaacaatgctgtgttctcatcaaatataattttccttttgggaccacttatagctacatttcccagcttcctctacagttggatggggccatgtgaccaagtctggccaatagagttgggtagaaattatgtgtgccactttatgggttggcccctgaaacatcctgtgtggttctccatacccaattctccatgcttgttttcttgtctcacagctggatgcagaakattcagaggtgaactccaatatagaaccactagagaggagactggattcctggaacactgcataagactttcctctaaatacccaactggactgccactgggattttgaggttgtttgttataatgtttagcctcctctgcctaaaagactatgggaagcagaaaatgatacaaaaagtggtcagaggacacccctaatggtggaatggtaaaggtcatttttggtatggacatgcctaaagtacctaagtcccctgagaatttgccatagactcatgca

SEQ ID NO: 598013 - DNA, 519 bp, Homo sapiens
aaaatttttttttaaatggaggggcttttttttttttttttttttgcaccatcttttgtattccagatggcttgggagtgatgcacactccttttttttttttttagacggagtctcactctgttgcctaggctggagtgcagtggtgcaatctcggctgcaacctcgcctcctgggttcaaacrattctcctgcctcagcctcccgagtagctgggactacaggcgctcgccaccacccccagctaattttttgtatttttagtagagacggggtttcaccctgttagccaggatggtctccatttcctgatcttgtgatccgcccgcctcagcctcccaaagtgctgggattacaggtgtaagccaccacacccggccccaatgcatactctttctggtaatgaattgaaatctcataccattcactggtcacagcctcacataatttccatgacagccttcaaagccacatccccacaatttagcactactcagagcacaagaggcctttgctcaa

SEQ ID NO: 598014 - DNA, 515 bp, Homo sapiens
taggcatctgataatttcttcaatctatgaaaaaaccctcaggcagaaatcattataccattttctcaagaagaaatgaaggcttctggaagttaagtaaattgtctaaccaaagtcacattgtttgtaagcagagggactgggattcaaacttagattgtctgactccccaaagccatggtctttctactatgccaggcttcactgttccgtcaaattatatttaactgccaagtkagagactgtcttgggtccaaatatctcaagcatgaatgagctgaaattttccaagcatgaagggtcagaccaggtagctgggtccattgagagcactgcagcaggccactccattgagaaccaggtgtcagcctcagaaagggaaagatgtcttgggccaggacagctgaaaggatgtttatgggaagaaaacctggcggagattaaatcctgtgcacccacaacccccatgatctcagactgctgtttatggccagaacagcaaaaagccaaacaga

SEQ ID NO: 598015 - DNA, 456 bp, Homo sapiens
tggtgggttttgttgttatttgtttattcttcagttttttactatattttgtatatctttttgtaattttgcattttctacagtgaaagtgcacttattattttgtagagaaataaacgccaagtttagtaaagttggtgaacattttaaaaagaaaaaaatcagatgcctcattgcaaagcaatgattctgttaaaataattttcagaacaaaacatttcatttactaggaactmtcttaacaggaaaaatgtttaattttctccaaacagatttcttgttatgcacaaattataaagtggaaacaattgcttcaagttatgagttgtacaaagaattatactttgggctgtcaagactgctacatcatttagaaacatctcccctctctccaccaaatatttccattggtaccatggttagagagatcactttctctgatggcccaggcataat

SEQ ID NO: 598016 - DNA, 576 bp, Homo sapiens
gctgtggctcatgttttgttgaggtcatcgatgaagtcatggatgtcatgctgctcaatctgtgggtaccttaaagctgaaagtgatagtgactaccttgcttaaacaagaagcaagagtcaaaaggatccgaacaatatggataaagggcatgaactactctctctgcaatgttgtccaaaaatgctgctttggaaggtagcaaagttctcattactggaagcactaaatcagatgctatttgtcacttgtaaggggtgctggagaaattctgcaatgtctactgtctttcctaactgatattctagtctagtgtgcacaattccctttaagaattaggattaatggattctttgttaatataagatgttctcccttgttgctcaacaaggaaccgagaggaagagcrtcaataagatattgtaaccgaaggtattagattgatcgaaagaagactttcaagggctttgcaactactgcctggtgggtagattcatgccaaagccccttgtttgatagtaagaccccaggctggtggtggagttatagacctaagtaggcagggaagaaaggtct

SEQ ID NO: 598017 - DNA, 520 bp, Homo sapiens
  misc_feature 137, 160, 236, 281: n = A,T,C or G
atacctgttttagcagcctgaatgaactaagatagtaggtatgtccaatcacctaaactgtgtcttagtcctttcaggtgactattttaaaaaataccatagacggggtgacttaaacaacaaatatttgtttttcnacagtcctggagtctgggaagtnccaagatcaaggctctcagcgagattcagtgtctggtgaggggcacacttctggctcataggtggtcatcctctgnctgtgttctcatgtggcagaaagaatgaggggtctaaggtctctnttcataaggggcactaacaccactcaagagagcttcacactattaacctaatcacctctcaaaggcaccccttcctaacaccrtcacattgggagttataatttcaacacctcaattttctgggggacacagacattcagtccataataacctcctatatttctatccccatttgatatataagaaaactgagactcaggaaagtaaagtgaaattcctgaaacctacagagtagaaat

SEQ ID NO: 598018 - DNA, 542 bp, Homo sapiens
aaaaataacacagaaaaattacaaaaataacacaacctattctgtatactgttctttcagattccataaatattgacattttaccacatatatttttatcattctcactaaatatatctttgtgtatgtgtgtatatatgtgtgtatatatatatatatatacacatataggcatctattattattttttccctgaatcaattaagaatgagttggaggcctaatccctctttattcctaaatactcaaggatgtatttccattaaaaaaaagataaactcttacatacctaaacttyatcaaacttaagaaattaacattagttcaatgctattgcctgatccatggatcttaatcaaatatctctagttgtcccaataatgtctttatggcaagagaataaaaatctactccaagatctaatccagaatcatgcactggatttagttatcatatctctttagtttcttttcaattgggatggttagctccttgttcttcttggtttctttctttcatgactttgacattgttgaagagca

SEQ ID NO: 598019 - DNA, 352 bp, Homo sapiens
ctaaaagaacatctctctcttttgaggacaatggtgaccagacttyttaattattgctattctttgcagggagtgccattagcaagggagaaagagaagaataatctgtttggatagggaagggcaaacccaataaatttgccagctgcacttgatatcttagcagcaaaacaagccatcccacactgccttgtaactgcaacacaagacagaggacatagtcataaactactccatggtagggatccttatctgtagcagattataaacccagagaccacatggggacaaatttgtaataaatgatattgttccaattagggcctggttcagctggaaattaaaagcacaa

SEQ ID NO: 598020 - DNA, 552 bp, Homo sapiens
agccaccccaggctgccagaaccgtcctactttaagagaggatcctttggggccgggtgcggtggctcatgcctgtaatcccagcactttgggaggctcaggtgggtggatcactacaaggtcaggagtttgagaccagcctggccaacatggtgaaaccccatctctactaataatacaaaattagctgggtgtggtgacagtcatctgtggtcccagctactggggaggctgaggcaggataattgcttgagcctgggaagcagaggttgcagtgagccaagattgcgccactgcactcctgcctgggcaacagagcaagactccatctcaaaaaaaaaaaaaagaagaccctttggctgggctcagtggctyactcctgtaatcccagtattttgggaggctgaggtgggaggatcacttgaccccaggagttcaagaccagcctgaacaacatagtgaaaccccatctctacaaaaaataaaaaataaaaaattggctgggctttcgcttgagcttaggagcttgaggctgcagtgagccgtgatggt

SEQ ID NO: 598021 - DNA, 516 bp, Homo sapiens
gaggctgtggccttcccgccaaggtgacctcaggggtyacagaaacctcggctccatgctgggtcccacttacctgggggccatggcacaaggagatcctgctggtttctgtccagaagtaaattgagtctcttgtggatgtctccagggtgtaaccctgcaggctgaagctgcctgtctcctgtgggggcaaaaggcaggctgagcacagattccaaaggcccttttgtggtcagctctgacacgaggcagtggagtgtcatggaataagaggcagcttacccatcagaatggggtttgagtgctgtgagaatgacctcggtttccccatctgtaaaatgaggaaaagtatcctcctacatagggcttattgtctgagagctaaattgatgtagaaagtttagcacggtgtaggtgcacactcaggagtggtaaaccgttagagttatggcatctttaccatcatcatcatcatcatcatcaataccatcatcgactcatgaaaaagccactgcc

SEQ ID NO: 598022 - DNA, 408 bp, Homo sapiens
agagcaaaatttgcgtggcaaattagcacacagttgacattccttctgtcctgatgacatttctgatgttgaataatattcctggggttcctctctaaactattatgccttttattttttatgttaatgactttgttcctaattacaatagcaatacctgcctaattgagaaagaattgaatgtatcaagaaagcacccacagtgagctaacatacacacacacacacacacacacacacacayacacacacatacatactgttcattgcccaacattctagttaggaacatctgtttaataagtgtcatgccctaggtgttagatagtcgctgtcctagtcccatttcacagatggataagctgaggctcacagtattcaagctgttaagtaccagagctaagaatt

SEQ ID NO: 598023 - DNA, 512 bp, Homo sapiens
cctgaattctaatgatatcctaagtccagctcagaagccgcagaccacyccctcaccaatttttctgctcatacagaaaaaaaaagttaatgtatcagttatctatggctgcgtaacaaaccaccccaaacccacagtggcttaaaataacaactgttagtgctcgtggctctgtgagccaaagatacaggcagggccccactgggcagttcttccacttcacatggtatcatctgggttcactcacatggccacactccccctggagcttgactggagctggaagacccaagatgacctcactcacgtgtctggcacttggttttggctgtcagctggggtgcttggttctcctccatgtggcctttccagaaggatagcttgggcctctttacatcgtggctgggttccaagaaagtgaaaatagaagctgcaaggcctggaagttgcccagcctcacttctcctgagttctgttgctaaaagcaaggcaccgggccagcccagattcaa

SEQ ID NO: 598024 - DNA, 512 bp, Homo sapiens
ctgaattctaatgatatcctaagtccagctcagaagccgcagaccaccccctcaccaatttttctgctcatacagaaaaaaaaagttaatgtatcagttatctatggctgcgtaacaaaccaccccaaacccacagtggcttaaaataacaactgttagtgctcgtggctctgtgagccaaagatacaggcagggccccactgggcagttcttccacttcacatggtatcatctgggttcactcacatggccacactccccctggagcttgactggagctggaagacccaagatgacctcactcacgtgtctggcacttggttttggctgtcagctggggtgcttggttctcctccatgtggcctttccagaaggatagcttgggcctctttacatcgtggctgggttccaagaaagtgaaaatagaagctgcaaggcctggaagttgcccagyctcacttctcctgagttctgttgctaaaagcaaggcaccgggccagcccagattcaag

SEQ ID NO: 598025 - DNA, 498 bp, Homo sapiens
agaagccgcagaccaccccctcaccaatttttctgctcatacagaaaaaaaaagttaatgtatcagttatctatggctgcgtaacaaaccaccccaaacccacagtggcttaaaataacaactgttagtgctcgtggctctgtgagccaaagatacaggcagggccccactgggcagttcttccacttcacatggtatcatctgggttcactcacatggccacactccccctggagcttgactggagctggaagacccaagatgacctcactcacgtgtctggcacttggttttggctgtcagctggggtgcttggttctcctccatgtggcctttccagaaggatagcttgggcctctttacatcgtggctgggttccaagaaagtgaaaatagaagctgcaaggcctggaagttgcccagcctcacttctcctgagttctgttgctaaaagcaaggcmccgggccagcccagattcaaggagaggataaagaattc

SEQ ID NO: 598026 - DNA, 614 bp, Homo sapiens
attcacattgttgtgcaaccatcagcaccatccatctccaaagttttttcatcttctcaagtggaaactctgtacccattaaaaactccttattcccactttgcccagcccctggaaaccaccattctactttctatctctatgaatttgagcactctaagatgctcatttaaatgcagtcatatagtatttgttcttttgtgatggcttatttcacttagtataatgtcttcaaggttcatctgtattgtagcatgtgtcagaatttccttcctttttaaggctgaataaaatttctattatatgtatatatgacattttgtttataaatttatttgttgatggacattgggttgtttccaccttttggctgctatgaacatagatgcacaaatatctgttagaatacccgctttcaattcttttggttttatacccagaagtggaattgctggatgatatgataattctatatttacttttytgaggaatctccataatgctctccatagctgctgcactattttatgttccccacgaacaatgcacaagtgttccaatttttccacatctttactaacacttgttactttctgttttgttaattttttata

SEQ ID NO: 598027 - DNA, 628 bp, Homo sapiens
ttgtgtgcctaatttgagttattcccagcatgccctgcatcttcctgcaagtgtgtgtgtgtgtgtagtgtgtgcacgtagagaattccctggaaatcacatagctctggagtctttctatggaatatgacatgatcagtatcctctcaggatartatatgatcacatcctattccgcagaaaggtctttgagcacaacggcattcccactggagtcccatcaagggagccttggttcctgagaacctagatgagttgtacctaaagtgtggttcccagtcccacagcctcagcatcacctgggaatgtgttagaaatgcagattctgaggcccaccacgaccaactgaattaggaactctggagtgggccccagcaactgtgttttcttatgcccttcaggggattttgtgggtgccactcccggccttggacccactccaggcatctccatggttacagaggcagggaattgggggctggcagggagtggggaaggctgaggtgggtagaggagtgaaactctcccacagtacctttcactcagattgggggtagaggaaaaatccccacggggtgattgtgtctttcccctgcaccccacttgttgctgtcccgacaggtttttc

SEQ ID NO: 598028 - DNA, 628 bp, Homo sapiens
ttgtgtgcctaatttgagttattcccagcatgccctgcatcttcctgcaagtgtgtgtgtgtgtgtagtgtgtgcacgtagagaattccctggaaatcacatagctctggagtctttctatggaatatgacatgatcagtatcctctcaggataatatatgatcacatcctattccgcagaaaggtctttgagcacaacggcattcccactggagtcccatcaagggagccttggttcctgagaacctagatgagttgtacctaaagtgtggttcccagtcccacagcctcagcatcacctgggaatgtgttagaaatgcagattctgaggcccaccacgaccaactgaattaggaactctggagtgggccccagcaactgtgttttcttatgcccttcaggggattttgtgggtgccactcccggccttggacccactccaggcatctccatggttacagaggcagggaattgggggctggcagggagtggggaaggctgaggtgggtagaggagtgaaactctcccacagtrcctttcactcagattgggggtagaggaaaaatccccacggggtgattgtgtctttcccctgcaccccacttgttgctgtcccgacaggtttttc

SEQ ID NO: 598029 - DNA, 544 bp, Homo sapiens
ccaccaatacttttctgctagctcactctgtgtttaaaaactctcctaccttttgtttcagaaaaattgagttcagtctctctcccctattcgcaaacacctgaaaacatacagctcctaaaagagrtcgtaagggaaaagccccttgacactgacttcagcaataattgtttttttaaatatataactccaaaagttcaaaaaaggttacaaaagcaaaaataaataaatggtgctacatcagattagaaagctgaacagtaaagaagacaatcaacggaatgaaatggcaacctacagattgggataaatgtttgcaaaccatatatctgataaggagttaatatccaaaatttatgaagaactcatacaactcaatagcacaaaaacaaataacccaattttttaaatgggcaacggacctgaatacatatttcaccaaagaagacattgaagtggccaaaaagtatatgaaaggtgctcaatataattaatcatctgggaaatgtaaatcaaagccgctatgagatatcacctcacacct

SEQ ID NO: 598030 - DNA, 553 bp, Homo sapiens
catggaggtagagagtggtaatacagataacagagactgggaagggccagcagaggggcaggggaaaggagagcacaggagaagtgaagtcggttaaaggatatgaatatatagtaacataaaaggaatcaattcaatatttgatggcagagtaggatgactatacttcacaaaattatattgcactacagtgaggaacaccctgaacactctgatgtgatctctatgcattatatgcatgtaacacattttctcatatactccataaattctcacaaataaaaaaagaaagaaaagggtgagctgaaaataaaaaataaaatayagttgaagagtatgtgtttcggagcagtcactgccacttactggctatgtgaccctcagcaattgtcctcacccggaatgtcaggtgcacacttggtggggtgtggtgaagcttcaccatgacagtgccacaggagcaattcactagcatgcattaagcactccataaatgtactagaattatgggacaacagtgaggagaaactcagaaatcaaagaaagcctggga

SEQ ID NO: 598031 - DNA, 553 bp, Homo sapiens
catggaggtagagagtggtaatacagataacagagactgggaagggccagcagaggggcaggggaaaggagagcacaggagaagtgaagtcggttaaaggatatgaatatatagtaacataaaaggaatcaattcaatatttgatggcagagtaggatgactatacttcacaaaattatattgcactacagtgaggaacaccctgaacactctgatgtgatctctatgcattatatgcatgtaacacattttctcatatactccataaattctcacaaataaaaaaagaaagaaaagggtgagctgaaaataaaaaataaaatatagttgaagagtatgtgtttcggagcagtcactgccacttactggctatgtgaccctcagcaattgtcctcacccggaatgtcaggtgcacacttggtggggtgtggtgaagcttcaccatgacagtgccacaggagcaattcaytagcatgcattaagcactccataaatgtactagaattatgggacaacagtgaggagaaactcagaaatcaaagaaagcctggga

SEQ ID NO: 598032 - DNA, 509 bp, Homo sapiens
atagtttcttttggcgcccatatggtgataaagctctgttggaaacaaagcgagaagcactatccattattgtctacttgttctgttttcatgcataattaaagctggacaaagccaacattggatcagacgttaaataaggctgcattaggcaaagtccagcagcagtccaaccactaagaaacgaaaattctaaacaaatcaaaattggtgaaattgagattatttttcaaaagaggatttactgtcttgcgttttcttagggaaggggctgttgcagcgctttttttctttttgtccaggagaggataattattcgcaataaagctgctgctctcgaaacagaatggaaagacaagagtcatttgttaaagaagacccttagtagcctcctgcctgctccttttttctttaaatatatatgaaaatctgtaattatttctttgaagaacatttttcaacagctgtaaatgataatgagccaatcaytgtgtgctcttttttcactc

SEQ ID NO: 598033 - DNA, 564 bp, Homo sapiens
tttcctcccagatgttgcccctccctgtcttcactgcactctgcatctgccctctcctggtcgtttctagtcttaacgatggtctagtcggtccctgctccttctggcaggtccttccaggctctccctgctatagccttctttgtccgtgggccactgacagccagccttgacaacatctgaggatattttccagygtgtgcttctcataactagccctgcaagacattccgtgatagcccatgaccaaggggactgatggtttaagccatgagaaactccctttgggagattcctaatgcccattagcatagtaaaggtttttgaaatgcctacaataaagatgcttgcttaaatttggccaaatttaataaacttctaagacctttttttgaaaacatcctgttaaatccaataaatttgtaatctgagagcacactttgttacccttggaggacactgctaatgtagcttcctccccaataacacgtttggcctagaaataatctgtagctcctgtgcctttgtctaatatcctgatgttggaattaggacaccaaggcc

SEQ ID NO: 598034 - DNA, 564 bp, Homo sapiens
tttcctcccagatgttgcccctccctgtcttcactgcactctgcatctgccctctcctggtcgtttctagtcttaacgatggtctagtcggtccctgctccttctggcaggtccttccaggctctccctgctatagccttctttgtccgtgggccactgacagccagccttgacaacatctgaggatattttccagtgtgtgcttctcataactagccctgcaagacattccrtgatagcccatgaccaaggggactgatggtttaagccatgagaaactccctttgggagattcctaatgcccattagcatagtaaaggtttttgaaatgcctacaataaagatgcttgcttaaatttggccaaatttaataaacttctaagacctttttttgaaaacatcctgttaaatccaataaatttgtaatctgagagcacactttgttacccttggaggacactgctaatgtagcttcctccccaataacacgtttggcctagaaataatctgtagctcctgtgcctttgtctaatatcctgatgttggaattaggacaccaaggcc

SEQ ID NO: 598035 - DNA, 585 bp, Homo sapiens
taagaaaagaataaaatgtccagaccctatttctgtaagtggcttaaccacagttccctctcctcttcaacacaagagggtgagtatgtttacccaacagaattttttaaacaatattcttttatatgttaaaaaagcatgcatytatgtttgctgaattcttaaatgttagtaattttacttctctaacaagaatgtttcacaataagctgcacttccataaaaacaatatttaaactgaagcatggtcatttttcttcccttatggataaagaaccaggttacatttaacttaatggagttattttcctgtttcctctactcttttacttacttcttcttctagatctattatttccattaaattttcataatatcccattaactcaatgaaaagaattttgcatggtattaggttgggaagaaagcatttcctttcattattgtcatgagaaatttttttttgctaaaatactttttctttttcctatggaccttcggtttgctctctttcaggatttttataattattctactgttatcatttcccccttaaggacaaattgaattgctttgagtttatct

SEQ ID NO: 598036 - DNA, 628 bp, Homo sapiens
ctgccccaatgatagaccaagtacatggatacgttttcctttccctgattctaaaaagcagcagcttgcttgaaaatcctatgttgctaaacaattaattgttgaccattcaataccatttctttattaagaaacagagataattatagatggttagcaccacctagcaatgcttacayacacattttgaaaccaaagataggtatctgtaagtcaaacaacagaactagtaagcatgcatacataataactctacagggaagaaaaattacagaacactacgtgatagacatatctaaggcaatccactcgtttttatgctactaaaacaaaaattgtaacccatgtaaagtttgttttttaaaggttgcagccaggcttgatacttttaattataaagtgataactttttcagaatacatggcttcagtaaagactttgaacactagaaaatctaaagttatttttaaatcttccctattgttaatctaaatgtttaagcagaactacaaagttttgtaaacttaaagcaagaatctgtgggctccttttccctatctttctggctgtcctgaggttgtcaaacaaaaccaaacctaatttctctctaatcaggcaggactggcta

SEQ ID NO: 598037 - DNA, 628 bp, Homo sapiens
ctgccccaatgatagaccaagtacatggatacgttttcctttccctgattctaaaaagcagcagcttgcttgaaaatcctatgttgctaaacaattaattgttgaccattcaataccatttctttattaagaaacagagataattatagatggttagcaccacctagcaatgcttacacacacattttgaaaccaaagataggtatctgtaagtcaaacaacagaactagtaagcatgcatacataataactctacagggaagaaaaattacagaacactacgtgatagacatatctaaggcaatccactcgtttttatgctactaaaacaaaaattgtaacccatgtaaagtttgttttttaaaggttgcagccaggcttgatacttttaattataaagtgataactttttcagaatacatggcttcagtaaagactttgaacactagaaaatctaaagttatttttaaatcttccctattgttaatctaaatgtttaagcagaactacaaagttttgtaaacttaaagcaagaatctgtgggctccttttccctatctttctggctgtcctgaggttgtcaaacaaaaccaaacytaatttctctctaatcaggcaggactggcta

SEQ ID NO: 598038 - DNA, 433 bp, Homo sapiens
acaaaacagaagacaagggggtgacatctttaaagtgctggaaatttttaaatgccaaccagaattctacacccagcaaaagtmtccttcaaaaatgaaggagaaatactttctcagataaataaaaactgagggaagccattgcctgcatacttaactctatgagaagtactgaaggaagtatgatatctgtcttagtctgttcaggctgccataacaaaatactacagactacgtggcataaacaacattgatttattttctcaccgttctggaggttagaagtttgtgatgaggatgccggcatgttctggatctggagaggtccatctccccggcttgcagacggctgccttcttgctgtgtcctcacatggtaaagagaagaaagcagactctctggggtctctttttataagacagcaatcttacca

SEQ ID NO: 598039 - DNA, 433 bp, Homo sapiens
acaaaacagaagacaagggggtgacatctttaaagtgctggaaatttttaaatgccaaccagaattctacacccagcaaaagtatccttcaaaaatgaaggagaaatactttctcagataaataaaaactgagggaagccattgcctgcatacttaactctatgagaagtactgaaggaagtatgatatctgtcttagtctgttcaggctgccataacaaaatactacagactacgtggcataaacaacattgatttattttctcaccgttctggaggttagaagtttgtgatgaggatgccggcatgttctggatctggagaggyccatctccccggcttgcagacggctgccttcttgctgtgtcctcacatggtaaagagaagaaagcagactctctggggtctctttttataagacagcaatcttacca

SEQ ID NO: 598040 - DNA, 433 bp, Homo sapiens
acaaaacagaagacaagggggtgacatctttaaagtgctggaaatttttaaatgccaaccagaattctacacccagcaaaagtatccttcaaaaatgaaggagaaatactttctcagataaataaaaactgagggaagccattgcctgcatacttaactctatgagaagtactgaaggaagtatgatatctgtcttagtctgttcaggctgccataacaaaatactacagactacgtggcataaacaacattgatttattttctcaccgttctggaggttagaagtttgtgatgaggatgccggcatgttctggatctggagaggtccatctcccyggcttgcagacggctgccttcttgctgtgtcctcacatggtaaagagaagaaagcagactctctggggtctctttttataagacagcaatcttacca

SEQ ID NO: 598041 - DNA, 599 bp, Homo sapiens
tttgttgcaaactttttaaaatcactttacaattataatctgattgaatccttacaattctgcaagagaggcatcattgccctcattttaaaataagaaatcttacttctctgcaaagttgacagaaaaaaaaattttttaaataaaaaaaatgagaaatctgaggttcatgtagattaagaattttgcacaagagatggcactgaaatttaaacttagaactgtgtaactccaaggtgcgcacactcacccatgccatatagtctccaagcctgctacaaatcaaacaatttttttagttagttgccatagcaaatcacctgcagaataagagacatcgctgtactgttgtagttaagagactgtccataagtccacaacttaccagtggtggccttagtgaaatttcttattttctctgtaaactggaataaaaatatacctcagttgtcaatttcgagaatkaaataaaataatccacgtaaagcccttgacaaagaacctagcatctaatgagagttcaataagtgtgttctgttaatctcatttataactatattaatgtggctaacacagggcagcctttctatcctgatttc

SEQ ID NO: 598042 - DNA, 568 bp, Homo sapiens
ctaatccctacaacaaatttatgaagactttactatcattattcccatttcacataggaggcaactgaggctcagatatgtcatttgaccaaaggcaaaccacaaatagtaagtaacagaaatgaacttccaaccagatttctctaattgcaataactgtgctcytaaccacagatgaggtttcaatgtccctatctccccttcatgtcagaaaaagaaatacaatcacaaagtggctaacaaacagttaaaaggatggctgacagtcccaggttcccttgcatttgaaaaacccaggttattaaatctgccttttgtaagtgggaattccacaggacatccaaagccatgggtctcaattaatgtgcgctcacaaaaaagcatccatgtccgcagccctcattgatggtatatttatcatggttatgaggtttagacttacacaactcactctggcttaatagtttctactttttgcctattgctaatgaagcaagattgtccccattccactctggagacagaaatccctgcagaagagagacactcactgagcttctggctgcat

SEQ ID NO: 598043 - DNA, 568 bp, Homo sapiens
ctaatccctacaacaaatttatgaagactttactatcattattcccatttcacataggaggcaactgaggctcagatatgtcatttgaccaaaggcaaaccacaaatagtaagtaacagaaatgaacttccaaccagatttctctaattgcaataactgtgctcttaaccacagatgaggtttyaatgtccctatctccccttcatgtcagaaaaagaaatacaatcacaaagtggctaacaaacagttaaaaggatggctgacagtcccaggttcccttgcatttgaaaaacccaggttattaaatctgccttttgtaagtgggaattccacaggacatccaaagccatgggtctcaattaatgtgcgctcacaaaaaagcatccatgtccgcagccctcattgatggtatatttatcatggttatgaggtttagacttacacaactcactctggcttaatagtttctactttttgcctattgctaatgaagcaagattgtccccattccactctggagacagaaatccctgcagaagagagacactcactgagcttctggctgcat

SEQ ID NO: 598044 - DNA, 616 bp, Homo sapiens
aatgaacttccaaccagatttctctaattgcaataactgtgctcttaaccacagatgaggtttcaatgtycctatctccccttcatgtcagaaaaagaaatacaatcacaaagtggctaacaaacagttaaaaggatggctgacagtcccaggttcccttgcatttgaaaaacccaggttattaaatctgccttttgtaagtgggaattccacaggacatccaaagccatgggtctcaattaatgtgcgctcacaaaaaagcatccatgtccgcagccctcattgatggtatatttatcatggttatgaggtttagacttacacaactcactctggcttaatagtttctactttttgcctattgctaatgaagcaagattgtccccattccactctggagacagaaatccctgcagaagagagacactcactgagcttctggctgcatgcctttgaaaatgaatggactttgtagctggcctttgaaaggtcttgtagagaggccccaggcagacactgccagagtatctgtctgaccatatccattggatccctgaaggcttcccttcttgagaattctctattaaaatgcaaaagtcttcattactgccaaaca

SEQ ID NO: 598045 - DNA, 589 bp, Homo sapiens
aacaatattgaatttatttttaactactagagaaactgtaaatagctgggtggcatcacccaggtgtctgactaatcacttgaaaccttttcccaaataacagcaaacgatttcaacctcaagaacagttttcatccatatctgggttagcacacctttcaagccttagcacatttgttctgcactaataataaaattagattatgcctacttcatataagcagtaagaagctaatccctcataaagcacagtctaatatgtttttttaaccrtgaatcaactaagctgctgaccaaatagatctcgcaatgcctagtaagtactatttcttacctcataatttactttctgactttgttcatttcacatagatgaactcaaatcacacctgaagcttgctgaacctgtgctgataaatttcagttgacctataatttgtgataccaaaaagtcaatacaaaagaactagattcttccttcataacttcaaatacttgccaggttcattaaaaacaaacaaacaaacacatgttctggaaatgcgacaatgcattcagacctagctcttgtttgcattgctgtatctgc

SEQ ID NO: 598046 - DNA, 590 bp, Homo sapiens
tatccttattttacagatggacagccaatacttccctgctccttctaccactgcacacagcccttcagccaggtggatcattgtggagagatggaaatgctggttgtgaaggacactgtgatgctggaggacttattcttggagctgctggaatagctgctgccacctgacctctctgagatttgctcttcagcttgaaaagaccccatatcccaaggtcataccccttcccatggccaggtcatattccataactcatcccccaaggtggggagggagtgcaagggccaccttctttgcccaaacccaggacaactctgaggggacctcccagctgcagagctctcacgggactggctgaagacttcttgtgactgtgatactgccaacttggcatctacctgttctgcttcctccttccgckctcctcccctccacctaatggatcctgagggcaagtttccttatcagtctccttcttggagaacctgacctacaacattagttttgtggtgaaacagagcaatttttatttatgcctcctcttgaacaaaagaagatcaaaggcagttatcacggctatgtaaaac

SEQ ID NO: 598047 - DNA, 609 bp, Homo sapiens
ttagaagttccagtatagcagctgtctctcagcaaataacctttggaagtcatttaacaaataaatattcccacttcctgagtgatctaatcagcagtcatatggattttcttttccagttaagttctagttgtcaattgtaatttctaaaagaaactagaaggaagttagaaacaaagatggtaattatccagccagtttgggttttgtatatggtggcatgctcttcagatgtgttycataatatttactattccattgacaaaatttccagatgatttctaacattctttttttaggttctaccgtatagacagccataagtaaacctgaaataaagacattctatgttgtcagacctgcaaagcctactcttcagtggtagtgacaattgtcacctggattcagaaagagatcagtagaggtatagtcagttttattttttaaaaccattattttctccatccttactagaggaattggttgaagtctctacagagtgagattaagaaaattacgctgaagagactttcctgtgtataagttgtacttttccagggagacactgactcttacttacaaggcatctctggcttttaccttaaaaag

SEQ ID NO: 598048 - DNA, 628 bp, Homo sapiens
ttctgcactaataataaaattagattatgcctacttcatataagcagtaagaagctaatccctcataaagcacagtctaatatgtttttttaaccatgaatcaactaagctgctgaccaaatagatctcgcaatgcctagtaagtactatttcttacctcataatttactttctgactttgttcatttcacatagatgaactcaaatcacacctgaagcttgctgaacctgtgctgataaatttcagttgacctataatttgtgataccaaaaagtcaatacaaaagaactagattcttccttcataacttcaaatacttgccaggttcattaaaaacaaacaaacaaacacatgttctggaaatgcgacaatgcattcagacctagctcttgtttgcattgctgtatctgcagtgaaagayataaggataatttagtgaggcatacacattgcctccatatctctttaaaatagaactaaataacagcaaatatgaataatcctgttaagtcctcaggacgcttccaagagtttaattctgcattgtgcctctcagcccagaatctctttaaccacacaaatgataatgactatcttcaatgcttttccactgtcaagcgatgttgt

SEQ ID NO: 598049 - DNA, 582 bp, Homo sapiens
cattaatgataatctaaaatattgtggagacattgtcttaaatttttggcatagaaaatgttaaaattgcctcactttttacactcttttttcccaaatttttctacatattcaatagggaaattgctaaygacaataagccatcaattgtgcttcattcattaaatttgagtttgtgcaatttgttcgttgttctgaaaactgttccctagcaccacctatttcttcctattgcttattcaactataacattctttgaatttttttagctttcacagattaactctccagaagacatgttaccctgcttgatattcagtatatattttctggtgacagctttatggtacaattaaatttcatacatttttttcagccttccctgaatatgcattagaaagccaaccatcataattctaagccaattggcttgatttgcttatttaagcccacatctaacaggcctgctatatttccatacattccatccccatctgcactccatccacctgcccaaagttattgatcatgctgacagtgaaggaaaccacagggccttgacagtcaaaatataatttccat

SEQ ID NO: 598050 - DNA, 588 bp, Homo sapiens
tgaccacttactttaggtgcaggaggaggcccattgttataacgccacacatttgctatgactacattaaaccttcttcagtcatcactgccctagtataaattattttctcagaggatttccaacatagaccctatgagagtagaattttgtagaaatgatttaaaaatagattcagagaaacagacattgctctaagagaactggtctggggaagagccctgtgtagcctgggattacttgaagaccctggaaccccagagatctagaaagctgttcagaagaaaggagaaaggacaatctctgtcacctacaccacagttttttccagagagctctgctgcttatctctatcaggatatacgtttggtsattaaaacaccaaaaccatcagattcctattcaactataatgacccatccttatagactacaagacaatgtttttgtcacacagtagttccatattaattattgcatatcatggtaagtaaaatagtaggggcaagaaaatagaaggcccatgtttaaaaggaaatgattatataataaagttgtattgcaggtcaaaagaagaggatagtcaatt

SEQ ID NO: 598051 - DNA, 624 bp, Homo sapiens
tctgaactgcaagaatacagaaagagcgaaaggaggtgaaataaatacaatgcaaaaactaatccaaagaaarttgatgttagcttattaaagaaaaaatagaaataaatggtatactttattctaaaagaatcaactcaccagaaagacaaacagttccctatttgtatgcatgtaacattacctcaaaaattttaaagcaaaacttgacaaaactacaaggagaaatataaatctacactcacagtagtgattttgaaacaccacacgaaatcaagaaagatgaaataaatgtgaagactgtaatttgcccaaatgcacatttattgaaaactgcacccaacaactgtgaaacaaataatcctttgaaaaacacaaatcatctgcaaaacttgtctatatgctgagcggtaaagcaagtctaaaaaaatttcaaagcactgatatcatactgagtttgttctctgattacagtgcaattaagcttgaaatcaataaaaaaacagaaaattacctaatatatggaaattaagtaataaacatctaaataactcataagtaaaagggaaaaaatcacaatgaagttagagtagatttttagctgaatgataacaaaaaaaaata

SEQ ID NO: 598052 - DNA, 624 bp, Homo sapiens
tctgaactgcaagaatacagaaagagcgaaaggaggtgaaataaatacaatgcaaaaactaatccaaagaaaattgatgttagcttattaaagaaaaaatagaaataaatggtatactttattctaaaagaatcaactcaccagaaagacaaacagttccctatttgtatgcatgtaacattacctcaaaaattttaaagcaaaacttgacaaaactacaaggagaaatataaatctacactcacagtagtgattttgaaacaccacacgaaatcaagaaagatgaaataaatgtgaagactgtaatttgcccaaatgcacatttattgaaaactgcacccaacaactgtgaaacaaataatcctttgaaaaacacaaatcatctgcaaaacttgtctatatgctgagcggtaaagcaagtctaaaaaaatttcaaagcactgatatcatactgagtttgttctctgattacagtgcaattaagcttgaaatcaataaaaaaacagaaaattacytaatatatggaaattaagtaataaacatctaaataactcataagtaaaagggaaaaaatcacaatgaagttagagtagatttttagctgaatgataacaaaaaaaaata

SEQ ID NO: 598053 - DNA, 600 bp, Homo sapiens
tgccaataagttagaaaatttatataaaatgtacaaatcttagaaaaacaacttatctattgtaactgaaacaagaaggatagaaagcaaagcaatcttatattttaaaaatggaatctgcattttaaaccttccccttgctctcccaaaaaagcaaaaatgcctgaccaaacagcaaattctcctaaatatttaggaaagaaataatgccaattttaaacaaactccttcagaaaattttttaaaaaacagaacaattatgtacacattttatgtagctagcttttccttactacaaaaaactgacaaggaaggacattatgtgaaaagaaaatgacaggccaatttaacacatatgttaaaacctttagcaaactattagctaaccaaatcagcaactttttataaagaaaaatacaccccatagmccagttgaatttatcccaggaatataaggttggtttactattccaaaaaatcagtgtaattcaccatgttaataaaggagaaatatcatttcattatctcaatagctgcattaaaagcatttgattatagtcaacatccatttacaacttaacacacacacagacacataca

SEQ ID NO: 598054 - DNA, 626 bp, Homo sapiens
tacagtctattgtcaacatggtagccaaaaggatccttttaaatgtaaatatggacctgtcattcacctattcaatactctcaagtggcttccatctcactcagagaaaaaccaaagtccaagcaaygccttacaaagccagccatgaaccgcacccccttatgtctgatttcccctcctattctcatctgctaactcaatccaggaagttaaactgggcccctcactgttcctctatcccattagacaagctcccacctcagagcctttgcactgactatttcctctgcctagaatgttcttaccctagatatactctcttgacttcctcctttgccttcaaattttgcttaaatctcagcttctgaatgtggcttactctgaaatccaatttaaaactgcaacccatccacctcagcctggtactcccaatccttcatatcctgctctatttttctttttaccactgcacttttaaatgtctactctactatacaatttgtttatttattgtgttcattgcttctctcctgtctaccaccactaggatttagactccatgaggcacaaagatcttaatctgtcttgttctcttatatattccaagtaccatgagcaatggctag

SEQ ID NO: 598055 - DNA, 443 bp, Homo sapiens
ggtatctttgtttcatattttgctggagcactttataatatttctagtatggatgtgaaaagcatagactatcaggaaaggagataattaattttaaaagtgcttatttaatactagcaatttggaaccattttaaaatttggagatgatgtattttatccaaagatcctgctaaatggaaaattgaaatgctgatcacatctaccgtttaatgagacttaggtcaaaaagcatacttgagtctttcatttgggagtaaagtatatgtagtttataatgcaaattcatatgaaatgctgcaatatgttttgtgcattgaaaagtttttaaatgaccccattttctcctcaaggatctagaactagaaataacwtttgacccagccatcccattactgggtatatacccaaaggattataaatcatgctactacaaagacacat

SEQ ID NO: 598056 - DNA, 592 bp, Homo sapiens
ggtagtatgattattgaatcatacaattgattaaatagccaaacagggacttataattggaggatgcaatgtatgatgatgtgggtaacagcaatgcttatatgggatgggaaaccgaaggactaaattktagttgaataatcactctctgagtttctcatagtctgtttcttcactgagaaattagaacaatggtaaagcatttctcacaggataattttgaagacaaaatgagtcactataaacttagtaaatagttaaactctgtgtggcaaacatatttagcaccaaaatatgtccagcagtgttagatattgggcattcaatgataattagacacagtttgtgtttttaaataacatacaatgtaatgggttattgtgatatattgatgccatttaatatagatgtgggaagagtgaacttggagcacagaaggaccactgaacccagcgatattttctagagaaagactttaagataaaaatcataatataaaacagcatatagattttagttattaagatttacacccataaaatggtgaatgacaaggaaattatcaagatatttaaatataaagtttaaaatg

SEQ ID NO: 598057 - DNA, 598 bp, Homo sapiens
tgaaatactaatttcaattactttggtatatacccagaagtgccattgctggatcataggttagttctacttttaattttttgggaagcctcttactgttctctgtcatggccgtggtaacttacattctcaccaacagtgtgtaagggttcccttttctccacatctttgcaaacacttatctttcaacttttcgataatagccattgtaacagacacgaggcaatatctcattgtggttttactttgcaatcctctgatgattagtgatgttaaycattttttaatatacctgccggtcatttgtatgtctttgttttggaaatgtctattcagattctttgcccatgttttaattgggttatgtgtttccttgctattgtattgtacgttatattttggataactccttataagatgtatggcttggacatcttttctcccatttcataggttgtctcttcacactattgattgttacctttgctgggctgaaggtttttaatttgatgtaatatctattgcctgtttttgcttttattgccagtgcttttaagttcatatcctaaaaatattcgctgagactaatgtcaaggag

SEQ ID NO: 598058 - DNA, 598 bp, Homo sapiens
tgaaatactaatttcaattactttggtatatacccagaagtgccattgctggatcataggttagttctacttttaattttttgggaagcctcttactgttctctgtcatggccgtggtaacttacattctcaccaacagtgtgtaagggttcccttttctccacatctttgcaaacacttatctttcaacttttcgataatagccattgtaacagacacgaggcaatatctcattgtggttttactttgcaatcctctgatgattagtgatgttaatcattttttaatatacctgcyggtcatttgtatgtctttgttttggaaatgtctattcagattctttgcccatgttttaattgggttatgtgtttccttgctattgtattgtacgttatattttggataactccttataagatgtatggcttggacatcttttctcccatttcataggttgtctcttcacactattgattgttacctttgctgggctgaaggtttttaatttgatgtaatatctattgcctgtttttgcttttattgccagtgcttttaagttcatatcctaaaaatattcgctgagactaatgtcaaggag

SEQ ID NO: 598059 - DNA, 480 bp, Homo sapiens
ttatgccaataccattttcttttggttgctgtagatttaaagtcaaatagtgtgagacctctaactttttgctcaacattgccttggatatttgggatcttgattagttctatgcaaattttagaaattatttcctatttctgtaaaaaatgttattgtaattttcatatgtattgtgttgaattttttttggatagtactatggcttaagtgtgtcccccaaatttcatatgtygaaaacttaaccccaaatccaataatgttgggagatgggacctaataagaggtgatttggtcatggtcatgagggctctgcccaaataaatgaattaatttcattattggaagaaatagttttgttataaaaatgaatttggcttattttgcacatgtgcatgtgttctcctacccttccaacatgagatgacacagcaagaaggccctcaccagatgtgagcgccttgactttgtactttccag

SEQ ID NO: 598060 - DNA, 477 bp, Homo sapiens
agtgtgagacctctaactttttgctcaacattgccttggatatttgggatcttgattagttctatgcaaattttagaaattatttcctatttctgtaaaaaatgttattgtaattttcatatgtattgtgttgaattttttttggatagtactatggcttaagtgtgtcccccaaatttcatatgtcgaaaacttaaccccaaatccaataatgttgggagatgggacctaataagaggtgatttggtcatggtcatgagggctctgcccaaataaatgaattaatttcattattggaagaaatagttttgttataaaaatgaatttggcttattttgcacatgtgcatgtgttctcctacccttccaacatgagatgacacagcaagaaggccctcrccagatgtgagcgccttgactttgtactttccagtcttcaggactgtaagaaataaaattgacatacttattttaattt

SEQ ID NO: 598061 - DNA, 645 bp, Homo sapiens
acagtcaaaccatagtattcaccaacaaatttttgggctgtatcttaaaaatatatcacaaatcttactacttaccactactggtccaatctactattacctctattctgtattaatatagtacctccaaatttatttcagaaaatattcaagcatggaatcttgcagttaattttcaaacaaaagtcagggtgaggcttgaaaaatacaaatcagctcatgccctgtctcatcttaaatacctgaaatgtcttctcatcaaacttaaaagsctttatcataacctccaaggtaatgttcccttattacacttcttgcccactcctctccaaacacactgatctccctgtttcttgaaaattccaaataaatatcattgttccgggcttttatgcatttgtctctgcctgttccccagctagtgatatagttcatttcctccttaattatggtctcttttcaaaataattagagttatttgctaatcacttcatgttaaaaagcaccccatgttgatctctaccctttaccttgctttagttttgtttctttgtttgttgtagtattcattagaatctgacactgttttgtgcacagtatgtgtgtgtgtatatattattcatactgtcacaatccaaagaaaat

SEQ ID NO: 598062 - DNA, 638 bp, Homo sapiens
acacttcttgcccactcctctccaaacacactgatctccctgtttcttgaaaattccaaataaatatcattgttccrggcttttatgcatttgtctctgcctgttccccagctagtgatatagttcatttcctccttaattatggtctcttttcaaaataattagagttatttgctaatcacttcatgttaaaaagcaccccatgttgatctctaccctttaccttgctttagttttgtttctttgtttgttgtagtattcattagaatctgacactgttttgtgcacagtatgtgtgtgtgtatatattattcatactgtcacaatccaaagaaaattccacccaagtaaagcacatgcttttcctccccacaagatcaatccatagtcttcagaaatatgcctgcacacagtaggttctcaaaacttttttgtgggataaaaaattaatcttccatttatgtggcactttatactttgtggaacagtttcacctatatgtgaacagtttcaccagtatgaaacatcacaactttaaaactgaaactgaggagagaaaataatctgctaacatgatgtaaccattgagatgcagaaatgaagctcactcttaactcttttattgttgttagggtttc

SEQ ID NO: 598063 - DNA, 483 bp, Homo sapiens
ttttgggctgtatcttaaaaatatatcacaaatcttactacttaccactactggtccaatctactattacctctattctgtattaatatagtacctccaaatttatttcagaaaatattcaagcatggaatcttgcagttaattttcaaacaaaagtcagggtgaggcttgaaaaatacaaatcagctcatgccctgtctcatcttaaatacctgaaatgtcttctcatcaaacttaaaagcctttatcataacctccaaggtaatgttcccttattacacttcttgcccactcctctccaaacacactgatctccctgtttcttgaaaattccaaataaatatcattgttccgggcttttatgcatttgtctctgyctgttccccagctagtgatatagttcatttcctccttaattatggtctcttttcaaaataattagagttatttgctaatcacttcatgttaaaaagcaccccatgt

SEQ ID NO: 598064 - DNA, 575 bp, Homo sapiens
gatactaaattttatcaaatgccttttctgcatctattaagaacatcatgtgttttttccttaattmtgtgtatgtgatgaatcatatttattgcatatgttgaaccatcctcacatccctgaaataaaatccatttgatcatggcatattttctttttgatgtgctgttgtatttggtttgatagtattttggtgacaatttttgcatttatgttaatcaaccatgtactacaaatccatagccaacatcttactaaatggggaaaagttgaaggcaatccttctaataactgaaacaagacaatgatgcccactttcacgacgtctattcaatacaatactggaagacctagccagtgctatcaggcaagagaaagaactaaaagacaaacaaattggaaaagaggaagtcaaattatctctgttcactaataatatgatttaaaacaactctataaattaagagcagattaagtacagttagaaagaaaatgacttacaagatatttaagcggaaatgttatgcagcgctctgctaaaggagataaggagacaaaaacaaaaaaggattaag

SEQ ID NO: 598065 - DNA, 618 bp, Homo sapiens
tttcagtcaaaattgtaaggagtgtgaccgagataaagaggctatagagaaagaaaagagaaacctaggtgtgaagactggttgactgttcacttagagttaatatgtactcaggtaaggctattacattgtacacatctaggaagcaccattcacatagaataccacatagatagtgcttctcagagttgtgcaatggagtggttctaccactaggtgtataatttttccatctttctctcaaatacagagcatatctagctaaaattcttggctcagcaatagattcaaagcttgtttcatctaaaaaagttgaagcacatcttctttagtttcctttcataatatgttagcatgtataatgaaggtccataggcagacatggagatgtctgagccatagctaatgtattttcatacctgctttcyctatgagataaataagaaagacacatgaaatgtggtctaacaatcaaagacaggtttattttagagaaataaacctgagaggggcttctggccaattttggtcaggagtattctcccttacagactaagagtatatattggttttagggtgacagggcccatcacaagcttggaatgtttctgtgtgggg

SEQ ID NO: 598066 - DNA, 597 bp, Homo sapiens
aagattaagagattcccctaaaacacacaactacatggaaactgaacaacctatttttgaatgactcttgggtaaataatgaaatgaatacataaattaaaaagttcttaaaactaacgagaacaaagaaacaatgcactagaatctctgggatgcagctaaagcagtgttaagaggaaaattcatagcactaaaatccccacatcaaaaagctagaaggatcttaggttaacaacctaacgttataactaaaagaattagagaaacaagagcaaacagacccsaaagctagcagaagacaagaaataaccaagatgagatctaaagtgtaggagaggagacacaaaaaactcttcaaaatataaacgaatccaggagctgttttttttttgtaaaaattaataaaatagactgctggctagactaataacgaagaaaagagagaacattcaactgaacacaatcagaaatgataaaggggaattttaccactgaccccacagaaatataaacaaccatcagagaatactataaacacctttatgtacacaaactggaaaatctaggagaaaacgataagttcctggatgcatacat

SEQ ID NO: 598067 - DNA, 597 bp, Homo sapiens
aagattaagagattcccctaaaacacacaactacatggaaactgaacaacctatttttgaatgactcttgggtaaataatgaaatgaatacataaattaaaaagttcttaaaactaacgagaacaaagaaacaatgcactagaatctctgggatgcagctaaagcagtgttaagaggaaaattcatagcactaaaatccccacatcaaaaagctagaaggatcttaggttaacaacctaacgttataactaaaagaattagagaaacaagagcaaacagaccccaaagctagcagaagacaagaaataaccaagatgagatctaaagtgtaggagaggagacacaaaaaactcttcaaaatataaacgaatccaggagctgttttttttttgtaaaaattaataaaatagactgctggctagactaataacgaagaaaagagagaacattcaactgaacacaatcagaaatgataaaggggaattttaccactgaccccacagaaatataaacaaccatcagagaatactataaacacctttatgtacayaaactggaaaatctaggagaaaacgataagttcctggatgcatacat

SEQ ID NO: 598068 - DNA, 489 bp, Homo sapiens
acttttacaacaatatattttaatataagttgtcacattgtatttttgtctttaaaaataactatatcacattttagcagtgagacttgtggaaaattaactccatgactaatactgcatttgtccgaaaaaaagactattagaataaatggcttatttttgtaatagcagtgttcaaaaacaaaaagtaatcttcttgaaagtaactaatggaattgtaagatgattcataaacataacatttttcctaatattattttaagaaaattaktgataggcctcagtttcaacaaagtaactgaataaatttataaggaattaagaaaaaaagacaaatcaatcgaatataattaagtgatcttgttataagaggattcttaaaacaatgctatgtattaattttgagtgtatcaaattctataatctgagctcttgttagaaaaactccacctatccattccttaagatttttctttataaagcaataca

SEQ ID NO: 598069 - DNA, 590 bp, Homo sapiens
ctcattcatttgctaaaagtcacctaacaagtaaatgtaagaataaaaccatgaacatcttcactcactgggaagagggtgaacaggatggagctgagacaatgtagttcactcaatcagcttaaaatactttatagacaatgttactatcagttgagaaaaagcagaaatattaaataggcaatagttatttaaaaagtcaaatgttaattaagcaatagtttctttccttttacattacacactaacayataacatgcatagccacatccacatctcagaacttttgggtaacgtataaacattccatcctggccaatggtgattcacatcattggtgataatgagcattggaggctaaatgcatttcatcacaatacaggttaaaatgatgggagttctcattgttcacctcccacttatgagtgagaacatggggaacaatacacacccgggcctgtcaggggttggtgggcacggggaaggacagcattaggaaagatacctaatgcatgcagggcttaaaacccagatgacgggtcaatagcggcagcaaaccaccatggcaaatgtgtaactaagcaacgaac

SEQ ID NO: 598070 - DNA, 472 bp, Homo sapiens
ctacagccatcagaacaaaaacatcatcacatgtcacatggtttttggaaaaccccattgttcacttctgagataattaaagtgaaaagtacaaataacatcttaatattatcagaaaaatatttttttcattttggacttcccgaaaggatcccaagggtcatgatacacacttagcgagctgttgccctggactgttttatcattgactgcttctcacttaagtctctgcatcctcagacaggcttttgaaccacaaaatctgaagtagtcttagagcctgcttcagttattctctaccattttawtatattataatttcttatcatttgtcactcttggaaattatattaatatttagtatatttattaatcatttattttttaactttgacccttgtagtatgtcacttccatgaaaataagtacttgatctgtcccttaggcttgacacaaggaaggctctccacac

SEQ ID NO: 598071 - DNA, 470 bp, Homo sapiens
ataagcaattattctacagccatcagaacaaaaacatcatcacatgtcacatggtttttggaaaaccccattgttcacttctgagataattaaagtgaaaagtacaaataacatcttaatattatcagaaaaatatttttttcattttggacttcccgaaaggatcccaagggtcatgatacacacttagcgagctgttgccctggactgttttatcattgactgcttctcacttaagtctctgcatcctcagacaggcttttgaaccacaaaatctgaagtagtcttagagcctgcttcagttattctctaccattttaatatattataatttcttatcatttgtcactcttggaaattatattaatatttagtatatttattaatcatttattttttaactttgacccttgtagtatgtcacttccatgaaaataagtayttgatctgtcccttaggcttgacacaag

SEQ ID NO: 598072 - DNA, 467 bp, Homo sapiens
gcaacaaattccccgagatcagaatctttgcttctgtgcctttccttgtctgctctgcagctatcactgtccacgtacataaactctttaaacctcattttccactttcataaaatagaattaattacctttatcatgtgggtgttgagtattaagtgagttgatacattaagcacttaaagcattgtaagcatatagtgatttattttatgtaagctgaaacatacaaattatgtttacataaattacatttaataacatactaatatycataaatattattaataaattgttgataaatatttataataattataaatattatgcttgatatactaatatttacacttaaaaagttataaaaccaaataaaaataacaacttatcataaatgttataaataaagtaatgagcaggcagtgagggagaataaaaggttgagaaagcagagaaggcctcccgctagg

SEQ ID NO: 598073 - DNA, 614 bp, Homo sapiens
tatagtgatttattttatgtaagctgaaacatacaaattatgtttacataaattacatttaataacatactaatattcataaatattattaataaattgttgataaatatttataataattataaatattatgcttgatatactaatatttacacttaaaaagttataaaaccaaataaaaataacaacttatcataaatgttataaataaagtaatgagcaggcagtgagggagaataaaaggttgagaaagcagagaaggcctcccgctaggataaaccaatatttaaactggatagggaaaggtgagaaagtagaagaaaagatgttcaatgtagaggtttcaggattttgaatgggggccagatggtaaaagcttggtggttgaacggcatgaaaattgttattagacatgtaatgataatgggttcatggaagtcattcagggcatactatagctatggattttggatttttaagtgttttargatgctggtgattataagcagtagagtcacaagaggaagcaggaagtcaaaatgggacacaacagtattagtccaggcaagaaatgaagataatggactagagacgtgacattaaagatacataga

SEQ ID NO: 598074 - DNA, 544 bp, Homo sapiens
acaaacaagcaagtttgtttctttccctaacaagatgtactctaattagtggccatgatcattacaccatgtttgagtcccaggaggtgattgactatcacaagtcctgctttcactaccaggccaatggatacatacwctcatttttattgcttgagattaaagtgttaagcattatttagtttagcaatttcaaatttgataattgtcttgtttattgtcactatttaaaggaaaacaaatacactgtcagtgcagattgtgaatgttaattagtggtgttactgtcaaaaggaatttgaatagacagaagtattgtagaaacaccttcagataaaatatgattcatggaataaaattattataactttatcaaaataataatccacagacatacaaggattcttctgggccaatgttttccccctttccttcacacactttggtaatttatgtttatggcttagtcttatagttcaaaaagatactaacttttaaacaccaagccgtatagcagcatattcaaataaataatttaaatatc

SEQ ID NO: 598075 - DNA, 591 bp, Homo sapiens
gctgctggttcatagaccacactttaaaaatcatggcagtagacaaygtgaagtgtccatttacacactattttaccagaagccaaaactacatttcaaggacaagcttgttcatacttagttctgtggtattaataacaactgaaatatctgatatgtcagcccaatagaattgctataagattttctgggtcttgctaataaatttagactgaactaatgttcagaaattatgtgagataactttataaaatgtagtttaacatataatggtcaacagtgttttgcagttataatacaattcttcttaaatattgagtattttgtcttcacaatatacctaagtgataaagtataatcactaacactgaggaaagagaaacccaaggcaagtggccaccatcacaggtcacttaggcagcaggacaacacacatccaggccttcccatgccacatccaaatcttctcttccattagccgaccttgacattggactgtattccactaattaactaaaactaaataaagaaaaatgctacttagctactgaaacagctaagatagccacattctgattttgattttaatat

SEQ ID NO: 598076 - DNA, 640 bp, Homo sapiens
aaagaaataaagagatgttcaactcactagaaattaaaaaaawgcaaaggaacaactacaaaattatattatttttacctattcagttaccaaaaattaagaagtctggcaatttaaagatcgaagggggtataaacaattttatctggtataaattagtacaactacacaggtaaacaatcttacctggtataaattggtacaactccctaggtattatcaagaaagtttaatgttcatgcatcatataatccagcaattcccttcctacaatgcttctcaaactttaatgtgcatattaattgaccaaggatcttgctaaattgcaaactctcaggtgtgagccgaggttacatagttttagcaagctcccaggtgatgcccatgcagcctgtcaacccacactttgagtagcaagataaacccaatacaaactttgcatttgggcaataggagatgtgagatgtatacaaaacacccttacaaatggcaaaagactgccaataatccaaacgtttattaatagaatagattacaaattgcgttgtccaatggaatattttactgcagtaaaaatgaatgtactgcgactaaacacaataacatgcatgaatcttggtaatagaacactgagtggata

SEQ ID NO: 598077 - DNA, 412 bp, Homo sapiens
gatggttttataaggggctcttcccccttcacttccatcacacatgtaagacatgcctgcttccccatttgccatggcctccccagccatgcagaactgtgagtcaattaaatctcttttctttataaattacccagtctcaarcagttatttataacagtgtgagaataggctaatgcacctttccaatgcaaccttcagttaatctgacatgaatgacctcaacgttttcgaagtctttttgcttcctctcttcctccatattatgagttgaattatgtccccatatattcatatgttgaagtcctgactcccagaacctcagaatgactttatttggaggtctctgtaatgacagggtccagaacctatattctcaaccacttgtacactgtccttatcagtttcccag

SEQ ID NO: 598078 - DNA, 613 bp, Homo sapiens
tttgcctttatctctagtctctttatctttccccagaaataagaaacaagtggaattagatttcactgaaaccttgaaaaagctgttggagatacacttcagtgctatttgtaaccatgatagattattctacactcggctccagagaagtctttcattcttgaattttttactgtacctaattcttacttcagagatgaaatatcaggcagcagtctgtcaggttccaaataattcttttaatgtagaagttaaatgctttctttgtttcccaagtaaacccatttagcacctgctgagctgataagaaaattccagttgcctgagtccaggtctcctgagaagatgagaatgtttagcttaagatagaaaaattctctttcattcatacctttccaatctcaagtttagagtgagracaaagcttaaaggtttgattgtttatctaaagtgtgagttttggtggtgatggctgcttcttcactgtattcttattcttattctcctcttcctccttttcctcctctttctctcccttctcctcctcctccttttcttcctgtcctttttcctcatcttcatctttgctttcatctttatcaaggactacata

SEQ ID NO: 598079 - DNA, 613 bp, Homo sapiens
tttgcctttatctctagtctctttatctttccccagaaataagaaacaagtggaattagatttcactgaaaccttgaaaaagctgttggagatacacttcagtgctatttgtaaccatgatagattattctacactcggctccagagaagtctttcattcttgaattttttactgtacctaattcttacttcagagatgaaatatcaggcagcagtctgtcaggttccaaataattcttttaatgtagaagttaaatgctttctttgtttcccaagtaaacccatttagcacctgctgagctgataagaaaattccagttgcctgagtccaggtctcctgagaagatgagaatgtttagcttaagatagaaaaattctctttcattcatacctttccaatctcaagtttagagtgagaacaaagcttaaaggtttgattgtttatctaaagtgtgagttttggtggtgatggctgcttcttcactgtattcttattcttattctcctcttcctccttttcctcctctttctctcccttctcctcctcctccttttcttcctgtcctttttcctcatcttcatctttgcyttcatctttatcaaggactacata

SEQ ID NO: 598080 - DNA, 572 bp, Homo sapiens
tggaagcagaaattgtagtctgttattcccagtgctataattcagggtctagaatagtttctggcactcacttaggagttatttgttagatttgtagacatttatggtactaaaggtactgggatattatttatatctctcaggatttctaatctcttaaggaactctttctcctctcctctcctctcctctcctctcctgtcctctcctgtcccctcatcctccccttccagcctcctcctctctcmttctcctcttcctttctcctacttttccctcccttctccgtctccttctcctcctctcctccctgcacttcccttccctcctctcctcatcatctgtcttctctgtctcctgtctctctctttctctttctcacaaaagctacatttgcttgttagtttgccttcttataagttgacaactcagtgggaaggcacagggtgaaattttcccttccagacctttgtctagggctcaccattttcacctttgtaataatataaaatagaaaattaacatttaggtatggtcttggggaaaagttaaggctgcctttagtgttatta

SEQ ID NO: 598081 - DNA, 577 bp, Homo sapiens
ctatggaaagttctaaattttaaaggacaacaaggctgtatttcagaggtgacagagtgaaattctatgccctgccttccacttcaagctcaagtaactcctgactaacatattgtaatatagcagaaagaacagttttgaatacttctgccctaggatctgctctcccaagaagcagtgggaaaaatagttgagatcagaagtcataaytcagtaaaaaatgtagagcagatttgctcagagtgttatgcttggccagtttgaatctgcaacaccctggagccgtgataaaagtgcaaatttctaggctccctcacaagcctaagtcagaacctctgaagttagggctcagcaacatgaaattttgacaagctgtcaggatgattctaaactgtaacaattccttaggtaagggtagtgaaaggatattaaaatattctagaaggaaccctcatttaaaaattggcttctttttatttttttgtggggattattaatagaaaacattgtttttgaaatccgagtttagattattgttcttgtcttctaggaattcagaaatttgtaaagaatatgg

SEQ ID NO: 598082 - DNA, 577 bp, Homo sapiens
ctatggaaagttctaaattttaaaggacaacaaggctgtatttcagaggtgacagagtgaaattctatgccctgccttccacttcaagctcaagtaactcctgactaacatattgtaatatagcagaaagaacagttttgaatacttctgccctaggatctgctctcccaagaagcagtgggaaaaatagttgagatcagaagtcataattcagtaaaaaatgtagagcagatttgctcagagtgttatgcttggccagtttgaatctgcaacaccctggagccrtgataaaagtgcaaatttctaggctccctcacaagcctaagtcagaacctctgaagttagggctcagcaacatgaaattttgacaagctgtcaggatgattctaaactgtaacaattccttaggtaagggtagtgaaaggatattaaaatattctagaaggaaccctcatttaaaaattggcttctttttatttttttgtggggattattaatagaaaacattgtttttgaaatccgagtttagattattgttcttgtcttctaggaattcagaaatttgtaaagaatatgg

SEQ ID NO: 598083 - DNA, 639 bp, Homo sapiens
cttgtcttctaggaattcagaaatttgtaaagaatatggtaaaaattactttggggcactatcttgaacattaagagagtgaatatgttaaaggtaatgcaattagttggctattaaatgacttaaaaagccaaagaattcaaatagtcttgcatgaagtttatagagttgaacagaaatcctagaaatgagtgtagagagtgagttttcaatttatgaagccaayaggttaaggccattttcagcagttgaaaataaatttaacagtgaagatatttattgccctttggctgaaaacaatgtttagaattaagttgcctggctttggagaaatctgtaaaatgtatagtagattatgtggccagttctttctaactttcaaatacttgaaataaaatctgcagttttctacatgagggagaaaagtgcttagtggtacatattcctggccaaatcactttagaatccaacagctttactttacaagaattcttttctataaaatgtgcattcttgttcaatttccctccctccattttccttctataactttataatctttagtcagattttaagcaaatataacaataacttcaactataatagaaaatatacaagatataaataaaggctgtgtca

SEQ ID NO: 598084 - DNA, 487 bp, Homo sapiens
ttggggctgaggacataccagyaaattcagaaaactgcacaaaatttgataaggttgcagcaggagacctgtagttgtgggtaggaaagagtcctggaggggcaaacaaggggaagattcctgtgcacaaaaaaagaagcctagtttattattattatttttaatcaggtctttatatatttctgggtagaagacaatcacttctttacctgtctcaacttcagactcttcctatgcatactgaaccgacctggcttgtagtcttattgggactcagtagcccacaagtatttcttctgtctttatccctgtaaatccagggtgaaaccttgtggcagatgcttgtttttggtttaggattcatttgaagtagccgccagtgaagactgtgtcagtgggagcttctagtctcagttatgtttagtagtgatgactgactgcctggtcagattatctctctttgtcaagagcctctttgtcatctgcc

SEQ ID NO: 598085 - DNA, 542 bp, Homo sapiens
tcagtttgtcccatggcaagaagtggttctccagagagatgtggtcacagtgatttcactggttatcactcatctgattaaacgatattcaaagaatatatggcagctagatgcagccagtggtgagccttaataggaggattcaacctccagctttscaaaataaaagcatgctatctttagtaagtaattattatccttttcggaccttaggggagactgaacaataatttgatgttaactgcccataaactcagtattgtctggtctatctagcctaatctgaattgcccagcagtgctgattcagcaagtacatgatataaatggaaatgagaccaaacggattctagtcctatggcactgctgcctttctggtaaatcacacttatgacctcatagaggttttctctataacttgaaagagtataaataccatctgatgatagttgacaagatataatacgcaggaactgattgcaaaaatatagctctgattttggatggcctggaagggcagttttgtaagatgttaagatgtta

SEQ ID NO: 598086 - DNA, 449 bp, Homo sapiens
ctagcctaatctgaattgcccagcagtgctgattcagcaagtacatgatataaatggaaatgagaccaaacggattctagtcctatggcactgctgcctttctggtaaatcacacttatgacctcatagaggttttctctataacttgaaagagtataaataccatctgatgatagttgacaagatataatacgcaggaactgattgcaaaaatatagctctgattttggatggcctggaagggcagttttgtaagatgttaagatgttaaggataacaaggataaggatatacaagaatacatytgggattcagtgaaatctcaacattattggagatattatgaatctaacagtattttttttcagcattctgaagacattgtgtcttgtatgagagctcatctgaagtgttttggagatgagctgtaaactgattggcgtctaagc

SEQ ID NO: 598087 - DNA, 449 bp, Homo sapiens
ctagcctaatctgaattgcccagcagtgctgattcagcaagtacatgatataaatggaaatgagaccaaacggattctagtcctatggcactgctgcctttctggtaaatcacacttatgacctcatagaggttttctctataacttgaaagagtataaataccatctgatgatagttgacaagatataatacgcaggaactgattgcaaaaatatagctctgattttggatggcctggaagggcagttttgtaagatgttaagatgttaaggataacaaggataaggatatacaagaatacatttgggattcagtgaaatctcaacattattggagatattatgaatctaacagtattttttttcagcattctgaagacattgtgtcttgtatgagagctcatctgaagtgttttggagatgagytgtaaactgattggcgtctaagc

SEQ ID NO: 598088 - DNA, 605 bp, Homo sapiens
agtgcccacagcttgcaagagccttcagaacatatgaaaatatttagtttcttttaaaataaagagaatgtggtaataataatatatgtgcaataatcagtcaaacctggattacattcttttctgtagcaacaagycataaaatagagtttaattaattttttatgaagaaaggggtccatggaagtcttaatgaggtcctgcctacaagaacattattgatgataacagatctccccccacaaatgtcatagaataactttctgtcctcacagcctactcagcatacaattattacagaatatgggggaagaagagattttagcaagaaataaaatgaaataaataaaatactgggataaaaagggcaatattatacaaatgttatggtgctaaccgacattctcacaggcattatgactgcctactgacaaggtggctttgcagatgtagtttgacatgaactctagaaggacaaagtgttcactataactcttaaattgtgatgataatattttagtgatcctgctaaatgtatcatatttaagtggccatttcaaatacctcatattcttatctgaaaactctaaatttaaaactgactt

SEQ ID NO: 598089 - DNA, 605 bp, Homo sapiens
agtgcccacagcttgcaagagccttcagaacatatgaaaatatttagtttcttttaaaataaagagaatgtggtaataataatatatgtgcaataatcagtcaaacctggattacattcttttctgtagcaacaagccataaaatagagtttaattaattttttatgaagaaaggggtccatggaagtcttaatgaggtcctgcctacaagaacattattgatgataacagatctccccccacaaatgkcatagaataactttctgtcctcacagcctactcagcatacaattattacagaatatgggggaagaagagattttagcaagaaataaaatgaaataaataaaatactgggataaaaagggcaatattatacaaatgttatggtgctaaccgacattctcacaggcattatgactgcctactgacaaggtggctttgcagatgtagtttgacatgaactctagaaggacaaagtgttcactataactcttaaattgtgatgataatattttagtgatcctgctaaatgtatcatatttaagtggccatttcaaatacctcatattcttatctgaaaactctaaatttaaaactgactt

SEQ ID NO: 598090 - DNA, 605 bp, Homo sapiens
agtgcccacagcttgcaagagccttcagaacatatgaaaatatttagtttcttttaaaataaagagaatgtggtaataataatatatgtgcaataatcagtcaaacctggattacattcttttctgtagcaacaagccataaaatagagtttaattaattttttatgaagaaaggggtccatggaagtcttaatgaggtcctgcctacaagaacattattgatgataacagatctccccccacaaatgtcatagaataactttctgtcctcacagcctactcagcatacaattattacagaatatgggggaagaagagattttagcaagaaataaaatgaaataaataaaatactgggataaaaagggcaatattatacaaatgttatggtgctaaccgacattctcacaggcattatgactgcctactgacaaggtggcttygcagatgtagtttgacatgaactctagaaggacaaagtgttcactataactcttaaattgtgatgataatattttagtgatcctgctaaatgtatcatatttaagtggccatttcaaatacctcatattcttatctgaaaactctaaatttaaaactgactt

SEQ ID NO: 598091 - DNA, 553 bp, Homo sapiens
gtttgtatatataatatgagggaattttttaaagtaacagcttttacattcccattctaagctttgaaagtcaataagtgcaacttaaaatttttttctccgtcactgtcagctcacaacatccaatatatatatgtctgtttttagcttacattgtcttcaacttctgyatttttaatacataaataaatccccttttttattcatttggaaaatgtttgccaacatgtagtatagcagttaaaactgaaggctctggcaaaagcatatgccttgggctgaaattctagacccaaaactatctgaaactccctgcatttctgatttctcatgtggattaaaaggtgatcttctatacaggatggctgggaggatgaatgaaacaatgtttataaagcatttaatatagctactgatatatgataaatacttaaatgtaagtcacagttattaacaacacatatctatcacatatcaaagggaatagcagagttaataggcacaaaacatgtattattcctcattgacactttataatgatattagggttaat

SEQ ID NO: 598092 - DNA, 631 bp, Homo sapiens
gttcaattgttacctctaaagataacttttcatagtcatcctattttcttcacaatactcatcatttttggaaataacttgtttttctttcagtagttttctcacctcaaattgtatttctcttactgaagtataagctccttaaaaacaggagcatgtctatttcctaatttacccccaytgcttagaaagtgcttggcatatacattaagtaattttgattgaggaaaataacaaaagataaaaacaagggtgaagcacagtggactgcgctatcaatcaatactaagaatgtgttatatcttgtcataatttattttcatcttttttagaataacaacattctggaaatgcacgaagatacgttctgcaatgttaaaaatttgacttatattcgtaaggcactagaggacattcgattggatggaaaccctattaatctcagcaaaactcctcaagcatacatgtgtctacctcgtctgcctgttgggagccttgtctaatttcagataatggttagcattacgatggctactataaataaaccattcttactgctctcttccaaaacaaaactcagcatgatactttgagattgtgttctgagagatgatatgactacataaaatac

SEQ ID NO: 598093 - DNA, 631 bp, Homo sapiens
gttcaattgttacctctaaagataacttttcatagtcatcctattttcttcacaatactcatcatttttggaaataacttgtttttctttcagtagttttctcacctcaaattgtatttctcttactgaagtataagctccttaaaaacaggagcatgtctatttcctaatttacccccattgcttagaaagtgcttggcatatacattaagtaattttgattgaggaaaataacaaaagataaaaacaagggtgaagcacagtggrctgcgctatcaatcaatactaagaatgtgttatatcttgtcataatttattttcatcttttttagaataacaacattctggaaatgcacgaagatacgttctgcaatgttaaaaatttgacttatattcgtaaggcactagaggacattcgattggatggaaaccctattaatctcagcaaaactcctcaagcatacatgtgtctacctcgtctgcctgttgggagccttgtctaatttcagataatggttagcattacgatggctactataaataaaccattcttactgctctcttccaaaacaaaactcagcatgatactttgagattgtgttctgagagatgatatgactacataaaatac

SEQ ID NO: 598094 - DNA, 561 bp, Homo sapiens
tggcaagagctataaagaaacaaatgtggaggktgtgtagactataatgggaaggaagagggtctaccttgatgtggagggggtcaggggaagcctcttttgaggggatatttatgcagaagtttaaaaagtgaggcagccattctaaagtgtggaaacaaatattaagtgcagtattttgaggatacactgatttggcttgattccagaacagaaaggtcacccacatgactgaagtagagtgactgaggaagaggtgcttgacctaagcttggaaaaatagggaggatctagctgatggggagctttgcaggccatggcttgagttttgatttcactcaaagagaaatgtgaagctattcaatgtttgcaaagaaaaaaaaatgtgggcaaaggatatgagcagacacttctcaaaataagacatctatgtggccaataaacctgtgaaaaaaagctcaccatcactggtcattagagaaatgcaaatcgaaagcacaatgtgataccatctcacaccagttagaatggcgatgattgcaaagtcaggaaacaacagat

SEQ ID NO: 598095 - DNA, 561 bp, Homo sapiens
tggcaagagctataaagaaacaaatgtggaggttgtgtagactataatgggaaggaagagggtctaccttgatgtggagggggtcaggggaagcctcttttgaggggatatttatgcagaagtttaaaaagtgaggcagccattctaaagtgtggaaacaaatattaagtgcagtattttgaggatacactgatttggcttgattccagaacagaaaggtcacccacatgactgaagtagagtgactgaggaagaggtgcttgacctaagcttggaaaaatagggaggatctakctgatggggagctttgcaggccatggcttgagttttgatttcactcaaagagaaatgtgaagctattcaatgtttgcaaagaaaaaaaaatgtgggcaaaggatatgagcagacacttctcaaaataagacatctatgtggccaataaacctgtgaaaaaaagctcaccatcactggtcattagagaaatgcaaatcgaaagcacaatgtgataccatctcacaccagttagaatggcgatgattgcaaagtcaggaaacaacagat

SEQ ID NO: 598096 - DNA, 500 bp, Homo sapiens
ttggtttatatagaatacctgcctgaccccatgctcagagaatgtgtgcatttacatggaatcgatctagtagaagcatgggatacyttacgtagaaggaggagacaactgaataaacacaacccttgagaagagaaaagggaataggagcctaggaatgggaatttattttttacttcttgcactgttgtaacagggaagtcaaagaagatacgcagaagtgcaggtgaatttgatagtggaaagttaactatttctctgatgacttctatcttttcagtgcagagaaatggaatataggatctttgaagacagaaattatgttataaaatattcatcttaatgttggaaaggggatcaacgttagaaacacactagatctgccagccaaggttgaagcttatctgaaagaacttgaagtgaaaccaattgtcattgtatgtgatcttcactagtaatatacagtttctcagatgcagaatgggagacacttgggagtt

SEQ ID NO: 598097 - DNA, 596 bp, Homo sapiens
caaatgataacagtaccctactggtaggttatataatgcctggtgataacaagctgatgggttcaacaatgatggtgagaggctgggtaggaatgtggtaacttctacaygtgagaagacaaagcaaccaccaggccaccatgatagatggatcacacatggaggttcatgtaattgtgaatgatgatggacatgtatggagggaatgaatgaaccagttgcaaaagtcatcaaccataaaagagctggacaaggatgtctagcagctgatgacagggaggatgttgtgggtaactaagccacatgttgagtttcagaatgaataatgtttttgaaaaagtaaagagatcatttcggagagaaaatgcagagcacaaaaaaactctccattcttaaattatgtgggggaggacgaacagccaaccaaccaccactttgaaaggactgcagaggaaaacctttgtcaggagacagccagattcttttaaggtaatggaaataaaggaagattttctgaaagaagctgagacaaatattgcagagaaggcttgaaagatactgggaggagaagattggataaaatcagcatggtacat

SEQ ID NO: 598098 - DNA, 596 bp, Homo sapiens
caaatgataacagtaccctactggtaggttatataatgcctggtgataacaagctgatgggttcaacaatgatggtgagaggctgggtaggaatgtggtaacttctacatgtgagaagacaaagcaaccaccaggccaccatgatagatggatcacrcatggaggttcatgtaattgtgaatgatgatggacatgtatggagggaatgaatgaaccagttgcaaaagtcatcaaccataaaagagctggacaaggatgtctagcagctgatgacagggaggatgttgtgggtaactaagccacatgttgagtttcagaatgaataatgtttttgaaaaagtaaagagatcatttcggagagaaaatgcagagcacaaaaaaactctccattcttaaattatgtgggggaggacgaacagccaaccaaccaccactttgaaaggactgcagaggaaaacctttgtcaggagacagccagattcttttaaggtaatggaaataaaggaagattttctgaaagaagctgagacaaatattgcagagaaggcttgaaagatactgggaggagaagattggataaaatcagcatggtacat

SEQ ID NO: 598099 - DNA, 542 bp, Homo sapiens
gagaaccaaattcctagatttatctaaagcataccagaatacaagatgcaactttcacctttctctaggacttatacaatgtaaaattgaggtatggaaatttaaagcatattttttctcttcatatttgtattaaagttcaattttacaaaccatggaagttaacaagagcttaaaataaagctyctattctaaggaaaaaatgtgtaatttgatttatttgtctatgatagatacaataactttttttaaaaaaagccccttttctccccaaaacacgcagatcatatttatgcatcacttctggatgtaatttttttaaagttatgcaaaaggttcatttttccctgttttgctatcaaagcattccatgcaatcaaaataattgggatatctttttttacttacccaatattaaacaggtaaggtttctgcaacatttaccaaatttcacttaacattaatgaaaagtgaagaaagcaattcaagacttcaagttttgggaaaattatttcttattagaactaaaatatccatctata

SEQ ID NO: 598100 - DNA, 594 bp, Homo sapiens
gaaatttaaagcatattttttctcttcatatttgtattaaagttcaattttacaaaccatggaagttaacaagagcttaaaataaagctcctattctaaggaaaaaatgtgtaatttgatttatttgtctatgatagatacaataactttttttaaaaaaagccccttttctccccaaaacacgcagatcatatttatgcatcacttctggatgtaatttttttaaagttatgcaaaaggttcatttttccctgttttgctatcaaagcattccatgcaatcaaaataattgggatatctttttttacttacccaatattaaacaggtaaggtttctgcaacatttaccaaatttcacttaacattaatgaaaagtgaagaaagcaattcaagacttcaagttttgggaaaattatttcttattagaactaaaatatccatctatagtatcactgtatacatgaacttcatttcttaattggtgartttgttacagatgaggtatgttaaatccaactttttccatttaaaaattttaaggtgatactttggcaattataactccattaacataatttcaagaactttgtatac

SEQ ID NO: 598101 - DNA, 588 bp, Homo sapiens
tttatttttgttattgactttgtatttatattattcttggaaaatccaaaattttgaattagcttaggaattaataacatacagcaaatagttaatctcagtagtcatgacagatgccaataaaattagagtagtttccaatatatgccttaagtaaagtttcctgacacagaccacattctttgccagtatagacaggcactattgattgatattaattgaaattttgtgaaaagggaggaaatagtgaaatttcctgagattaaaagtattgtaatgattacatgacattatgcatttaaaatttttttgagctatatattgaaagttttaaatacacaaattttaaaatattaakaaatggtataaagtgaacacaaaattaaagtgttaattaagaaactacattaaatgctaatacaattacttgaagaaaggaatataaattttttaactaaacatagatagatgctgtatatatttttaagattcacacagcctgccttatagttgatagctctaggagtgatgcaaaatgcaagcaaattctgagatgtagctatatgtaatcaaatatagtatgatgtg

SEQ ID NO: 598102 - DNA, 560 bp, Homo sapiens
tttgtgtgttatgtttataaattatccatggaaggaaagctaccagcttgagttctttgatattgacactaatttatcatttctatttagtgcaaactattcataagttatcaattaaatatttatgcattttaatattttataattaggaaagcttgaaaaatgaagacattagcaggacttgttctgggacttgtcatctttgatgctgctgtgactgccccaactctagagtccatcaactatgactcagaaacctatgatgccaccttagaagacctggataatttgtacaactatgaaaacatacctgttgataaagttgaggtaatcgatcctcctactcttgaaactttaaaaagcataggatgaggaatgacttgggtctgttttcctcaaatagatgtttgggtttttttataagtagaaagattttatgttaataatttcatattaacctttttctccaaaacatgttcaatcttttggaggttaatacyggaacagtcttttgcccttttttttttttttttttttttgagacagtgtcttgctccatc

SEQ ID NO: 598103 - DNA, 679 bp, Homo sapiens
tttctgttgagaatttatggttgataacaacaatcttggcctatgtgacttctacatctccaatgtgatgcatcaatgtagaatataagatgaaagtttttcagtggttaattcatctgccttgcttcttttttcatcttgcataaaaacacatttttttaaaaaaaagttagtgcatttctgaatttatctatcaaattaaacattttagttcaaacttatttgtcatttccccccaaactattccagaggatcagagagatttgatgatcactataactgaatcttctattttgagtaggttttgggaatggtttcaagggtgctatttattcctttcacaagtccaaatacacaatagaaaaaaaaatgctgtttgggatcatggcttctctaggcaaaaatgaaaaaaatgactatatctgcagagctcttttaamccattccttaccatcaggatcattttcactgcccataaagctgtaggcattctcatgaggttcggacatttttcatgacatcaagaaatttaagctaacaaacatatctgtataaacattacttaatatacaatattatcttagtatctgtgttttctggaacaacaacttcctgtggaatgccaaatataatgtgaaataccaaatataaagcattgcgtctttacatacttcagcct

SEQ ID NO: 598104 - DNA, 656 bp, Homo sapiens
ttgtcatttccccccaaactattccagaggatcagagagatttgatgatcactataactgaatcttctattttgagtaggttttgggaatggtttcaagggtgctatttattcctttcacaagtccaaatacacaatagaaaaaaaaatgctgtttgggatcatggcttctctaggcaaaaatgaaaaaaatgactatatctgcagagctcttttaacccattccttaccatcaggatcattttcactgcccataaagctgtaggcattctcatgaggttcggacatttttcatgacatcaagaaatttaagctaacaaacatatctgtataaacattacttaatatacaatattatcttagtatctgtgttttctggaacaacaacttcctgtggaatgccaaatataatgtgaaataccaaatataaagcattgcgtctttacatacttcagcctttaccacatacaaacaattctaattttacacagagtcctttctgagaaattttacttcaaaccaaacttagaatmctcagtgagtgagggatccagagagccactaacaatcccttgtggttgactgaaatatattagttatcccttacttaacattccttggtgatgaactcatgatcagaaaaaccagtttgtaggt

SEQ ID NO: 598105 - DNA, 617 bp, Homo sapiens
aaatttgaagcatgacagagattcaaagcaaagtgaactgtgtgttgatgacttaaaagatagaaggaccaatttggtaaggaatgtagaaggcctgtaaatggtgagagaaactgatggccagtaagcatatgcggtcctcaggcctacagacacaaggaactctgagctctgcatgagaccacagccctagacatcaccttgactatgaccttgcgagacccttgggagagaaggccagtcagatcaggccctgaactttctgaccctacagaaactgtgggctaaaaaaatgggtatagctttactaagtttatggcaatttgttatgcagcatgaaaaaattaaaacaagatagaacaacttaaaagttttttatctgaaaatcaaatttgaattattccactgtaagtgttgcatttgcatttgtgagtctagggatttasgtggtcaataagtcaaaccatccccaaaacccaggggaagaatctcaattgagctttgttgatttctactgatggtggtagatttattgcctcctgagttgttgagaaagggtcattaaattatttgtgtttgaaaattatattcagtaatataatttcaaactgattatt

SEQ ID NO: 598106 - DNA, 551 bp, Homo sapiens
tttatctgaaaatcaaatttgaattattccactgtaagtgttgcatttgcatttgtgagtctagggatttaggtggtcaataagtcaaaccatccccaaaacccaggggaagaatctcaattgagctttgttgatttctactgatggtggtagatttattgcctcctgagttgttgagaaagggtcattaaattatttgtgtttgaaaattatattcagtaatataatttcaaactgatkatttgtgtgatttctcatgatctagaatatctatgatccattgttttctatattagaagcaagttttagacccaacaatgccatcagagtgctatatattacccagtaagtacatttattggtgtgacataaaatggttgcagcttttactgcactttcattttactctagtgctgtgaataggaatgggttgtaggctatatgatcaaaatgtagactttttgctttctgataaactacagctaaccttaagtgagcatttattatgtgctaggtactgttctagtcatattacatatattatctcattt

SEQ ID NO: 598107 - DNA, 571 bp, Homo sapiens
ttgataaggataactgcagaacagaattttgccccgagttttcatctagtaagtttctgagtaaaatttaatccagtcttttaatgctaaaggagagagactttgcccctaaaagcccccattctttttctgcttcttctgttttatctttacttctttgagctgtgtccaatattgaggtttcttttctctgaaattaagtgatttgattattaagaatcagaaaaacaaacatttccaagtgattacaattaacacaatattcaaacatctctgttagctgtcaaagtgtttaaaggggcaagaggtaatatgatccttctgaactgaaagctgctttgtcaggaatatgaggattgagcaagctttgccaaatacatttcttcctcatctattttcaagataaaatagaamttaagatacagcttcattgccaggtattcatggttacggtcttttagataattaatgtagatcacggaaacaaatgtgagcaccaggctcatgtttaaagcagaatttcactgtgcttaacatatctatatgtcagtatgttaaacccataaaaata

SEQ ID NO: 598108 - DNA, 571 bp, Homo sapiens
ttgataaggataactgcagaacagaattttgccccgagttttcatctagtaagtttctgagtaaaatttaatccagtcttttaatgctaaaggagagagactttgcccctaaaagcccccattctttttctgcttcttctgttttatctttacttctttgagctgtgtccaatattgaggtttcttttctctgaaattaagtgatttgattattaagaatcagaaaaacaaacatttccaagtgattacaattaacacaatattcaaacatctctgttagctgtcaaagtgtttaaaggggcaagaggtaatatgatccttctgaactgaaagctgctttgtcaggaatatgaggattgagcaagctttgccaaatacatttcttcctcatctattttcaagataaaatagaacktaagatacagcttcattgccaggtattcatggttacggtcttttagataattaatgtagatcacggaaacaaatgtgagcaccaggctcatgtttaaagcagaatttcactgtgcttaacatatctatatgtcagtatgttaaacccataaaaata

SEQ ID NO: 598109 - DNA, 458 bp, Homo sapiens
acttaccaatcttttgctgagagccaagaattygggaaggcaaattagaccaaatctcttcctgtgccttggcattctcagtctagtagtcttataagtattttcagcacaatagaggaagtttaaaaagacacatataagatatatgtatacgagatctgtagctatctattggaatgtaagtttttatgagttcactcacaaaatacatatgctgagaaatgatgttcttgaatctgttattagttttaaatctggcagctaatctgagatataaagtatttactcatttatccatcaccttttcttaacagtatttaaggttacttacatgaataaatgctataatatgcacacaaattaacataaaaagatgaaaatataaatcttagttcaataattttatctcaaaatattatacataataaatgtattacatataattttctattatatta

SEQ ID NO: 598110 - DNA, 623 bp, Homo sapiens
aaatctcttcctgtgccttggcattctcagtctagtagtcttataagtattttcagcacaatagaggaagtttaaaaagacacatataagatatatgtatrcgagatctgtagctatctattggaatgtaagtttttatgagttcactcacaaaatacatatgctgagaaatgatgttcttgaatctgttattagttttaaatctggcagctaatctgagatataaagtatttactcatttatccatcaccttttcttaacagtatttaaggttacttacatgaataaatgctataatatgcacacaaattaacataaaaagatgaaaatataaatcttagttcaataattttatctcaaaatattatacataataaatgtattacatataattttctattatattatctgctatatcatatcttatatatattactgatcatgtgttatgaggtgacaaatacaaacttagaaagtgagacaaagaaaaaataacagttgggaacataatacaaagccaggagtcagatagatacatcaaaattgaaaccattttgtattataactcatagagattcatgaaaatagtaaaggttttctgggcagtaatgctaaattttagg

SEQ ID NO: 598111 - DNA, 623 bp, Homo sapiens
aaatctcttcctgtgccttggcattctcagtctagtagtcttataagtattttcagcacaatagaggaagtttaaaaagacacatataagatatatgtatacgagatctgtagctatctattggaatgtaagtttttatgagttcactcacaaaatacatatgctgagaaatgatgtwcttgaatctgttattagttttaaatctggcagctaatctgagatataaagtatttactcatttatccatcaccttttcttaacagtatttaaggttacttacatgaataaatgctataatatgcacacaaattaacataaaaagatgaaaatataaatcttagttcaataattttatctcaaaatattatacataataaatgtattacatataattttctattatattatctgctatatcatatcttatatatattactgatcatgtgttatgaggtgacaaatacaaacttagaaagtgagacaaagaaaaaataacagttgggaacataatacaaagccaggagtcagatagatacatcaaaattgaaaccattttgtattataactcatagagattcatgaaaatagtaaaggttttctgggcagtaatgctaaattttagg

SEQ ID NO: 598112 - DNA, 534 bp, Homo sapiens
tgctgagaaatgatgttcttgaatctgttattagttttaaatctggcagctaatctgagatataaagtatttactcatttatccatcaccttttcttaacagtatttaaggttacttacatgaataaatgctataatatgcacacaaattaacataaaaagatgaaaatataaatcttagttcaataattttatctcaaaatattatacataataaatgtattayatataattttctattatattatctgctatatcatatcttatatatattactgatcatgtgttatgaggtgacaaatacaaacttagaaagtgagacaaagaaaaaataacagttgggaacataatacaaagccaggagtcagatagatacatcaaaattgaaaccattttgtattataactcatagagattcatgaaaatagtaaaggttttctgggcagtaatgctaaattttagggaacccctatacttgctcccactattcctatctaaattcaggatcaggtgagaagaagaaatgggattcaca

SEQ ID NO: 598113 - DNA, 534 bp, Homo sapiens
tgctgagaaatgatgttcttgaatctgttattagttttaaatctggcagctaatctgagatataaagtatttactcatttatccatcaccttttcttaacagtatttaaggttacttacatgaataaatgctataatatgcacacaaattaacataaaaagatgaaaatataaatcttagttcaataattttatctcaaaatattatacataataaatgtattacatataattttctattatattatctgctatatcatatcttatatatattactgatcatgtgttatgaggtgacaaatacaaacttagaaagtgagacaaagaaaaaataacagttgggaacataatacaaagccaggagtcagatagatacatcaaaattgaaaccattttgtattataactcatagagattcatgaaaatagtaaagkttttctgggcagtaatgctaaattttagggaacccctatacttgctcccactattcctatctaaattcaggatcaggtgagaagaagaaatgggattcaca

SEQ ID NO: 598114 - DNA, 574 bp, Homo sapiens
tattttatgttgataaaggcgaggtgtaccccctaaatttaatgcatgacttcagtgtgaagcaagtaagagcttcctaatacaaaactccagaaataaactatgccatcagtcacaggcaatgctggccagccacaagcctcggacaaagtctacccccataaatctttgttcatgcaggggcaaaatgaaatgtatgcaattgatagtcaattatccccaaaagggaaggggaaccatctggggccagttccttctctcaatcatcaattagcttaggagtgagaaaagggatcaacagaggatctaagaagagatttgattgttccagaagaaagtcataagatggaaaccaacttgktttagcctcatccagatgttagtcagtttttatgtcccttgactctggtctgtaacctgtgtactcaaacacaatttggagaaatgccccaccaaaagttaaattatgatgccacatttgactaatattagagctgttcttctctaagtgtggtccctgaactggcagcatcagcatcacctgggagctagtcacgaatgcaaatactcagat

SEQ ID NO: 598115 - DNA, 589 bp, Homo sapiens
caacctcagcatattttcaaactgaagttgctgttgatatttttgaagtctgtgcccccrggagcctagtaaaaaacttaccacattctcctcaagactttgttcaatagttcaatgttccagacttaattagtgtttctgtctcctacatccgagtctgcatcacaagtcacttctctggtgcagtgattctcaaccttggtcacatatttgaatcagctctagagctttttaaaatcccagtgcctaagccataccctggactactgaaattggaatgatttgtggatgagacccaggtttggtgtttggctttcctcatctatattttcagtgtcacatgcagttgtttttaaaaaattaatatgcttcttaattttatctctttacttctctagtactgtgtcatctagaaaaagaactttctttttaagttattttttattttctttctgttccacaccttcattttcaggcatagttcactacatttcataaatcagtaacttatgaatctgctaaaagtaacactgtccaaaacattttggaaatcttcacatttctgagttggatattcttaattggatat

SEQ ID NO: 598116 - DNA, 589 bp, Homo sapiens
caacctcagcatattttcaaactgaagttgctgttgatatttttgaagtctgtgcccccaggagcctagtaaaaaacttaccacattctcctcaagactttgttcaatagttcaatgttccagacttaattagtgtttctgtctcctacatccgagtctgcatcacaagtcacttctctggtgcagtgattctcaaccttggtcacatatttgaatcagctctagagctttttaaaatcccagtgcctaagccataccctggactactgaaattggaatgatttgtggatgagacccaggtttggtgtttgrctttcctcatctatattttcagtgtcacatgcagttgtttttaaaaaattaatatgcttcttaattttatctctttacttctctagtactgtgtcatctagaaaaagaactttctttttaagttattttttattttctttctgttccacaccttcattttcaggcatagttcactacatttcataaatcagtaacttatgaatctgctaaaagtaacactgtccaaaacattttggaaatcttcacatttctgagttggatattcttaattggatat

SEQ ID NO: 598117 - DNA, 573 bp, Homo sapiens
gcatgtatgcaaatatatattatatactccattccttggcacgtttgagaagaacaaagaaatatatctaaaaaatattgagactggataaaatctttttttcagcgtgttctctctagagttataatatcaaaactctgattaaagacataaaattgaaagaaattaaatctaggccatttaagataaaatagtttattctacgataactacactgaatctgtaatgtataaaaggatagaatggacattgaagaggatcagtaaattttggaagtagagagaaaaaaagaatatcccagagggtaatgttgtcaagtcyaataaatcactattcagcagtcatcttttggcagggtgtttttttatcatgctaatgactgcaaaaactcatgagagctaatatatttaaagagttcgatcccttggaaaagagtccttcttttgccttatgctattatggagctgatttatcgtttgtacttgttctatggtcatcaacaatcttttgactataattagcttcccaagtgggactacctacagagaatgtggtggcactaagaggatgaag

SEQ ID NO: 598118 - DNA, 573 bp, Homo sapiens
gcatgtatgcaaatatatattatatactccattccttggcacgtttgagaagaacaaagaaatatatctaaaaaatattgagactggataaaatctttttttcagcgtgttctctctagagttataatatcaaaactctgattaaagacataaaattgaaagaaattaaatctaggccatttaagataaaatagtttattctacgataactacactgaatctgtaatgtataaaaggatagaatggacattgaagaggatcagtaaattttggaagtagagagaaaaaaagaatatcccagagggtaatgttgtcaagtctaataaatcactattcagcagtcatcttttggcagggtgtttttttatcatgctaatgactgcaaaaactcatgagagctaatatatttaaagagttcgatcccttggaaaagagtccttcttttgccttatgctattatggagctgatttatcstttgtacttgttctatggtcatcaacaatcttttgactataattagcttcccaagtgggactacctacagagaatgtggtggcactaagaggatgaag

SEQ ID NO: 598119 - DNA, 481 bp, Homo sapiens
tgtgagcaaagaaaaaatactaaagtccccaaagagacaaagactagacggtatgattaaatgaaactgtaaaatcagctcttatttctttggcatggaatttttcacttaaacattgcattgtgtatgartaagcattatcttttagagttatgaatctatgaaaaataactatacattgggatagatttaaaaaaaagcatgtacatgttctaaacttgatatcctagcaagtcaatacaaaatacgattttatgatatttggtgtaatcaaaaggccattaactattttgatatttgacttgcaaatattcattcattacataactttgttaattttgacttcagttagtaaaaactgagatttaacagtaaataaatggaaataagtgaatttacacaaatttggtgatattatatttcagtaagtactacaacaaataagatctaagaacagttgtttataaaaaagaaatcagag

SEQ ID NO: 598120 - DNA, 357 bp, Homo sapiens
taatattttgagagttataaaaacaaatacaaagataataattctgtgatttgccaaatcatgttatatttgcttcacagttttttctacaatgtgctcatatattatttgctttcttttcccagtatagaaatattctcggcaaaatgtcctgagatctgtcacagctgcataaagaacataaattctttagaatttttggtaaatatgacatttcactrttttgctaagccataaatcaccttcgttataggcagtgctgcagatgttgtgcaaactttcattcaatgagacaaataatttttaaacaagtgttttaataatttctatgtatttatatgtattatcctataataa

SEQ ID NO: 598121 - DNA, 566 bp, Homo sapiens
aacagtcctgaccataataacaaaccattcctctctgaacacagctttctaggttacctccttagcttactttcttttctttagctatatcgtcatcactaatcagctagagtcaagaataaagaagctgctcctaatggcttcagaagaatcatttcctctcattgggcattttaaatatcacttttccatgatgagaacaagtgaaagtaacttcaattgcttggcaaggggaccttaatatgactatctctggccttaggtatatctacactaaaatatgccttgtttttcctgttataataggaacaatggtatcctcataaatatcaatgaatcaataaggatctcagtgtatacatgtttttactttctctttcttcaaggatttcctggactatccttatttcccatttgcacatacaggcaaaggaaagattaataaaaaattatccttccctgactaaattggggttttmagtcaaaattgtaaggagtgtgaccgagataaagaggctatagagaaagaaaagagaaacctaggtgtgaagactggttgactgttc

SEQ ID NO: 598122 - DNA, 589 bp, Homo sapiens
ttgaacttatctcctagttattactcctgagttttaagaatgatagtcacattgtacgtaacatcaagaaagagaacagtatatcatttgaaagcttcagggaacctatagtagctttgtacatatgtcaaaaaattgtatgaagaaagtgattccattactcttagcttcacatgtcaatactccgaatgatgtctgtattctcctaatctgtcccctgtctctgaccagtcttacctcatgggagtatgaatgtttaagtgcaaaattcttccaaattattgaatagattaacaaagtctagaaaattataccacatgtttatatattcatccagacctctttcaataacttatatgacatcttcttctggatcaatcatagtttgaacttgttcaaactatgtgwaaaaacaaactcataattctttctaaatgtatctctattagaaaatatactgccgtctattctgtcatgcaagccagaaactttaataccctcgttcctctcactcccctttatacaatctgccaccaagtcttgacaattttaccttctaatactttcatatttgtccacttacctctaa

SEQ ID NO: 598123 - DNA, 594 bp, Homo sapiens
gtgcctatctgtttcccccaaacaaaagttcagcaaacttaacagtcatctcagtccatgttctgctacttagtatagagcactagtaaggaaatactgytaagatctgtgatagaaacaaatgtgtataagacgtcacttgttttctaaatttgcaggtaagataaagcacatttagattgctgtaggtaggatttagggcatcagaggtggagacaacagttcagatttgggactgaaagaatgggtaagtacaagagtagatggatggatggatggatggatcctggatgggtaagtagaaaatcaatctaatataaaagaaaatgcttgaaaattaccttaaaagatgcaaaatagtgtgcataacatgattttaaaagtacaattaacatacctttacataagcaatacagaaaacaatcttgaatcttcatcttcaaatttatttaattggaaactaaaattttgctaagaattgaatgacaaagaactcaagccagaaaatatcccagcagccttttcatatggttaggatgggagtaattgtgcacctgccttggatcaaagcccttggcaccaatgactatgctg

SEQ ID NO: 598124 - DNA, 594 bp, Homo sapiens
gtgcctatctgtttcccccaaacaaaagttcagcaaacttaacagtcatctcagtccatgttctgctacttagtatagagcactagtaaggaaatactgttaagatctgtgatagaaacaaatgtgtataagacgtcacttgttttctaaatttgcaggtaagataaagcacatttagattgctgtaggtaggatttagggcatcagaggtggagacaacagttcagatttgggactgaaagaatgggtaagtacaagagtagatggatggatggatggatggatcctggatgggtaagtagaaaatcaatctaatataaaagaaaatgcttgaaaattaccttaaaagatgcaaaatagtgtgcataacatgattttaaaagtacaattaacatamctttacataagcaatacagaaaacaatcttgaatcttcatcttcaaatttatttaattggaaactaaaattttgctaagaattgaatgacaaagaactcaagccagaaaatatcccagcagccttttcatatggttaggatgggagtaattgtgcacctgccttggatcaaagcccttggcaccaatgactatgctg

SEQ ID NO: 598125 - DNA, 566 bp, Homo sapiens
gacaaagaactcaagccagaaaatatcccagcagccttttcatatggttaggatgggagtaattgtgcacctgccttggatcaaagcccttggcaccaatgactatgctgagatttaggaacatacaggagagaaggccagttaaactagcaaaattcagggwactctgtaacagctgatttcaaccatgaatccatatattacctttaaattccttttcaaaaccattccaaacaagagatcttccctgattagacccactgaacttgggcaatgcccctcctctgtggcctattgttttatatagattcatattgtagtgaataattttatgtttccagcaaggttgctttgctttgaatttatgccattttgtaaactgaatttaataaaaataatgactcatttgaatagcagtttagttgttataaaatcaggttctctttttttacatacatccaagtatcacctgatcatctcacaggctttatcagccaatattattattctacatacctgggcattttgtgggaattctggttcagagaaataaggaaatgcacaca

SEQ ID NO: 598126 - DNA, 607 bp, Homo sapiens
tgcactttctgctaaggggcaaatgaatttcatcaaaattattgtaaaccaaatcttattgtcacttaaaatggttctgagtgtttttacagagataattttctgtggacaacaatggtgattatcagaaaataaaagttttaaatcttttgtcatatttttaataataayacaaatattgctagtaaaagtcccagttcaatctgatacaataaatgtaattggatgattttctgcagagagtctttatttctccagggagcagaaacttagtctgagacacttcagggtcacttcaaccgcttttaccctgagattgggttgaggtgatatgttgcttacatggagtcagggctgtgcagggtgcagagactggcacaggcctaagtacttcttctcttggtagttatctcttcatactgacatctgctgatatctcactcagcctaggccactgtgagctatccatttgtcatctctggaatagatatactgtttcatggacacagaatgtactccctaagcaaaggctaccatgatataagttatctacagttctaagaccaggtacagaagagaataaaaatagataacttactgcaaacca

SEQ ID NO: 598127 - DNA, 570 bp, Homo sapiens
tttttagtcttcagtttgaagatttggacttcttggttcattaagactgtctgcgtatagacaaaatttaatactgaaaattgaaaacacactaaaaatctaaaggaacattagcrggggagggggcaacacatttgctcttcttaatgaaaataaagatacatttaatgaccatgagccctttagtcaaagacatactctgcaggttacttacttttaattttgttatgatcaaggtgaaggtgctgcagatgagcactgattcggggaacctttgtgagttgattgtgcgacagttgaagatctagaattgatgatacatcaaatcctcttgatgggagaccctcatctgacagtttgttgtgatttagtctcaaaaaggccactttaggaatcacattaaaataattttctggtattccttcaatggaattgttgtctaaaaacaactgcattgtattggctggtaatcttggaggcatattcctcagggcattcttggccatgtttagctgcatgagattcttgagtcctttaaaagtgtctctttgaaaggcattgtccactaat

SEQ ID NO: 598128 - DNA, 441 bp, Homo sapiens
gatgctgtaatgtgtttgactaagggaaaaataaataaatatatgtatttgaaaaaatgtaaatgtgatatctggaaagcactacctgattttggtgctaatcttggtattatgctttttttcagagaaataatttttgtatccctatttcctattatatttcttttaacaatttattccaagtacctgctaaggtgggataattttttattcattataatataacacatgttttgcatatagtcccttatgagacattctgttacactgctacttttttctttaacacatatctaaastagtgtgtcctccacttctgatacttgatgaaaaaaaattatgcttcttgagaaaagatgcaaacaaaaaatatttcatttaggtgttattatgtggattgattgttgttttgtttttcaaaatctctcttattctagcttc

SEQ ID NO: 598129 - DNA, 521 bp, Homo sapiens
caggtacagaagagaataaaaatagataacttactgcaaaccagtcaactcaaagatgtactctgctggtacgatgttaagaagacacacaagtgcagtgactttgactgaaatcaaagtcatacgtagtaatgaccatttgtattatatttttaaactttagggaaatataatgaacagatttaaaagttaattcaggaagaagcaagtcagagtaaaacaagcagtcaaataaaaaagaatagagcataaagctgaaagaatttatgaatatttgtagaagaggctcaattatgtttacattcaagtattaccaattgtagcttgagaaaaaagrcagggatttttttctggtcatttgtgtttacgttcaaatttagttttctgcaacataagcatacaagtctgccacacagaaggccaggtggtcttgtttccctggactattttttgtgcatgtgtgcattgcctcataacttcatatcacagtacgaagatggttgaagaggggaaaaaatgcc

SEQ ID NO: 598130 - DNA, 390 bp, Homo sapiens
tatgcatttatctcagtcttccagctgttgcttttcactaagttctctgaagtttcccctgtatgtgtgcagttcagtagttagaaaataattttggtggaatacatgtacagatgtggggctctttactctgttattccttctttcggggtctcctttcttactcttcccaactcagcaaaattccagcttgtattatatatcaacttaacmgtacctcggacacatccaatttcttcacttttttcttttctttctctttttttgtggtcttcagtaagttgtatgttgtaagtacttgtttatttcacattgttttttaaaatgtatttgtatatattctgagcctttggttgcactattgagtgatatatcatacagagtttggtg

SEQ ID NO: 598131 - DNA, 390 bp, Homo sapiens
tatgcatttatctcagtcttccagctgttgcttttcactaagttctctgaagtttcccctgtatgtgtgcagttcagtagttagaaaataattttggtggaatacatgtacagatgtggggctctttactctgttattccttctttcggggtctcctttcttactcttcccaactcagcaaaattccagcttgtattatatatcaacttaaccgtacctyggacacatccaatttcttcacttttttcttttctttctctttttttgtggtcttcagtaagttgtatgttgtaagtacttgtttatttcacattgttttttaaaatgtatttgtatatattctgagcctttggttgcactattgagtgatatatcatacagagtttggtg

SEQ ID NO: 598132 - DNA, 390 bp, Homo sapiens
tatgcatttatctcagtcttccagctgttgcttttcactaagttctctgaagtttcccctgtatgtgtgcagttcagtagttagaaaataattttggtggaatacatgtacagatgtggggctctttactctgttattccttctttcggggtctcctttcttactcttcccaactcagcaaaattccagcttgtattatatatcaacttaaccgtacctcggacacatccaatttcttcacttttttcttttctttctctttttttgtggtcttyagtaagttgtatgttgtaagtacttgtttatttcacattgttttttaaaatgtatttgtatatattctgagcctttggttgcactattgagtgatatatcatacagagtttggtg

SEQ ID NO: 598133 - DNA, 656 bp, Homo sapiens
actgtcactatcaacttttcccaatttttaaaaatttgccactttcaatacaaatcttttaaaatagcagcagtgccacatcatcatttcatttcttaggcataatatttacaaaatactcacrtagggatcacatattcccttctacaaatgagaaataaaaagtgattccccaatagaccacatggtttcaagtcaacaagcaggccacaggccactgctgtattaatattctcaaaggtaacatttgtggtaaattgttttttgtataagtcatgatctctatttcatttcatgaatactttccctaattttgcaatttaagaaatagaaaattttgcagctgaagtcagaaatgtctatgcatatacacatttgtgttcatattaatgttcatatttgagaatatataaacatattttgagattttggaacaaattttaattcaaaacattataaacaaaacaaataaaagtgaaacattgtatgtctatataactgtgtagtgcttaaagctcatccagtacttcagattttctttagttactctttcctttagagtaaaatttcatgaaaattttgtcctcgcatgcttttgacacttcttcacttctctttacccttcctttaaccccagtaactctaatttggctcct

SEQ ID NO: 598134 - DNA, 656 bp, Homo sapiens
actgtcactatcaacttttcccaatttttaaaaatttgccactttcaatacaaatcttttaaaatagcagcagtgccacatcatcatttcatttcttaggcataatatttacaaaatactcacgtagggatcacatattcccttctacaaatgagaaataaaaagtgattccccaatagaccacatggtttcaagtcaacaagcaggccacaggccactgctgtattaatattctcaaaggtaacatttgtggtaaattgttttttgtataagtcatgatctctatttcatttcatgaatactttccctaattttgcaatttaagaaatagaaaattttgcagctgaagtcagaaatgtctatgcatatacacatttgtgttcatattaatgttcatatttgagaatatataaacatattttgagattttggaacaaattttaattcaaaacattataaacaaaacaaataaaagtgaaacattgtatgtctatataactgtgtagtgcttaaagctcatccagtacttcagattttctttagttactctttcctttagagtaaaatttcatgaaaattttgtcctcrcatgcttttgacacttcttcacttctctttacccttcctttaaccccagtaactctaatttggctcct

SEQ ID NO: 598135 - DNA, 618 bp, Homo sapiens
cattccttctgaatctgcctcattctgacctacagatggaaaccgtatgtctttctgtttaagaaaatgtgcccaaacttctcagctggagctttctggtcaagctttattgtatcttcatgtattgctcctaaagtatcaaagacagtataatctgtttttgttttgatttcatgctttaaataatttaaagtaagtattagcacattcactgatttgtctcagaaaatctctaaacatagagctgtgamttagatatattttggacaagcaaagttggaaaaaattatacttcaataagtacttgctgattgcctattatgcttacagcctagaggtacacagataaaagacatgacatactttaccatccagcaggcttggaaatgcagaaaacaaatggaaccaatgtaatacagcacagaaaaggctgaaatagagagactctatggaagcacagaaggatgcacaattcagaaatataaactgataaaagaaagtttagtgttccttaaaaagaataattttcatttgtgatttgcaatgcttttaaatctattataagtgatattaaatcataagtgtattcctaaaattttttggttactcaaacaccta

SEQ ID NO: 598136 - DNA, 583 bp, Homo sapiens
atggggatggatccctcatagaatggcttggtgccctccctgcagtaacaagtggtaatgagttcgtgtgagatctaattgtttaaaagagtgtgacaactctcccctgtctctctctctcgctccctcttttgccatatgacacaccatttccccttctcttttgccatgactaaaatcttcctgaggcctcaccagaagctaagcagatgcrgtgccatgattgtacagcctgcagaaccatgagccaaagaagtctcttttctatataaactacctagtcttaggtatttatttagagcaacgtaaaacagactaataaaaataaggcttctttaaatcagtataatgcttttttaaaaaattcagcttcaatgtgagtttgccaatagtgcattcttttttgttattatgtagtattttctccttttttgaaaaaatctacgttgataacctctgcctttgctttttaattgtttagttgattcacatttaaaggaattgatgtgtttaattttaggtctatgacttttttgctctttatgatctgcttgtattctatttttgtttttttgttatcctc

SEQ ID NO: 598137 - DNA, 587 bp, Homo sapiens
attcagattgcaactaccccaatctcttaccttctcagacagccttttcccatggcttctctctccaaatatcctgtaagatccctatccctgccactgtttacctactatcttcaaccaagaaaatgggaactcaggcccttagcaaggcagccccacactgctgacttaaaagagggtctgcaggaggaaaaagataaggattctatgtcttagcttgttttaattggatttaggttctttcaaaaggagtggccggtttgagaaaggcaatgattagttggactttgaatacattctaattttacttatattctgcaaccccttcaggcacaggttgtcttctcataagtctgctcacagatatctctgctaaaggcatgcatctgaagcttctcccacactttcttccacatcttcttccagctcttccacccccaaarggtaaattattcttctgaatggtcacattttaggatgatgactgagattacccaaaaagcttaccaaagatatcaggaagtatacaggctaataataatgccgtatttaacttccttcttcttgatattcctcatatgtggcaa

SEQ ID NO: 598138 - DNA, 618 bp, Homo sapiens
tttcagtcaaaattgtaaggagtgtgaccgagataaagaggctatagagaaagaaaagagaaacctaggtgtgaagactggttgactgttcacttagagttaatatgtactcaggtaaggctattacattgtacacatctaggaagcaccattcacatagaataccacatagatagtgcttctcagagttgtgcaatggagtggttctaccactaggtgtataatttttccatctttctctcaaatacagagcatatctagctaaaattcttggctcagcaatagattcaaagctwgtttcatctaaaaaagttgaagcacatcttctttagtttcctttcataatatgttagcatgtataatgaaggtccataggcagacatggagatgtctgagccatagctaatgtattttcatacctgctttctctatgagataaataagaaagacacatgaaatgtggtctaacaatcaaagacaggtttattttagagaaataaacctgagaggggcttctggccaattttggtcaggagtattctcccttacagactaagagtatatattggttttagggtgacagggcccatcacaagcttggaatgtttctgtgtgggg

SEQ ID NO: 598139 - DNA, 694 bp, Homo sapiens
actgataaaagaaagtttagtgttccttaaaaagaataattttcatttgtgatttgcaatgcttttaaatctattataagtgatattaaatcataagtgtattcctaaaattttttggttactcaaacacctagaaaatacctggtctgaaaatatacctgtgttatagatgaaaggaatagtttgcagatcacttggtattaagtaatccagaaataatttatgtgtttctttactttcttaatgaaagcaaataaagaagggtggaaaaaagcaaaaggccatattggtgtggttaagggaaagtctgggatttctggggataccacaaggacactgggccacaaaaagtgggtcctggatgtcgccatcccaattgcctggagcaaattttcagcccaagcttacgagaccgtcagagaagtagacatttactaagtaccacaaagaaatagacattcagacaagggaagaaatctgaaagagaagatttctcctaaatccaaacagtattcttaaaagcaatgattctattacttaaaatgtacaagttagataagagcaaagcagttgtaatctaaaatataatataaaaaawaacctttgaataattttgtaattttataactgcctcctagtgtcaacgttctcaaagaagtccattttaacatacctagatatcattacaatattt

SEQ ID NO: 598140 - DNA, 610 bp, Homo sapiens
cttgaacctctctcagttgtgagctcttgtttttatacagaagccctgttgatatagtggtaaggtgttgggagggtaaccattctatcatcttacgattaaatatatgatttcagtagatttgtgttcctgggctgtaacattcagaataaatccttagcccccttttttcttttccttatatgagataggaagtttaggcggggctagagttggctggttgcccctagttcacaccagatackgccctgttagagtaggtttccttgaagggcaggccttttttatgctttctttgggcatatttcaaaatatttgctaaagtcagtagaagaaaggcaggattcataaaattctaaaacaataaaactgactagagagaaaaatgatagttatgggaaaaaaacaaaataattttttgccataattatgttgtgaatttcaaccagatatagttattatctcagaaaatagatccaatgaattcagcagaaataaaaattcaaggtaaagtagaagaggtctgtgttgaaattaagcataagaaactgcaaattttaaaagaaagatattaagcataacaaactgcaaattctccagaaaagattgg

SEQ ID NO: 598141 - DNA, 610 bp, Homo sapiens
cttgaacctctctcagttgtgagctcttgtttttatacagaagccctgttgatatagtggtaaggtgttgggagggtaaccattctatcatcttacgattaaatatatgatttcagtagatttgtgttcctgggctgtaacattcagaataaatccttagcccccttttttcttttccttatatgagataggaagtttaggcggggctagagttggctggttgcccctagttcacaccagatacggccctgttagagtaggtttccttgaagggcaggccttttttatgctttctttgggcatatttcaaaatatttgctaaagtcagtagaagaaaggcaggattcataaaattctaaaacaataaaactgactagagagaaaaatgatagttatgggaaaaaarcaaaataattttttgccataattatgttgtgaatttcaaccagatatagttattatctcagaaaatagatccaatgaattcagcagaaataaaaattcaaggtaaagtagaagaggtctgtgttgaaattaagcataagaaactgcaaattttaaaagaaagatattaagcataacaaactgcaaattctccagaaaagattgg

SEQ ID NO: 598142 - DNA, 617 bp, Homo sapiens
acaattgcttctgctttactccckttaacattacacaaaacattgcaatttactttaatccatggaattatctacaaacatctatctattaaatatattttttcattaaagtgtacttgacaaataaaaattgtatatctttacagtggacaacatgatgctttgatatgtgtatccactgtgaaatggttaaagctaattaacaagcacattacctcacattcctataattttctattgtgagaacatttaagatctgcttttattagcaactttcaaatgtacaatacactattattaactgcagttaccatacaccataaatctcccatgcttatttatcctgtctaattgaaactttgtaccctttaaccaacattttcccatctacccagccctcaccctcagctcctggtagccaccattctactctttctgcttctatgagtttgacttgttttagattccacatataagtgacatcatgcagtacatttctttttgtgcttggtttatttcacttagcagaatgttctccacttttgtctgttattccaaaaataggacttcctttttttatggttaaatggtaatctactgtatatgcagatgttcct

SEQ ID NO: 598143 - DNA, 617 bp, Homo sapiens
acaattgcttctgctttactccctttaacattacacaaaacattgcaatttactttaatccatggaattatctacaaacatctatctattaaatatattttttcattaaagtgtacttgacaaataaaaattgtatatctttacagtggacaacatgatgctttgatatgtgtatccactgtgaaatggttaaagctaattaacaagcacattacctcacattcctatarttttctattgtgagaacatttaagatctgcttttattagcaactttcaaatgtacaatacactattattaactgcagttaccatacaccataaatctcccatgcttatttatcctgtctaattgaaactttgtaccctttaaccaacattttcccatctacccagccctcaccctcagctcctggtagccaccattctactctttctgcttctatgagtttgacttgttttagattccacatataagtgacatcatgcagtacatttctttttgtgcttggtttatttcacttagcagaatgttctccacttttgtctgttattccaaaaataggacttcctttttttatggttaaatggtaatctactgtatatgcagatgttcct

SEQ ID NO: 598144 - DNA, 628 bp, Homo sapiens
aagcgattctgcctcagctacaggaactacaggtgtgcgccaccatgcccggctaatttttgtattttttagtagagacagggtttcactatgttggccaggctggtctcgaactcctgacctggtgmtccacctgcctcgacctcccaaagtgctgggattacaggcgtgagccaccacgccaggactgtaaggtttttttgtatctcatttacaaatcccttccctagcctaaggtcgtaaagatcttctataattttgcctaaaatttttaagttgattgtcagaaaattatttctgattctttttaggcaatagagcatatgttctacaggagaagcatggttgtggctgattcagtttcacatataacacagcaccttcaacatcaggctcttcattctatttctgtggccaaggtatgcagcttattatgtatttagcataagtatgttatcttttttgtttgttctttcattgttttatatgtgttttctggtttaacctgtttattccattccttcaaacataatatgctcggttatttatctccatagtattttacaatttttacttcaagttattggcattatctttactgtgaaattgcagcatgtaatacattaat

SEQ ID NO: 598145 - DNA, 603 bp, Homo sapiens
agccatattggaaaacattctggcagttcctcaaaaagttaaacatagttaccacataacccaggatttccactcccatatatacatatgtataaaatatacacacaatgtacacacattttatatacaatatacttatatatgtctacacaaaatcatgtgcccaaatgctcatagcagccaaatagtagaaaaatccaatgtctatcaactgatgaatggataaataaaatgtggttatccattccttacaatggaatattattcagcaacagcaaaaaaagaaagtactaaaaacatgtgacaacatagatgagccttgaaaacataagttaaagaagccagcaacaaaggagcacatatcgtatgatttcatttatatgaagtgtacagaggagacaaacacatagagataaaaagtagattggtggttgcctagggcaggtatgccatggcatgaactgggggttgattatcacayggtacatggtttcttttttgggggctgagaacgttctaacattgactgttgtgatggttgtacaactcagtgaatatgctaaaaacaactgaattatacaatttaaatgagtgaattgtatg

SEQ ID NO: 598146 - DNA, 606 bp, Homo sapiens
gtcctcaattcttctcagttgagaggtatactcctcaagaaatttcccataattcttaagttggacttcggcatgaatttctaagtttaaattttaaaacagtatgtgataagtgcaagtaatgaattgcaggacatttacttcaaataacctcaaaagtcacgcaaagcactgttaattattactctggaatgtytggacttcctgaaaataaagtttcaaagttaaacaacaattcagctttcaatcttctctatacacgaaataattttaaaagcagtagatgttaccatatataaagttactaccttaaaaccctaacatattatgaaaaagccactagcccatctacccccataatagagggctttgaaccaatctgaaaagtgccttaaacaattcaatgtcctgattctatcttttagtcatgaacaactcttttgcaaaaacaaatattcatgatctgaaggtgaaaaaaacagtctgtcacagaagtaacacttaaaaatgtagtttttaattctatacacactaatgtttaataatacacctaaatatttttaaatggaggttttatacctgcttgagcatattatttctataatg

SEQ ID NO: 598147 - DNA, 618 bp, Homo sapiens
caccctgccgttccagatgaatacctgaacatcattcttgattcatcctttaccacctgaccccttcatacccaatcaatcaccaatccacctcctaaatacctctcaagtacagctgcttctttccacttctactgccacctcccctatgcttaggagtgaagagtctcagcttggctccagctgatttgctctgccatgaattaaatgggtgcacctggacaagtttctcaccatcagaatccttaagtctcccaaccaataccataggcataataacaataacaatacccacctcagagttgttaggggaatttaaataaaataatcaacataaaagcccctggaagttcctggatgctattaagtattcaataaatctcaactcttacaatcaccctccttttgcgtgcccagcacaaccccactaggttaggtggctctcctctcctggcccctctaaggctctctggtgattgctttgtctgcctcccaacccaacwgtcagctccccaacggcaaggactgagtcttattcccatatgatgggaaatgactaataaaacaatgagcagtaatagagtggtgaacctatgtaataagaaatgactatatata

SEQ ID NO: 598148 - DNA, 353 bp, Homo sapiens
atttttatttttattttacatacctccaaacacaacctcagagagattgagtaacttgccaaaagtaacagtagcagattcaggagtggaattccatccattttctactgcccgacacttttaagggtatgctcggccagagaaacaaatccaagcaccctatgcacacagcctcagctccctatcactcctttaccttaaagaaactgggtattacctaataaaacactcctagacattctcaagaatagtgtgtgtaattgtgtartggcccaatgttaacaccactgactactgagaaaattttaaggttataaacaaagttcttatctccataatttggtggaggaaga

SEQ ID NO: 598149 - DNA, 501 bp, Homo sapiens
gcaggmgacgcggcggccgagagcactccccggctctgggctcaggcgacgcggcggccactccgtgcccgcggcggccccgcgcgcgtccacgcctggccagtggccgccgccgcctgcccgccggcccagcccccggccgagccggatcaacaggaagtgtggcgcgcccggcagggaaaccggaagtgtggtgagctccggtcccgacaccggaaatgtggcgcccgcgcttccgcctgcgctcgccggctcgcggggagcggggggctctgggtgccagtcccgttgctgagggaacccttcgggtgtttgttctctgtgctgaaggtccgtcaagtcaatgcatatgaagtccaaaagaggaactcgagggtagaaagataaggttttatctgcttatggctacccagaaagccttttgagttgaaggagcgaacagattttttcttttaatggaaggaaaaacccacacttcccacaccactttttctagataaa

SEQ ID NO: 598150 - DNA, 618 bp, Homo sapiens
ataggcttgggaggctgaggcaagtcgatcacttgaggccaggagttcaagaccaccatggtgaaaccctgtctctcctgaaaatacaaaaattagtcgagcatgcgtgtgagcacctgtagtcccagctacttaggaggctgaggcaagataatcgcttgaacccaggaggcagaggttgcagyaagccaagattgcaccactgcactccagcctgggtgacagagtgagactctttaaaaaaaaatgcaaaaaacaaatcacaagggatagggatggccttagatagaagcaaggacagtacgttcatagtgatacaagaacagtaggttggtagattaaatgggaggaatgaaggcgttctattctgattgcttttatttttctcagtgagataagaagcaaggccatcggctcaaagcaataatggtcagatggtattgaaggtttgaggagagaggagatggcataaaatagtcatcttggagcacaggaaggtgaggcataagtattagtatcctcatttgataaacgttacaactgaggctcaaacaaatgatgtgacagggcccaaattctaaatgccagggctctgcccactgtacccaaagagaagaa

SEQ ID NO: 598151 - DNA, 432 bp, Homo sapiens
cctcagagccctcacagggaactagccctataaaaccgatgtcagattcatgacctccgcaactatgagaataagcttgtgtaaagtcartatttgtggtaatttctacagcagcagtaggaaactaatataggatgttactcacattttaaaagggaaagtgtttgaaaaaccctaacgtccactgtcaaaaaacctaacattctttcattctttttcacagtatgaaatccagaatagcagcatttggctttttttttttttttttttttttttttaaaggctggtctcactatgttgtccaggctggtcttgaactcttgggctcaagcagtcctcccacctcagcctcccaagtagctgtgcattcatttggccttttagacttccttacaatgcggcataaacttctgtggtgtagacatgttgaga

SEQ ID NO: 598152 - DNA, 604 bp, Homo sapiens
gagcttcctctctgaaaccctctaaacaccctcttccccactgaaagaaaacccggcagtaacaatataaaactaaagaactagaaatacagactgatcacacactcatctgtttttcctaaagacacacagatcatacatgtgagcaaaaatctagatcataagtatttaccacctctggaaccgcactgttcaatatgggagctgctagccacatgtagctactgagcacttgaaatgtggctagtctgaattgagaagatcttgtactaaaaaaagttaaaatgtctcattaatttgtatattgattacataccatcagtgatataataattttttttttttttgagacagaattaccctgtcacccaggctggaatgcagtggcacgatctcggctcaccgcaacctctgcctcccaggttcaagcaattcttgtgcctcagcctcccaccatcacgcccggctaatttttgtatttttagtagagatggggtttcaccatactggccaggccggtctcgaactcctgacctcatgatccacccatctcggcctctcaaagtgctgggattacaggcrtgaaataaatatttttatgtaa

SEQ ID NO: 598153 - DNA, 426 bp, Homo sapiens
gcctcagcctctcaaagtgttggggttacaggcgtgagccactgcactcagctttaaatttttttttatagagacagggtcttgctatgttgcccaggctagtctcaaactcctggcctcaagcgatcctccaggctccacctcccaaagtgctgagattacagggggtgatccaccacgcctggcctgtgcgtgttttttttttaacctttctgtgtcttaatttccgcatctgtgaaatggggataataatagatcctaccycattgggttgttgtgggagttaaaggaggaagtaaatgttagctcagggctcggccgtaagtgctcagaaatattagctatttttcttaggacgaaaactaacatttaatcaaatgccggcttgctacattcacagctgcttgatgtgttcttgttgaattc

SEQ ID NO: 598154 - DNA, 597 bp, Homo sapiens
caagcttctactttttaaaaaaattttgttttggagacagggtctcactgtcacccaggctggactgcagtggcattatacagctcactgcagccttgaactcctggactaaagggatcctcccacctcagcctcacaagcagcctcacaggcgctcactaccatgcccaactaatttttgtattcttttttttatagagacgaggtttcaccatgttgcctaggctggtctggaactyggctcaagtgatccacctgcctcggcctcccaaagtgctgggattacaggtgtgagccaccatccctggccatgagcttctacttcttttctttttcttttttttttttttttttgagatagggtcttgctccattgcttaggctagagtgcagtggcgcaatctcggctcactgcaacctgcacctcctgggttcaagcgattctcccacctcagcctcctgagtagctgggattacgggcgtgtgtcaacatgctcagctaatttttgtatttttagtagagatggggtctcgccatgttggccaggctggtctcaaactcctggcctcaattgatccacctccttggcctctcaa

SEQ ID NO: 598155 - DNA, 524 bp, Homo sapiens
tttgagaggtcaacctaaatataaaagcaccaagtaaacatgcctgtggttgtgagaggcaccatccatactaatataattcatatttcacttttagggttwttttttctcactttaacaatcccattcaggaacaatgtaaagagcttacagaggaggagggaattaacttctgagaattttatatgctatttaaggaagatgaaaactgataattcattgttttcttctttaataatgatttaaatagggtatctgtcattttacagtcctactagaacatcataacacttagtttatgcaggtcttataaaaagagagagatggagaggtacacacagactcataaaactattttagaaaccttaagacaggaacaattgccaaatttcttttttcattttcaattttggtatccgtatgtcgtctaagagaaaactatctcacaatttatgatgcatttatgactcatttacacttaatttatcaaagccacatttttctgataatcctcagataacagg

SEQ ID NO: 598156 - DNA, 417 bp, Homo sapiens
ggatccaggccattagcacttctgagcacagccttccagcccaagtgggcagaacaaggccagtgggccggagcaaaacttgggcaaaggtgctgctagccacagaggtttctggctggaaaagcaataccctaaggattctgtgacatcacgaggccagaggctatgggaggtaagcttcactgcccagcttccactgacttcagcctgctgcgctttgtagcacattgtcaaagctagaatttctggaaacatattcaaaagaattaagaaaaattcaagacagcatcaaaaagtcactaaygataacaaaataattattatagtataacagtgattcacatcatctagtaaagcatgccaagtaatatgatttggctgtgtctccacccaaatctcaacttgaattgtatctcc

SEQ ID NO: 598157 - DNA, 546 bp, Homo sapiens
gaggaacaaacattcagaccacagcaggagtgttctggaatcctatatgaggtataagcattcagaccctcatagcagygttctggaatcctatgtgagggaaaagcattcagagcacagcaggagtgctctggaatcctatgttagggacaaacattcagaacctcgtaacattgtgctggaaacctatgtgagggacagacatttagaccctcgcagcagtgttctggaatcccatgtgagggtcaaacattcagatcctcgcagcagtgttctggaattctatgtgagtgacaaacattcagactccagcagcagtgttctgtattcctatgagaaggacaaacattcagaatccaggagcagtgttttgaaatcatatgttaagggcaaacatacagaccctagcatcaatattctagaatcatatgtgagggacatacattcagaccctcacagcagtgttctggaatcctagatgggagacaaacattcagaccccagcagcagacttctggaatcctatgtggaggacaaacattcaga

SEQ ID NO: 598158 - DNA, 446 bp, Homo sapiens
agtgttctgtaatcctatgtgagggacaaacattcagaccccaagagcagtgttctgaaatcctatgttaagggaaacattgagaccccagcatgaatgttctggaatcctatgtgagggacaaacattcagaccacggcaggagtgttctggaatcctatgtgaggaacaaacattcagaccacagcaggagtgttctggaatcctatatgaggtataagcattcagaccctcatagcagtgttctggaatcctatgtgagggaraagcattcagagcacagcaggagtgctctggaatcctatgttagggacaaacattcagaacctcgtaacattgtgctggaaacctatgtgagggacagacatttagaccctcgcagcagtgttctggaatcccatgtgagggtcaaacattcagatcctcgcagcagtgttctggaattc

SEQ ID NO: 598159 - DNA, 446 bp, Homo sapiens
agtgttctgtaatcctatgtgagggacaaacattcagaccccaagagcagtgttctgaaatcctatgttaagggaaacattgagaccccagcatgaatgttctggaatcctatgtgagggacaaacattcagaccacggcaggagtgttctggaatcctatgtgaggaacaaacattcagaccacagcaggagtgttctggaatcctatatgaggtataagcattcagaccctcatagcagtgttctggaatcctatgtgagggaaaagcattcagagcacagcaggagtgctctggaatcctatgttagggacaaacattcagaacctcgtaacattgtgctggaaacctatgtgagggacagrcatttagaccctcgcagcagtgttctggaatcccatgtgagggtcaaacattcagatcctcgcagcagtgttctggaattc

SEQ ID NO: 598160 - DNA, 543 bp, Homo sapiens
tcctatgttaagggaaacattgagaccccagcatgaatgttctggaatcctatgtgagggacaaacattcagaccacggcaggagtgttctggaatcctatgtgaggaacaaacattcagaccacagcaggagtgttctggaatcctatatgaggtataagcattcagaccctcatagcagtgttctggaatcctatgtgagggaaaagcattcagagcacagcaggagtgctctggaatcctatgttagggacaaacattcagaacctcgtaacattgtgctggaaacctatgtgagggacagacatttagaccctcgcagcagtgttctggaatcccatktgagggtcaaacattcagatcctcgcagcagtgttctggaattctatgtgagtgacaaacattcagactccagcagcagtgttctgtattcctatgagaaggacaaacattcagaatccaggagcagtgttttgaaatcatatgttaagggcaaacatacagaccctagcatcaatattctagaatcatatgtgagggaca

SEQ ID NO: 598161 - DNA, 446 bp, Homo sapiens
agtgttctgtaatcctatgtgagggacaaacattcagaccccaagagcagtgttctgaaatcctatgttaagggaaacattgagaccccagcatgaatgttctggaatcctatgtgagggacaaacattcagaccacggcaggagtgttctggaatcctatgtgaggaacaaacattcagaccacagcaggagtgttctggaatcctatatgaggtataagcattcagaccctcatagcagtgttctggaatcctatgtgagggaaaagcattcagagcacagcaggagtgctctggaatcctatgttagggacaaacattcagaacctcgtaacattgtgctggaaacctatgtgagggacagacatttagaccctcgcagcagtgttctggaatcccatgtragggtcaaacattcagatcctcgcagcagtgttctggaattc

SEQ ID NO: 598162 - DNA, 446 bp, Homo sapiens
agtgttctgtaatcctatgtgagggacaaacattcagaccccaagagcagtgttctgaaatcctatgttaagggaaacattgagaccccagcatgaatgttctggaatcctatgtgagggacaaacattcagaccacggcaggagtgttctggaatcctatgtgaggaacaaacattcagaccacagcaggagtgttctggaatcctatatgaggtataagcattcagaccctcatagcagtgttctggaatcctatgtgagggaaaagcattcagagcacagcaggagtgctctggaatcctatgttagggacaaacattcagaacctcgtaacattgtgctggaaacctatgtgagggacagacatttagaccctcgcagcagtgttctggaatcccatgtgagggtcaaayattcagatcctcgcagcagtgttctggaattc

SEQ ID NO: 598163 - DNA, 546 bp, Homo sapiens
gaggaacaaacattcagaccacagcaggagtgttctggaatcctatatgaggtataagcattcagaccctcatagcagtgttctggaatcctatgtgagggaaaagcattcagagcacagcaggagtgctctggaatcctatgttagggacaaacattcagaacctcgtaacattgtgctggaaacctatgtgagggacagacatttagaccctcgcagcagtgttctggaatcccatgtgagggtcaaacattcagatcctcgcagcagtgttctggaattctatgtgagtgacaaacattcagactccagcagcagtgttctgtattcctatgagaaggacaaacattcagaatccaggagcagtgttttgaaatcmtatgttaagggcaaacatacagaccctagcatcaatattctagaatcatatgtgagggacatacattcagaccctcacagcagtgttctggaatcctagatgggagacaaacattcagaccccagcagcagacttctggaatcctatgtggaggacaaacattcaga

SEQ ID NO: 598164 - DNA, 565 bp, Homo sapiens
gtgttctggaattctatgtgagtgacaaacattcagactccagcagcagtgttctgtattcctatgagaaggacaaacattcagaatccaggagcagtgttttgaaatcatatgttaagggcaaacatacagaccctagcatcaatattctagaatcatatgtgagggacatacattcagaccctcacagcagtgttctggaatcctagatgggrgacaaacattcagaccccagcagcagacttctggaatcctatgtggaggacaaacattcagacaatggcagcagtgttctggaatcctatgtgaggaacaaacactcagagccttgtagcagtgttctggaatcctatgtgagtgagagtgcctggagcctacccaacctgacgcccccaaagccctcacagggtctgacctcccagcatgcacctgcctctccctgaaccccaactgcccaccctgcctgttccccggcctcctccatcctgtgcagcccatagactgtgaccatctctccagccactctggcccttcctttacctttgtcctgtcagaatctctgagc

SEQ ID NO: 598165 - DNA, 267 bp, Homo sapiens
agtgttctggaatcctatgtgaggracaaacactcagagccttgtagcagtgttctggaatcctatgtgagtgagagtgcctggagcctacccaacctgacgcccccaaagccctcacagggtctgacctcccagcatgcacctgcctctccctgaaccccaactgcccaccctgcctgttccccggcctcctccatcctgtgcagcccatagactgtgaccatctctccagccactctggcccttcctttacctttgtcctgtcag

SEQ ID NO: 598166 - DNA, 427 bp, Homo sapiens
tcatgaccaggccccactaacaaggcccccactgccaggcacacaatgacaaggactccactgaccaggaccttactgacaaggcctcactgacaaggcctcacggaccaagtccttactgacaagtcctcactgactaggtcattattgacaaggcctcactgatsaggttccacggatcatgaactcattccctggcccaaagatgaggccccactgaccaggcctccagggaacaggttgccactgatcagacccctaataacgaggccttatgtcaccagatgcccctgactggaaccctagtgagtagaccccactgaaccggcaccaaatgctgagattcccgctgaccaagtcaccctgtagaccggtgctacaaaagtcaccactgaccaagtcctctctgaccaggacactacagatt

SEQ ID NO: 598167 - DNA, 427 bp, Homo sapiens
tcatgaccaggccccactaacaaggcccccactgccaggcacacaatgacaaggactccactgaccaggaccttactgacaaggcctcactgacaaggcctcacggaccaagtccttactgacaagtcctcactgactaggtcattattgacaaggcctcactgatgaggttccackgatcatgaactcattccctggcccaaagatgaggccccactgaccaggcctccagggaacaggttgccactgatcagacccctaataacgaggccttatgtcaccagatgcccctgactggaaccctagtgagtagaccccactgaaccggcaccaaatgctgagattcccgctgaccaagtcaccctgtagaccggtgctacaaaagtcaccactgaccaagtcctctctgaccaggacactacagatt

SEQ ID NO: 598168 - DNA, 427 bp, Homo sapiens
tcatgaccaggccccactaacaaggcccccactgccaggcacacaatgacaaggactccactgaccaggaccttactgacaaggcctcactgacaaggcctcacggaccaagtccttactgacaagtcctcactgactaggtcattattgacaaggcctcactgatgaggttccacggatcatgaactcattccctggcccaaagatgaggccccactgaccaggcctccagggaacaggttgccactgatcagacccctaataacgaggccttawgtcaccagatgcccctgactggaaccctagtgagtagaccccactgaaccggcaccaaatgctgagattcccgctgaccaagtcaccctgtagaccggtgctacaaaagtcaccactgaccaagtcctctctgaccaggacactacagatt

SEQ ID NO: 598169 - DNA, 427 bp, Homo sapiens
tcatgaccaggccccactaacaaggcccccactgccaggcacacaatgacaaggactccactgaccaggaccttactgacaaggcctcactgacaaggcctcacggaccaagtccttactgacaagtcctcactgactaggtcattattgacaaggcctcactgatgaggttccacggatcatgaactcattccctggcccaaagatgaggccccactgaccaggcctccagggaacaggttgccactgatcagacccctaataacgaggccttatgtcaccagatgcccctgactggraccctagtgagtagaccccactgaaccggcaccaaatgctgagattcccgctgaccaagtcaccctgtagaccggtgctacaaaagtcaccactgaccaagtcctctctgaccaggacactacagatt

SEQ ID NO: 598170 - DNA, 346 bp, Homo sapiens
cccatgctgaccagaccagcactaagccccagctgaccaggtctccactgatcaagccccacagcccaggtttgcactgaccagacaccaaacaactggcagccaataggtccccactcaccaaaacccccactactagaccccactaatgagaccctctctaagcagacccctgctgaccackatcccactaaatagtcctcactgacctaggtccacggaccaggcccacactgatcaggcccctcctaaccacactggaaatccaagcggcaatgacatgtttcatatggcagaagttggaacaagacagagagaggaaagaggttccacagccttttaaact

SEQ ID NO: 598171 - DNA, 505 bp, Homo sapiens
cagaccagcactaagccccagctgaccaggtctccactgatcaagccccacagcccaggtttgcactgaccagacaccaaacaactggcagccaataggtccccactcaccaaaacccccactactagaccccactaatgagaccctctctaagcagacccctgctgaccactatcccactaaatagtcctcactgacctaggtccackgaccaggcccacactgatcaggcccctcctaaccacactggaaatccaagcggcaatgacatgtttcatatggcagaagttggaacaagacagagagaggaaagaggttccacagccttttaaactactagatctcatgagaactcactcactatcaggaggatggcattaagggcttggtgctttgccatttgtgaaggatccactcccactttttatgattaaagctttttccacctaggccccgactctaacattagggagtgtactttcacatgagctttggaaggggcata

SEQ ID NO: 598172 - DNA, 572 bp, Homo sapiens
gagaccctctctaagcagacccctgctgaccactatcccactaaatagtcctcactgacctaggtccacggaccaggcccacactgatcaggcccctcctaaccacactggaaatccaarcggcaatgacatgtttcatatggcagaagttggaacaagacagagagaggaaagaggttccacagccttttaaactactagatctcatgagaactcactcactatcaggaggatggcattaagggcttggtgctttgccatttgtgaaggatccactcccactttttatgattaaagctttttccacctaggccccgactctaacattagggagtgtactttcacatgagctttggaaggggcatagagaaaaaccgtattattctgtccctgaccccacaaatctcatgtccttctcacattgcaagatacagtcatgccttgccagcagtctcccaaagtcttaactcatttcagcattaactcaaagttacaaagtgcaaagtctcatctgggtcaaggctacattctcttttgcctacaagtctctgaaataaaaagcaagttcactg

SEQ ID NO: 598173 - DNA, 596 bp, Homo sapiens
ccacactggaaatccaagcggcaatgacatgtttcatatggcagaagttggaacaagacagagagaggaaagaggttccacagccttttaaactactagatstcatgagaactcactcactatcaggaggatggcattaagggcttggtgctttgccatttgtgaaggatccactcccactttttatgattaaagctttttccacctaggccccgactctaacattagggagtgtactttcacatgagctttggaaggggcatagagaaaaaccgtattattctgtccctgaccccacaaatctcatgtccttctcacattgcaagatacagtcatgccttgccagcagtctcccaaagtcttaactcatttcagcattaactcaaagttacaaagtgcaaagtctcatctgggtcaaggctacattctcttttgcctacaagtctctgaaataaaaagcaagttcactgcgtctaaggtacaatgatggtacaggcattgtgtaagctttccatatccaaaagagagacattttccagaaagcttcttatttttatctgaggccccctcagcctggccttcactgtccatgtttt

SEQ ID NO: 598174 - DNA, 596 bp, Homo sapiens
ccacactggaaatccaagcggcaatgacatgtttcatatggcagaagttggaacaagacagagagaggaaagaggttccacagccttttaaactactagatctcatgagaactcactcactatcaggaggatggcattaagggcttggtgctttgccatttgtgaaggatccactcccactttttatgattaaagctttttccacctaggccccgactctaacattagggagtgtactttcacatgagytttggaaggggcatagagaaaaaccgtattattctgtccctgaccccacaaatctcatgtccttctcacattgcaagatacagtcatgccttgccagcagtctcccaaagtcttaactcatttcagcattaactcaaagttacaaagtgcaaagtctcatctgggtcaaggctacattctcttttgcctacaagtctctgaaataaaaagcaagttcactgcgtctaaggtacaatgatggtacaggcattgtgtaagctttccatatccaaaagagagacattttccagaaagcttcttatttttatctgaggccccctcagcctggccttcactgtccatgtttt

SEQ ID NO: 598175 - DNA, 572 bp, Homo sapiens
gagaccctctctaagcagacccctgctgaccactatcccactaaatagtcctcactgacctaggtccacggaccaggcccacactgatcaggcccctcctaaccacactggaaatccaagcggcaatgacatgtttcatatggcagaagttggaacaagacagagagaggaaagaggttccacagccttttaaactactagatctcatgagaactcactcactatcaggaggatggcattaagggcttggtgctttgccatttgtgaaggatccactcccactttttatgattaaagctttttccacctaggccccgactctaacattagggagtgtactttcacatgagctttgkaaggggcatagagaaaaaccgtattattctgtccctgaccccacaaatctcatgtccttctcacattgcaagatacagtcatgccttgccagcagtctcccaaagtcttaactcatttcagcattaactcaaagttacaaagtgcaaagtctcatctgggtcaaggctacattctcttttgcctacaagtctctgaaataaaaagcaagttcactg

SEQ ID NO: 598176 - DNA, 596 bp, Homo sapiens
ccacactggaaatccaagcggcaatgacatgtttcatatggcagaagttggaacaagacagagagaggaaagaggttccacagccttttaaactactagatctcatgagaactcactcactatcaggaggatggcattaagggcttggtgctttgccatttgtgaaggatccactcccactttttatgattaaagctttttccacctaggccccgactctaacattagggagtgtactttcacatgagctttggaaggggcatagagaaaaaccgtattattctgtccctgaccccacaaatctcatgyccttctcacattgcaagatacagtcatgccttgccagcagtctcccaaagtcttaactcatttcagcattaactcaaagttacaaagtgcaaagtctcatctgggtcaaggctacattctcttttgcctacaagtctctgaaataaaaagcaagttcactgcgtctaaggtacaatgatggtacaggcattgtgtaagctttccatatccaaaagagagacattttccagaaagcttcttatttttatctgaggccccctcagcctggccttcactgtccatgtttt

SEQ ID NO: 598177 - DNA, 607 bp, Homo sapiens
cactgcgtctaaggtacaatgatggtacaggcattgtgtaagctttccatatccaaaagagagacattttccagaaagcttcttatttttatctgaggcyccctcagcctggccttcactgtccatgtttttgtcagcattcttgtcacagccatttaaccagtctctaagatgatccaaaaatgttctcatctgtcttctttggagccctccaaactcttccaacctctacccattacccagttccgaagttgcttccacatttttaggtatctttatagcagtgctccagtcctcatttgacatttttggtaagatttatcttgaaaaagaggtttaattggctcatggttctgcagagtggacaggaagcttagtgcttctgcttctggggggcctcagaaatctttcaatcattgtgcaaggtaatgaaagagtgaattgtctcacatggcaagaggaaatcacggagagtagggagtgatatagagttttcagtggccagatctcacgagaagtcactcatgattgtgaggacagtaccaaggggatggtgctgaaccactcatgagaaatttgccttcatgattcaatcaccttataccag

SEQ ID NO: 598178 - DNA, 607 bp, Homo sapiens
cactgcgtctaaggtacaatgatggtacaggcattgtgtaagctttccatatccaaaagagagacattttccagaaagcttcttatttttatctgaggccccctcagcctggccttcactgtccatgtttttgtcagcattcttgtcacakccatttaaccagtctctaagatgatccaaaaatgttctcatctgtcttctttggagccctccaaactcttccaacctctacccattacccagttccgaagttgcttccacatttttaggtatctttatagcagtgctccagtcctcatttgacatttttggtaagatttatcttgaaaaagaggtttaattggctcatggttctgcagagtggacaggaagcttagtgcttctgcttctggggggcctcagaaatctttcaatcattgtgcaaggtaatgaaagagtgaattgtctcacatggcaagaggaaatcacggagagtagggagtgatatagagttttcagtggccagatctcacgagaagtcactcatgattgtgaggacagtaccaaggggatggtgctgaaccactcatgagaaatttgccttcatgattcaatcaccttataccag

SEQ ID NO: 598179 - DNA, 607 bp, Homo sapiens
cactgcgtctaaggtacaatgatggtacaggcattgtgtaagctttccatatccaaaagagagacattttccagaaagcttcttatttttatctgaggccccctcagcctggccttcactgtccatgtttttgtcagcattcttgtcacagmcatttaaccagtctctaagatgatccaaaaatgttctcatctgtcttctttggagccctccaaactcttccaacctctacccattacccagttccgaagttgcttccacatttttaggtatctttatagcagtgctccagtcctcatttgacatttttggtaagatttatcttgaaaaagaggtttaattggctcatggttctgcagagtggacaggaagcttagtgcttctgcttctggggggcctcagaaatctttcaatcattgtgcaaggtaatgaaagagtgaattgtctcacatggcaagaggaaatcacggagagtagggagtgatatagagttttcagtggccagatctcacgagaagtcactcatgattgtgaggacagtaccaaggggatggtgctgaaccactcatgagaaatttgccttcatgattcaatcaccttataccag

SEQ ID NO: 598180 - DNA, 533 bp, Homo sapiens
aagtctctgaaataaaaagcaagttcactgcgtctaaggtacaatgatggtacaggcattgtgtaagctttccatatccaaaagagagacattttccagaaagcttcttatttttatctgaggccccctcagcctggccttcactgtccatgtttttgtcagcattcttgtcacagccatttaaccagtctctaagatgatccaaaaatgttctcatctgtcttctttggagccctccaaactcttccaacctctacccattacccagttccgaagttgcttycacatttttaggtatctttatagcagtgctccagtcctcatttgacatttttggtaagatttatcttgaaaaagaggtttaattggctcatggttctgcagagtggacaggaagcttagtgcttctgcttctggggggcctcagaaatctttcaatcattgtgcaaggtaatgaaagagtgaattgtctcacatggcaagaggaaatcacggagagtagggagtgatatagagttttcagtggccagatc

SEQ ID NO: 598181 - DNA, 628 bp, Homo sapiens
tagagaaaaaccgtattattctgtccctgaccccacaaatctcatgtccttctcacattgcaagatacagtcatgccttgccagcagtctcccaaagtcttaactcatttcagcattaactcaaagttacaaagtgcaaagtctcatctgggtcaaggctacattctcttttgcctacaagtctctgaaataaaaagcaagttcactgcgtctaaggtacaatgatggtacaggcattgtgtaagctttccatatccaaaagagagacattttccagaaagcttcttatttttatctgaggccccctcagcctggccttcactgtccatgtttttgtcagcattcttgtcacagccatttaaccagtctctaagatgatccaaaaatgttctcatctgtcttctttggagccctccaaactcttccaacctctacccattacccagttccgaagttgcttccacattttyaggtatctttatagcagtgctccagtcctcatttgacatttttggtaagatttatcttgaaaaagaggtttaattggctcatggttctgcagagtggacaggaagcttagtgcttctgcttctggggggcctcagaaatctttcaatcattgtgcaag

SEQ ID NO: 598182 - DNA, 628 bp, Homo sapiens
tagagaaaaaccgtattattctgtccctgaccccacaaatctcatgtccttctcacattgcaagatacagtcatgccttgccagcagtctcccaaagtcttaactcatttcagcattaactcaaagttacaaagtgcaaagtctcatctgggtcaaggctacattctcttttgcctacaagtctctgaaataaaaagcaagttcactgcgtctaaggtacaatgatggtacaggcattgtgtaagctttccatatccaaaagagagacattttccagaaagcttcttatttttatctgaggccccctcagcctggccttcactgtccatgtttttgtcagcattcttgtcacagccatttaaccagtctctaagatgatccaaaaatgttctcatctgtcttctttggagccctccaaactcttccaacctctacccattacccagttccgaagttgcttccacatttttaggtatctttatagcartgctccagtcctcatttgacatttttggtaagatttatcttgaaaaagaggtttaattggctcatggttctgcagagtggacaggaagcttagtgcttctgcttctggggggcctcagaaatctttcaatcattgtgcaag

SEQ ID NO: 598183 - DNA, 607 bp, Homo sapiens
cactgcgtctaaggtacaatgatggtacaggcattgtgtaagctttccatatccaaaagagagacattttccagaaagcttcttatttttatctgaggccccctcagcctggccttcactgtccatgtttttgtcagcattcttgtcacagccatttaaccagtctctaagatgatccaaaaatgttctcatctgtcttctttggagccctccaaactcttccaacctctacccattacccagttccgaagttgcttccacatttttaggtatctttatagcagtgctccagtcctcatttgmcatttttggtaagatttatcttgaaaaagaggtttaattggctcatggttctgcagagtggacaggaagcttagtgcttctgcttctggggggcctcagaaatctttcaatcattgtgcaaggtaatgaaagagtgaattgtctcacatggcaagaggaaatcacggagagtagggagtgatatagagttttcagtggccagatctcacgagaagtcactcatgattgtgaggacagtaccaaggggatggtgctgaaccactcatgagaaatttgccttcatgattcaatcaccttataccag

SEQ ID NO: 598184 - DNA, 628 bp, Homo sapiens
tagagaaaaaccgtattattctgtccctgaccccacaaatctcatgtccttctcacattgcaagatacagtcatgccttgccagcagtctcccaaagtcttaactcatttcagcattaactcaaagttacaaagtgcaaagtctcatctgggtcaaggctacattctcttttgcctacaagtctctgaaataaaaagcaagttcactgcgtctaaggtacaatgatggtacaggcattgtgtaagctttccatatccaaaagagagacattttccagaaagcttcttatttttatctgaggccccctcagcctggccttcactgtccatgtttttgtcagcattcttgtcacagccatttaaccagtctctaagatgatccaaaaatgttctcatctgtcttctttggagccctccaaactcttccaacctctacccattacccagttccgaagttgcttccacatttttaggtatctttatagcagtgctccagtcctcatttgacatttttggtaagatttatyttgaaaaagaggtttaattggctcatggttctgcagagtggacaggaagcttagtgcttctgcttctggggggcctcagaaatctttcaatcattgtgcaag

SEQ ID NO: 598185 - DNA, 518 bp, Homo sapiens
aatgagttcaaatgaattgtcaaacgtatgtgggaaaagtggaatcagtttgtgagaaaaaggaaaaaacctcaacagaaatgctgataaagcatcatcccttcatggctagagctgccaggacactagaacaccaaaatcagctagggaaattttgtagaartcccagatgtactaaatgttctgtgaatacacagagatataattataactgttacctgcatgtagagtaaagatgagaaggcattggtcatggtggcagctacctcaggagttacaaagcagacgtggttccaggacagtgtatgtcagggcaaagctgtcctcggaggctattaggagctggttatggcacagacattgtaagtcagatggtctcattactttcaatgacaaaaccaaaattacttttgcatcagccaatacaacggcctggcaagagcacagaaaaaggccctgtgctgttaggtggggacctctgatgcagcacaattccttcattcccttttccaaaaccc

SEQ ID NO: 598186 - DNA, 568 bp, Homo sapiens
tagggaaattttgtagaaatcccagatgtactaaatgttctgtgaatacacagagatataattataactgttacctgcatgtagagtaaagatgagaaggcattggtcatggtggcagctacctcaggagttacaaagcagacgtggttccaggacagtrtatgtcagggcaaagctgtcctcggaggctattaggagctggttatggcacagacattgtaagtcagatggtctcattactttcaatgacaaaaccaaaattacttttgcatcagccaatacaacggcctggcaagagcacagaaaaaggccctgtgctgttaggtggggacctctgatgcagcacaattccttcattcccttttccaaaaccccctcttccaattccactgaagagagaatctgatggaagtgctgtgtaagcaggctcagatatatctaccactatagatagtagaggtgattcacaaatccaagcctatcaaatacatcataaataagttacacgtttaattttttttgaaattagggatcatgatatgaaagttatcagaatcaaaactgtcac

SEQ ID NO: 598187 - DNA, 519 bp, Homo sapiens
aaatgagttcaaatgaattgtcaaacgtatgtgggaaaagtggaatcagtttgtgagaaaaaggaaaaaaactcaacagaaatgctgataaagcatcatcccttcatggctagagctgccaggacactagaacaccaaaatcagctagggaaattttgtagaagtcccagatgtactagatgttctgtgaatacacagagatataattataactgttacctgcatgtagagtaaagatgagaaggcattggtcatggtggcagctacctcaggagttacaaagcagacgtggttccaggacagtgtatgtcagggcaaagctgtcctaggaggctattaggagttggttayggcatagacattgtaagtcagatggtctcattactttcaatgacaaaaccaaaattacttttgtatcagcctaatacaacggcctggcaagagcacagaaaaagtccctgtgctgttaggtggggacctctgatgcagcacaattccttcattcccttctccaaaacc

SEQ ID NO: 598188 - DNA, 568 bp, Homo sapiens
tagggaaattttgtagaaatcccagatgtactaaatgttctgtgaatacacagagatataattataactgttacctgcatgtagagtaaagatgagaaggcattggtcatggtggcagctacctcaggagttacaaagcagacgtggttccaggacagtgtatgtcagggcaaagctgtcctcggaggctattaggagctggttatggcacagacattgtaagtcagatggtctcattactttcaatgacaaaaccaaaattacttttgcatcagccaatacaacggcctggcaagagcacagaaaaaggccctgtgctgttaggtggggacctctgatgcagcacaattccttcattcccttytccaaaaccccctcttccaattccactgaagagagaatctgatggaagtgctgtgtaagcaggctcagatatatctaccactatagatagtagaggtgattcacaaatccaagcctatcaaatacatcataaataagttacacgtttaattttttttgaaattagggatcatgatatgaaagttatcagaatcaaaactgtcac

SEQ ID NO: 598189 - DNA, 386 bp, Homo sapiens
aaaaccaaaattacttttgcatcagccaatacaacggcctggcaagagcacagaaaaaggccctgtgctgttaggtggggacctctgatgcagcacaattccttcattcccttttccaaaaccccctcttccaattccactgaagagagaatctgatggaagtsctgtgtaagcaggctcagatatatctaccactatagatagtagaggtgattcacaaatccaagcctatcaaatacatcataaataagttacacgtttaattttttttgaaattagggatcatgatatgaaagttatcagaatcaaaactgtcactaatgtttaaaaagagaagaagaaacctgaacaaatagattcagagaaggccttgaagagagggttct

SEQ ID NO: 598190 - DNA, 415 bp, Homo sapiens
tgaggacatctatccagcaaccgcctgcccaaacttcaactgayattgaccttgttgttgatctttatagtcaaaggtaactatatcaaaacaattatagaagcctcttcattttcccttatttatttttttctactcccccatacttccaggttgatcatttttcttttaaagaccttgtcttcctttaccatttgaatctatatagtttgctttgtcatgcatattcccattgcagcgccctcctccctaagatgtgtctttttcctttagagagcctttctctgtttgttatttaggtttacaatgagaaggcgtgtaaagtatttttactgtcttcctaggaaaaaatcactgacttacagtatttatatttatttatttacattcctggggatgaggaattaaagatttc

SEQ ID NO: 598191 - DNA, 415 bp, Homo sapiens
tgaggacatctatccagcaaccgcctgcccaaacttcaactgatattgaccttgttgttgatctttatagtcaaaggtaactatatcaaaacaattatagaagcctcttcattttcccttatttatttttttctactcccccatacttccaggttgatcatttttcttttaaagaccttgtcttcctttaccatttgaatctatatagtttgctttgtcatgcatattcccattgcagygccctcctccctaagatgtgtctttttcctttagagagcctttctctgtttgttatttaggtttacaatgagaaggcgtgtaaagtatttttactgtcttcctaggaaaaaatcactgacttacagtatttatatttatttatttacattcctggggatgaggaattaaagatttc

SEQ ID NO: 598192 - DNA, 536 bp, Homo sapiens
ctttaatcaaattactgattgaacttttgatatcaatatctttttcattgtttaatccatctttagggtgaacagggctttataggccaaagttatcacttctatctaaaytgtctgagttacagaactttttgaatttattatgttgtcacaggaagtttcttattgctgtttaaaggagtgtctctcaatatgatgcagaatgcaaactcactgaagggcatatatcctgagtttctgttactgaagccaaaggttgccaatttcttgtagatcctgctagagttaaacttcatttaagtaatcattaaaagctgcatttattccctcacttgaaattttgatttcacactattaggactaatcctctaagtctttgctaagttatgttcctctttttcttgtagcttgactttgatgatctctatatgcaacatcaattgacataaattaaagtacattcagggcaagagagtttctttaaatattactttgttattcaaaataatcacaaaagcactcatcgtaggaaaact

SEQ ID NO: 598193 - DNA, 536 bp, Homo sapiens
ctttaatcaaattactgattgaacttttgatatcaatatctttttcattgtttaatccatctttagggtgaacagggctttataggccaaagttatcacttctatctaaattgtctgagttacagaactttttgaatttattatgttgtcacaggaagtttcttattgctgtttaaaggagtgtctctcaatatgatgcagaatgcaaactcactgaagggcatatatcctgagtttctgttactgaagccaaaggttgccaatttcttgtagatcctgctagagttaaacttcatttaagtaatcattaaaagctgcatttattccctcacttgaaattttgatttcacactattaggactaatcctctaagtctttgctaagttatgttcctctttttcttgtagcttgactytgatgatctctatatgcaacatcaattgacataaattaaagtacattcagggcaagagagtttctttaaatattactttgttattcaaaataatcacaaaagcactcatcgtaggaaaact

SEQ ID NO: 598194 - DNA, 589 bp, Homo sapiens
agatcctgctagagttaaacttcatttaagtaatcattaaaagctgcatttattccctcacttgaaattttgatttcacactattaggactaatcctctaagtctttgctaagttatgttcctctttttcttgtagcttgactttgatgatctctatatgcaacatcaattgacataaattaaagtacattcagggcaagagagtttctttaaatattactttgttattcaaaataatcacaaaagcactcatcgtaggaaaacttgtgaggactcaaatayagggaaatactttttctttctaaggcacaattctctaaagaagttcaccttaatttgaatatacatgggaaaatatccttgttcactaatagtctatattcactctgttttcttctctcatagactagccggttcactattattctccaaatgatgtgtgcttctctagagtccaggctatctgcatatctaatttttcccacaaattactgttttgaattgcactgaattcaattcaaggggatgtcatttataaacagtacaaatatatactgcacgagggatcttagaaatcatatttttggtt

SEQ ID NO: 598195 - DNA, 589 bp, Homo sapiens
agatcctgctagagttaaacttcatttaagtaatcattaaaagctgcatttattccctcacttgaaattttgatttcacactattaggactaatcctctaagtctttgctaagttatgttcctctttttcttgtagcttgactttgatgatctctatatgcaacatcaattgacataaattaaagtacattcagggcaagagagtttctttaaatattactttgttattcaaaataatcacaaaagcactcatcgtaggaaaacttgtgaggactcaaatatagggaaatactttttctttctaaggcacaattctctaaagaagttcaccttaatttgaatatacatgggaaaatatccttgttcactaatagtctatattcactctgttttcttcyctcatagactagccggttcactattattctccaaatgatgtgtgcttctctagagtccaggctatctgcatatctaatttttcccacaaattactgttttgaattgcactgaattcaattcaaggggatgtcatttataaacagtacaaatatatactgcacgagggatcttagaaatcatatttttggtt

SEQ ID NO: 598196 - DNA, 556 bp, Homo sapiens
ttctctaaagaagttcaccttaatttgaatatacatgggaaaatatccttgttcactaatagtctatattcactctgttttcttctctcatagactagccggttcactattattctccaaatgatgtgtgcttctctagagtccaggctatctgcatatctaatttttcccacaaattactgttttgaattgcactgaattcaattcaaggggatgtcatttataaacagtrcaaatatatactgcacgagggatcttagaaatcatatttttggtttgatccataagctcatatgagcgtgcaatgtcaacttttttcatgtttttttaaatccacttaaattctattttaagccatcatctgcctgtgctgttagggcagttagccttcaatcattttaagatgctcccctctaagtactgtgatagtgatagagatataccagtcaggtgtcctaggaagccgactccgagttggagatttgcatacaaggaggttgaaatgatattcccaacacctgtgggagagtggaaagcaataggattgggtggagca

SEQ ID NO: 598197 - DNA, 515 bp, Homo sapiens
acaaattactgttttgaattgcactgaattcaattcaaggggatgtcatttataaacagtacaaatatatactgcacgagggatcttagaaatcatatttttggtttgatccataagctcatatgagcgtgcaatgtcaacttttttcatgtttttttaaatccacttaaattctattttaagccaycatctgcctgtgctgttagggcagttagccttcaatcattttaagatgctcccctctaagtactgtgatagtgatagagatataccagtcaggtgtcctaggaagccgactccgagttggagatttgcatacaaggaggttgaaatgatattcccaacacctgtgggagagtggaaagcaataggattgggtggagcaggaagtcggctggaatgcaatcactatcatggccgcagtccactctacaagatcttggtgagtttacctaatgacctcgaattggagcaagaaaaccaggccattatatttctgtaccaagcagttctcg

SEQ ID NO: 598198 - DNA, 515 bp, Homo sapiens
acaaattactgttttgaattgcactgaattcaattcaaggggatgtcatttataaacagtacaaatatatactgcacgagggatcttagaaatcatatttttggtttgatccataagctcatatgagcgtgcaatgtcaacttttttcatgtttttttaaatccacttaaattctattttaagccatcatctgccwgtgctgttagggcagttagccttcaatcattttaagatgctcccctctaagtactgtgatagtgatagagatataccagtcaggtgtcctaggaagccgactccgagttggagatttgcatacaaggaggttgaaatgatattcccaacacctgtgggagagtggaaagcaataggattgggtggagcaggaagtcggctggaatgcaatcactatcatggccgcagtccactctacaagatcttggtgagtttacctaatgacctcgaattggagcaagaaaaccaggccattatatttctgtaccaagcagttctcg

SEQ ID NO: 598199 - DNA, 515 bp, Homo sapiens
acaaattactgttttgaattgcactgaattcaattcaaggggatgtcatttataaacagtacaaatatatactgcacgagggatcttagaaatcatatttttggtttgatccataagctcatatgagcgtgcaatgtcaacttttttcatgtttttttaaatccacttaaattctattttaagccatcatctgcctgtgctgttagggcagttagccttcaatcattttaagatgstcccctctaagtactgtgatagtgatagagatataccagtcaggtgtcctaggaagccgactccgagttggagatttgcatacaaggaggttgaaatgatattcccaacacctgtgggagagtggaaagcaataggattgggtggagcaggaagtcggctggaatgcaatcactatcatggccgcagtccactctacaagatcttggtgagtttacctaatgacctcgaattggagcaagaaaaccaggccattatatttctgtaccaagcagttctcg

SEQ ID NO: 598200 - DNA, 532 bp, Homo sapiens
cccctctaagtactgtgatagtgatagagatataccagtcaggtgtcctaggaagccgactccgagttggagatttgcatacaaggaggttgaaatgatattcccaacacctgtgggagagtggaaagcaataggattgggtggagcaggaagtcggctggaatgcaatcactatcatggccgcagtccactctacaagatcttggtgagtttacctaatgacctcgaattggagcaagaaaaccaggccattatatttctgtaccaagcagttctcggatgtgggatgtcttgagaagggacatgaacttggatgaaggaactttactgtgctgtgagtattgttgccaggagtcagctgtcaacactcccaggagacgggaaattatgctttagtcactgaggcggcatstagtgtcagaccacagccttgttaaacagagccagaatttggaggatggttggtgggtttaacatttggggcttgacatcttgtccccacaagctgctgctggcctcttccttgtccatt

SEQ ID NO: 598201 - DNA, 532 bp, Homo sapiens
cccctctaagtactgtgatagtgatagagatataccagtcaggtgtcctaggaagccgactccgagttggagatttgcatacaaggaggttgaaatgatattcccaacacctgtgggagagtggaaagcaataggattgggtggagcaggaagtcggctggaatgcaatcactatcatggccgcagtccactctacaagatcttggtgagtttacctaatgacctcgaattggagcaagaaaaccaggccattatatttctgtaccaagcagttctcggatgtgggatgtcttgagaagggacatgaacttggatgaaggaactttactgtgctgtgagtattgttgccaggagtcagctgtcaacactcccaggagacgggaaattatgctttagtcactgaggcggcatgtagtgtcagaccacagccttgttaaacagagccagamtttggaggatggttggtgggtttaacatttggggcttgacatcttgtccccacaagctgctgctggcctcttccttgtccatt

SEQ ID NO: 598202 - DNA, 585 bp, Homo sapiens
aggagtcagctgtcaacactcccaggagacgggaaattatgctttagtcactgaggcggcatgtagtgtcagaccacagccttgttaaacagagccagaatttggaggatggttggtgggtttaacatttggggcttgacatcttgtcmccacaagctgctgctggcctcttccttgtccatttctgtgtgacctgttaaggagccccagcttcctgcttcttctttaccatatttggaatgcaaaaatctacacgtaatttggcccatggacccttctgcttagacatatccttgtagctattttttttttaaaagatgactatgccttctagaatatttctaagaaactgcctaagtcaccactgctcaccaagaggcctttgttttttcctcttcttaaccatgggaaaggaatgtaggagggtagggagtggatattttctaacctggaaaaaactcattttaccctatatgatttttgttagcaaattccttctttgcacttactccacaatctttccaaattctcccaaatgctcaagcttttaaaaaacaaaagacagaaagcaggttattaggtttt

SEQ ID NO: 598203 - DNA, 566 bp, Homo sapiens
tatccttgtagctattttttttttaaaagatgactatgccttctagaatatttctaagaaactgcctaagtcaccactgctcaccaagaggcctttgttttttcctcttcttaaccatgggaaaggaatgtaggagggtagggagtggatattttctaacctggaaaaaactcattttaccctatatratttttgttagcaaattccttctttgcacttactccacaatctttccaaattctcccaaatgctcaagcttttaaaaaacaaaagacagaaagcaggttattaggttttccaacaaaccttttctttctattcctttacatcagtgggcttagaataactctgctcctggaactgggaaaggcacttgggaaaagaaagaaaaaaaaaagctctcaaagtttaacatcacaaaacattatagtcactgctattttattacttatttatttatttatttatttatttttagatggagtcttgttctgccaccaggctggagtgcagtggtgcgatctcggctcactgcaacctccgcgtcctgggttcaagcgattctc

SEQ ID NO: 598204 - DNA, 585 bp, Homo sapiens
aggagtcagctgtcaacactcccaggagacgggaaattatgctttagtcactgaggcggcatgtagtgtcagaccacagccttgttaaacagagccagaatttggaggatggttggtgggtttaacatttggggcttgacatcttgtccccacaagctgctgctggcctcttccttgtccatttctgtgtgacctgttaaggagccccagcttcctgcttcttctttaccatatttggaatgcaaaaatctacacgtaatttggcccatggacccttctgcttagacatatccttgtagctattttttttttaaaagatgactatgccttctagaatatttctaagaaactgcctaagtcaccactgctcaccaagaggcctttgttttttcctcttcttaaccatgggaaaggaatgtaggagggtagggagtggatattttctaacctggaaaaaactcattttaccctatatgatttttgttarcaaattccttctttgcacttactccacaatctttccaaattctcccaaatgctcaagcttttaaaaaacaaaagacagaaagcaggttattaggtttt

SEQ ID NO: 598205 - DNA, 566 bp, Homo sapiens
tatccttgtagctattttttttttaaaagatgactatgccttctagaatatttctaagaaactgcctaagtcaccactgctcaccaagaggcctttgttttttcctcttcttaaccatgggaaaggaatgtaggagggtagggagtggatattttctaacctggaaaaaactcattttaccctatatgatttttgttagcaaattccttctttgcasttactccacaatctttccaaattctcccaaatgctcaagcttttaaaaaacaaaagacagaaagcaggttattaggttttccaacaaaccttttctttctattcctttacatcagtgggcttagaataactctgctcctggaactgggaaaggcacttgggaaaagaaagaaaaaaaaaagctctcaaagtttaacatcacaaaacattatagtcactgctattttattacttatttatttatttatttatttatttttagatggagtcttgttctgccaccaggctggagtgcagtggtgcgatctcggctcactgcaacctccgcgtcctgggttcaagcgattctc

SEQ ID NO: 598206 - DNA, 585 bp, Homo sapiens
aggagtcagctgtcaacactcccaggagacgggaaattatgctttagtcactgaggcggcatgtagtgtcagaccacagccttgttaaacagagccagaatttggaggatggttggtgggtttaacatttggggcttgacatcttgtccccacaagctgctgctggcctcttccttgtccatttctgtgtgacctgttaaggagccccagcttcctgcttcttctttaccatatttggaatgcaaaaatctacacgtaatttggcccatggacccttctgcttagacatatccttgtagctattttttttttaaaagatgactatgccttctagaatatttctaagaaactgcctaagtcaccactgctcaccaagaggcctttgttttttcctcttcttaaccatgggaaaggaatgtaggagggtagggagtggatattttctaacctggaaaaaactcattttaccctatatgatttttgttagcaaattccttctttgcacttactccacaatctttccaaattctccsaaatgctcaagcttttaaaaaacaaaagacagaaagcaggttattaggtttt

SEQ ID NO: 598207 - DNA, 566 bp, Homo sapiens
tatccttgtagctattttttttttaaaagatgactatgccttctagaatatttctaagaaactgcctaagtcaccactgctcaccaagaggcctttgttttttcctcttcttaaccatgggaaaggaatgtaggagggtagggagtggatattttctaacctggaaaaaactcattttaccctatatgatttttgttagcaaattccttctttgcacttactccacaatctttccaaattctcccaaatgctcaagcttttaaaaaacaaaagacagaaagcaggttattaggttttccamcaaaccttttctttctattcctttacatcagtgggcttagaataactctgctcctggaactgggaaaggcacttgggaaaagaaagaaaaaaaaaagctctcaaagtttaacatcacaaaacattatagtcactgctattttattacttatttatttatttatttatttatttttagatggagtcttgttctgccaccaggctggagtgcagtggtgcgatctcggctcactgcaacctccgcgtcctgggttcaagcgattctc

SEQ ID NO: 598208 - DNA, 569 bp, Homo sapiens
aaaaagctctcaaagtttaacatcacaaaacattatagtcactgctattttattayttatttatttatttatttatttatttttagatggagtcttgttctgccaccaggctggagtgcagtggtgcgatctcggctcactgcaacctccgcgtcctgggttcaagcgattctcctgcttcagcctactgagtagctgggactacaggcgtgtgtcaccacacccagctaatttttgtatttttagtagagacggggtttcaccatattagccaggatgatctcgatctcctgaccttgtgatccgcccgccttggcctcccaaagtgctgggattacaggcatgagccaccgtgagtgaccttgctttgtaatttttacatcatatatcccctgtgttagaccaagagcttgtaaaaaccagaagacatacaccatttatagttcaattagagatgttcactgataaaacttattcttccatctgagggtggtatttgtagttacagtaatgtagatgacaatctaagttatgttctataaactgtgtcactgacatctcaatctaca

SEQ ID NO: 598209 - DNA, 566 bp, Homo sapiens
tatccttgtagctattttttttttaaaagatgactatgccttctagaatatttctaagaaactgcctaagtcaccactgctcaccaagaggcctttgttttttcctcttcttaaccatgggaaaggaatgtaggagggtagggagtggatattttctaacctggaaaaaactcattttaccctatatgatttttgttagcaaattccttctttgcacttactccacaatctttccaaattctcccaaatgctcaagcttttaaaaaacaaaagacagaaagcaggttattaggttttccaacaaaccttttctttctattcctttacatcagtgggcttagaataactctgctcctggaactgggaaaggcacttgggaaaagaaagaaaaaaaaaagctctcaaagtttaacatcacaaaacattatagtcactgctattttattacttatttatttatttatttatttatttttagatggagtcttgttctgccaccaggctggagtgcagtggtgcgatctcrgctcactgcaacctccgcgtcctgggttcaagcgattctc

SEQ ID NO: 598210 - DNA, 569 bp, Homo sapiens
aaaaagctctcaaagtttaacatcacaaaacattatagtcactgctattttattacttatttatttatttatttatttatttttagatggagtcttgttctgccaccaggctggagtgcagtggtgcgatctcggctcactgcaacctcmgcgtcctgggttcaagcgattctcctgcttcagcctactgagtagctgggactacaggcgtgtgtcaccacacccagctaatttttgtatttttagtagagacggggtttcaccatattagccaggatgatctcgatctcctgaccttgtgatccgcccgccttggcctcccaaagtgctgggattacaggcatgagccaccgtgagtgaccttgctttgtaatttttacatcatatatcccctgtgttagaccaagagcttgtaaaaaccagaagacatacaccatttatagttcaattagagatgttcactgataaaacttattcttccatctgagggtggtatttgtagttacagtaatgtagatgacaatctaagttatgttctataaactgtgtcactgacatctcaatctaca

SEQ ID NO: 598211 - DNA, 600 bp, Homo sapiens
tctgctcctggaactgggaaaggcacttgggaaaagaaagaaaaaaaaaagctctcaaagtttaacatcacaaaacattatagtcactgctattttattacttatttatttatttatttatttatttttagatggagtcttgttctgccaccaggctggagtgcagtggtgcgatctcggctcactgcaacctccgcgtcctgggttcaagcgattctcctgcttcagcctactgagtagctgggactacaggcgtgtgtcaccacacccagctaatttttgtatttttagtagagacggggtttcaccatattagccaggatgatctcgatctcctgaccttgtgatccgcccrccttggcctcccaaagtgctgggattacaggcatgagccaccgtgagtgaccttgctttgtaatttttacatcatatatcccctgtgttagaccaagagcttgtaaaaaccagaagacatacaccatttatagttcaattagagatgttcactgataaaacttattcttccatctgagggtggtatttgtagttacagtaatgtagatgacaatctaagttatgttctataaactgtgtcactga

SEQ ID NO: 598212 - DNA, 544 bp, Homo sapiens
  misc_feature 376: n = A,T,C or G
gctttgtaatttttacatcatatatcccctgtgttagaccaagagcttgtaaaaaccagaagacatacaccatttatagttcaattagagatgttcactgataaaacttattcttccatctgagggtggtayttgtagttacagtaatgtagatgacaatctaagttatgttctataaactgtgtcactgacatctcaatctacagctaactttaattttttaaaagcagaggagtgggttgtataggtttagaaatacattcatcaagctagttaagtgagatagattcaaaccttcaactcactggaatatttaccaaattgactattcattagctaaaggagccatataaacaaggtactttttaaaattcanaattatgtaaggttttgtttcctttttatgctgttatgaattggattgtagaggttataaggtaaaataaggttacttttacagtaaagcatacaacacattgtcacaagagggcagcctttgaacatgaatttcttctcaggcattccttgaaattttgagacagtt

SEQ ID NO: 598213 - DNA, 569 bp, Homo sapiens
aaaaagctctcaaagtttaacatcacaaaacattatagtcactgctattttattacttatttatttatttatttatttatttttagatggagtcttgttctgccaccaggctggagtgcagtggtgcgatctcggctcactgcaacctccgcgtcctgggttcaagcgattctcctgcttcagcctactgagtagctgggactacaggcgtgtgtcaccacacccagctaatttttgtatttttagtagagacggggtttcaccatattagccaggatgatctcgatctcctgaccttgtgatccgcccgccttggcctcccaaagtgctgggattacaggcatgagccaccgtgagtgaccttgctttgtaatttttacatcatatatcccctgtgttagaccaagagcttgtaaaaaccagaagacatacaccatttatagttcaattagagatgttcactgataaaacttattcttccatctgagggtggtatttgtagttacagtaatgtagatgacaatctaagttatgttctatraactgtgtcactgacatctcaatctaca

SEQ ID NO: 598214 - DNA, 544 bp, Homo sapiens
  misc_feature 376: n = A,T,C or G
gctttgtaatttttacatcatatatcccctgtgttagaccaagagcttgtaaaaaccagaagacatacaccatttatagttcaattagagatgttcactgataaaacttattcttccatctgagggtggtatttgtagttacagtaatgtagatgacaatctaagttatgttctataaactgtgtcactgacatctcaatctacagctaactttaattttttaaaagcagaggagtgggttstataggtttagaaatacattcatcaagctagttaagtgagatagattcaaaccttcaactcactggaatatttaccaaattgactattcattagctaaaggagccatataaacaaggtactttttaaaattcanaattatgtaaggttttgtttcctttttatgctgttatgaattggattgtagaggttataaggtaaaataaggttacttttacagtaaagcatacaacacattgtcacaagagggcagcctttgaacatgaatttcttctcaggcattccttgaaattttgagacagtt

SEQ ID NO: 598215 - DNA, 544 bp, Homo sapiens
  misc_feature 376: n = A,T,C or G
gctttgtaatttttacatcatatatcccctgtgttagaccaagagcttgtaaaaaccagaagacatacaccatttatagttcaattagagatgttcactgataaaacttattcttccatctgagggtggtatttgtagttacagtaatgtagatgacaatctaagttatgttctataaactgtgtcactgacatctcaatctacagctaactttaattttttaaaagcagaggagtgggttgtataggtttagaaatacattcatcaagctagttaagtgagatagattcaaaccttcaactcactggaatatttaccaaattgactattcattagctaaaggagccatayaaacaaggtactttttaaaattcanaattatgtaaggttttgtttcctttttatgctgttatgaattggattgtagaggttataaggtaaaataaggttacttttacagtaaagcatacaacacattgtcacaagagggcagcctttgaacatgaatttcttctcaggcattccttgaaattttgagacagtt

SEQ ID NO: 598216 - DNA, 544 bp, Homo sapiens
  misc_feature 376: n = A,T,C or G
gctttgtaatttttacatcatatatcccctgtgttagaccaagagcttgtaaaaaccagaagacatacaccatttatagttcaattagagatgttcactgataaaacttattcttccatctgagggtggtatttgtagttacagtaatgtagatgacaatctaagttatgttctataaactgtgtcactgacatctcaatctacagctaactttaattttttaaaagcagaggagtgggttgtataggtttagaaatacattcatcaagctagttaagtgagatagattcaaaccttcaactcactggaatatttaccaaattgactattcattagctaaaggagccatataaacaaggtackttttaaaattcanaattatgtaaggttttgtttcctttttatgctgttatgaattggattgtagaggttataaggtaaaataaggttacttttacagtaaagcatacaacacattgtcacaagagggcagcctttgaacatgaatttcttctcaggcattccttgaaattttgagacagtt

SEQ ID NO: 598217 - DNA, 481 bp, Homo sapiens
  misc_feature 28: n = A,T,C or G
tataaacaaggtactttttaaaattcanaattatgtaaggttttgtttcctttttatgctgttatgaattggattgtagaggttataaggtaaaataaggttacttttacagtaaagcatacaacacattgtcacaagagggcagcctttgaacatgaatttcttctcaggcattccttgaaattttgagacagttactttaattaacacaactaaataataaaacactacagaggatctaagaagatactttgacttatgcatattgttacttttttattactgctagtggaagatgtaatctacaaggaaggcaagggctgaatttgttttatgtaaraagacaaatttctttgggttttagctttcaaacaagatagtaggtcaatgtctaaatgagtgtatcaaagttctcacactagcacatgtaaatccacctcttatctacccaaaactctaaccaagcaaaggcaagttggaa

SEQ ID NO: 598218 - DNA, 643 bp, Homo sapiens
cataaatgccactggattttatgtttttaacttkcaacctcccaagttcactaagagacatgttatttggagaggttgctaaagtgtagttgtatgatgtctctgtgtatggttggtctggacctctttctgtccagtggttgccctcaattgattagagtcacctctctaaagatcatgcttacgtccctggagcagtccacagcactatcaatgtctgacctccacctttttccaattaatatttctgtacttactgaattggaaaacatacaggtgttttttgcctggtcacttgtggttttacaacactccccccgcttccgcaccactgccccaggtgattttgttgccagccaaagtgtgagaactactggcagctgctggcagacagcagcaaaggcccaaatcctcggtgtgatttcaagacccctatctagttttcagccatatttccttctccttctcacagctgagcccactcctcctgcctcaccacctgtaggctatgctttccagcctgtgtccaggattagtcctgatgtaaggcacgtggggtttaaggatctctctcttcagtcttatttccgcaccatcgctgacacatatattccagttgtaatcatggggctacctccttttc

SEQ ID NO: 598219 - DNA, 486 bp, Homo sapiens
gcacatgtaaatccacctcttatctacccaaaactctaaccaagcaaaggcaagttggaagaatcagacaaatgtaagtgcctaggatacataaatgccactggattttatgtttttaactttcaacctcccaagttcactaagagacatgttatttggagaggttgctaaagtgtagttgtatgatgtctctgtgtatggttggtctggacytctttctgtccagtggttgccctcaattgattagagtcacctctctaaagatcatgcttacgtccctggagcagtccacagcactatcaatgtctgacctccacctttttccaattaatatttctgtacttactgaattggaaaacatacaggtgttttttgcctggtcacttgtggttttacaacactccccccgcttccgcaccactgccccaggtgattttgttgccagccaaagtgtgagaactactggcagctgctggcagacagcag

SEQ ID NO: 598220 - DNA, 486 bp, Homo sapiens
gcacatgtaaatccacctcttatctacccaaaactctaaccaagcaaaggcaagttggaagaatcagacaaatgtaagtgcctaggatacataaatgccactggattttatgtttttaactttcaacctcccaagttcactaagagacatgttatttggagaggttgctaaagtgtagttgtatgatgtctctgtgtatggttggtctggacctctttctgtccagtggttgccctcaattgattagagtcacctctctaaagatcatgcttacgtccctggagcagtccacagcactatcaatgtctgacctccacctttttccaattaatatttctgtacttactgaattggaaaacatacaggtgttttttgcctggtcacttgtggttttacaacactccccscgcttccgcaccactgccccaggtgattttgttgccagccaaagtgtgagaactactggcagctgctggcagacagcag

SEQ ID NO: 598221 - DNA, 486 bp, Homo sapiens
gcacatgtaaatccacctcttatctacccaaaactctaaccaagcaaaggcaagttggaagaatcagacaaatgtaagtgcctaggatacataaatgccactggattttatgtttttaactttcaacctcccaagttcactaagagacatgttatttggagaggttgctaaagtgtagttgtatgatgtctctgtgtatggttggtctggacctctttctgtccagtggttgccctcaattgattagagtcacctctctaaagatcatgcttacgtccctggagcagtccacagcactatcaatgtctgacctccacctttttccaattaatatttctgtacttactgaattggaaaacatacaggtgttttttgcctggtcacttgtggttttacaacactccccccgcttccgcaccactgycccaggtgattttgttgccagccaaagtgtgagaactactggcagctgctggcagacagcag

SEQ ID NO: 598222 - DNA, 593 bp, Homo sapiens
cctgcctcaccacctgtaggctatgctttccagcctgtgtccaggattagtcctgatgtaaggcacgtggggtttaaggatctctctcttcagtcttatttccgcaccatcgctgacacatatattccagttgtaatcatggggctacctccttttctttccagtcccatgctcattttctctatcacattctaccttgtaataacctaaatcttctggtgggcaagcttcttcctcaatcaaatttgtgtttatgattgtgttggggattggcttagtaatccaggtactgctgctgccttgaaagckgagactgcatccttctgtctggatatcttgagtttctggattgtaaaccttattaggacccatttttcctagaattggagcctctactttgttcttgctactttagttcgcccagaaatcacgatctctgcccgaatttcaaagtgttggctagcttaaatatccttttgtgagactttcgtcttcctgcggggtgattttttcatcttacataccattgctaatctttttatcttgaatgtaattgaaatagttttaatctgtgttacaagcaacaagaaccc

SEQ ID NO: 598223 - DNA, 517 bp, Homo sapiens
agttttcagccatatttccttctccttctcacagctgagcccactcctcctgcctcaccacctgtaggctatgctttccagcctgtgtccaggattagtcctgatgtaaggcacgtggggtttaaggatctctctcttcagtcttatttccgcaccatcgctgacacatatattccagttgtaatcatggggctacctccttttctttccagtcccatgctcattttctctatcacattctaccttgtaataacctaaatcttctggtgggcaagcttcttcctcaatcaaatttgtgtttatgattgtgttggggattggcttagtaatccaggtactgctgctgccttgaaagcggagactgcatccttctgtctggatatcttgagtttctggattgtaaaccttattaggacccatttttcctagaattggagcctctactttgttcttgctactttagttcrcccagaaatcacgatctctgcccgaatttcaaagtgttggctagcttaaa

SEQ ID NO: 598224 - DNA, 505 bp, Homo sapiens
tatttccttctccttctcacagctgagcccactcctcctgcctcaccacctgtaggctatgctttccagcctgtgtccaggattagtcctgatgtaaggcacgtggggtttaaggatctctctcttcagtcttatttccgcaccatcgctgacacatatattccagttgtaatcatggggctacctccttttctttccagtcccatgctcattttctctatcacattctaccttgtaataacctaaatcttctggtgggcaagcttcttcctcaatcaaatttgtgtttatgattgtgttggggattggcttagtaatccaggtactgctgctgccttgaaagcggagactgcatccttctgtctggatatcttgagtttctggattgtaaaccttattaggacccatttttcctagaattggagcctctactttgttcttgctactttagttcgcccagaaatcacgatctctgccygaatttcaaagtgttggctagcttaaa

SEQ ID NO: 598225 - DNA, 593 bp, Homo sapiens
cctgcctcaccacctgtaggctatgctttccagcctgtgtccaggattagtcctgatgtaaggcacgtggggtttaaggatctctctcttcagtcttatttccgcaccatcgctgacacatatattccagttgtaatcatggggctacctccttttctttccagtcccatgctcattttctctatcacattctaccttgtaataacctaaatcttctggtgggcaagcttcttcctcaatcaaatttgtgtttatgattgtgttggggattggcttagtaatccaggtactgctgctgccttgaaagcggagactgcatccttctgtctggatatcttgagtttctggattgtaaaccttattaggacccatttttcctagaattggagcctctactttgttcttgctactttagttcgcccagaaatcacgatctctgcccgaatttcaaagtgttggctagcttaaatatccttttgtgagactttcgtcttcctgcggggtgattttttcatcttacataccattgytaatctttttatcttgaatgtaattgaaatagttttaatctgtgttacaagcaacaagaaccc

SEQ ID NO: 598226 - DNA, 589 bp, Homo sapiens
tccccctccgtgtgttgaatttatgtcagagccaggttctttcctatttgacgtctctcaccaaattccagtgtttatgtcctaggaggtgccyaataaattctagagttgatacaagctgcaattttagagaaattaaattagcaagtaaaattagattatatacaacctaatcaacttttttttttttctgaggatgaccaagatttgggcttcagtgacaatagttgtcccctaaatatttatactcaaaatctaggatcaccagtacaatgttgaatagaggtgatgaacacacacatccctttcttgtcctaatctatgtggtttaaacatttacgctttcaccattaaatatagtattgtttatatgttttgttgtggatgctttccatcacttcgagaaaatttctttatctagcttgctgagagtttttttttttaaatcagcaatagattttctccaaagaaaatatccacatgaccaacagatacagaaaaaaatgcgcagcatcactatcaagggaaatgcaaatcaaaaccacaaagagatattgcctcaaagccctttagaatggtcttattaaaa

SEQ ID NO: 598227 - DNA, 589 bp, Homo sapiens
tccccctccgtgtgttgaatttatgtcagagccaggttctttcctatttgacgtctctcaccaaattccagtgtttatgtcctaggaggtgcccaataaattctagagttgatacaarctgcaattttagagaaattaaattagcaagtaaaattagattatatacaacctaatcaacttttttttttttctgaggatgaccaagatttgggcttcagtgacaatagttgtcccctaaatatttatactcaaaatctaggatcaccagtacaatgttgaatagaggtgatgaacacacacatccctttcttgtcctaatctatgtggtttaaacatttacgctttcaccattaaatatagtattgtttatatgttttgttgtggatgctttccatcacttcgagaaaatttctttatctagcttgctgagagtttttttttttaaatcagcaatagattttctccaaagaaaatatccacatgaccaacagatacagaaaaaaatgcgcagcatcactatcaagggaaatgcaaatcaaaaccacaaagagatattgcctcaaagccctttagaatggtcttattaaaa

SEQ ID NO: 598228 - DNA, 589 bp, Homo sapiens
tccccctccgtgtgttgaatttatgtcagagccaggttctttcctatttgacgtctctcaccaaattccagtgtttatgtcctaggaggtgcccaataaattctagagttgatacaagctgcaattttagagaaattaaattagcaagtaraattagattatatacaacctaatcaacttttttttttttctgaggatgaccaagatttgggcttcagtgacaatagttgtcccctaaatatttatactcaaaatctaggatcaccagtacaatgttgaatagaggtgatgaacacacacatccctttcttgtcctaatctatgtggtttaaacatttacgctttcaccattaaatatagtattgtttatatgttttgttgtggatgctttccatcacttcgagaaaatttctttatctagcttgctgagagtttttttttttaaatcagcaatagattttctccaaagaaaatatccacatgaccaacagatacagaaaaaaatgcgcagcatcactatcaagggaaatgcaaatcaaaaccacaaagagatattgcctcaaagccctttagaatggtcttattaaaa

SEQ ID NO: 598229 - DNA, 417 bp, Homo sapiens
atacaacctaatcaacttttttttttttctgaggatgaccaagatttgggcttcagtgacaatagttgtcccctaaatatttatactcaaaatctaggatcaccagtamaatgttgaatagaggtgatgaacacacacatccctttcttgtcctaatctatgtggtttaaacatttacgctttcaccattaaatatagtattgtttatatgttttgttgtggatgctttccatcacttcgagaaaatttctttatctagcttgctgagagtttttttttttaaatcagcaatagattttctccaaagaaaatatccacatgaccaacagatacagaaaaaaatgcgcagcatcactatcaagggaaatgcaaatcaaaaccacaaagagatattgcctcaaagccctttagaatggt

SEQ ID NO: 598230 - DNA, 549 bp, Homo sapiens
gttgatacaagctgcaattttagagaaattaaattagcaagtaaaattagattatatacaacctaatcaacttttttttttttctgaggatgaccaagatttgggcttcagtgacaatagttgtcccctaaatatttatactcaaaatctaggatcaccagtacaatgttgaatagaggtgatgaacacacacatcyctttcttgtcctaatctatgtggtttaaacatttacgctttcaccattaaatatagtattgtttatatgttttgttgtggatgctttccatcacttcgagaaaatttctttatctagcttgctgagagtttttttttttaaatcagcaatagattttctccaaagaaaatatccacatgaccaacagatacagaaaaaaatgcgcagcatcactatcaagggaaatgcaaatcaaaaccacaaagagatattgcctcaaagccctttagaatggtcttattaaaagaaaaagataacgagtgttaacaatggggagaaattggaacacttctacagtgtttctgggaaagta

SEQ ID NO: 598231 - DNA, 612 bp, Homo sapiens
gattatatacaacctaatcaacttttttttttttctgaggatgaccaagatttgggcttcagtgacaatagttgtcccctaaatatttatactcaaaatctaggatcaccagtacaatgttgaatagaggtgatgaacacacacatccctttcttgtcctaatctatgtggtttaaacatttacrctttcaccattaaatatagtattgtttatatgttttgttgtggatgctttccatcacttcgagaaaatttctttatctagcttgctgagagtttttttttttaaatcagcaatagattttctccaaagaaaatatccacatgaccaacagatacagaaaaaaatgcgcagcatcactatcaagggaaatgcaaatcaaaaccacaaagagatattgcctcaaagccctttagaatggtcttattaaaagaaaaagataacgagtgttaacaatggggagaaattggaacacttctacagtgtttctgggaaagtaaaactgtgcatcctctatggaaaacagtacggtggttcctcaaataaattaagaaattagaactagcatatgatctagtagtctcacttcaggttatttatctgaaagaatg

SEQ ID NO: 598232 - DNA, 417 bp, Homo sapiens
atacaacctaatcaacttttttttttttctgaggatgaccaagatttgggcttcagtgacaatagttgtcccctaaatatttatactcaaaatctaggatcaccagtacaatgttgaatagaggtgatgaacacacacatccctttcttgtcctaatctatgtggtttaaacatttacgctttcacmattaaatatagtattgtttatatgttttgttgtggatgctttccatcacttcgagaaaatttctttatctagcttgctgagagtttttttttttaaatcagcaatagattttctccaaagaaaatatccacatgaccaacagatacagaaaaaaatgcgcagcatcactatcaagggaaatgcaaatcaaaaccacaaagagatattgcctcaaagccctttagaatggt

SEQ ID NO: 598233 - DNA, 417 bp, Homo sapiens
atacaacctaatcaacttttttttttttctgaggatgaccaagatttgggcttcagtgacaatagttgtcccctaaatatttatactcaaaatctaggatcaccagtacaatgttgaatagaggtgatgaacacacacatccctttcttgtcctaatctatgtggtttaaacatttacgctttcaccattaaatatartattgtttatatgttttgttgtggatgctttccatcacttcgagaaaatttctttatctagcttgctgagagtttttttttttaaatcagcaatagattttctccaaagaaaatatccacatgaccaacagatacagaaaaaaatgcgcagcatcactatcaagggaaatgcaaatcaaaaccacaaagagatattgcctcaaagccctttagaatggt

SEQ ID NO: 598234 - DNA, 612 bp, Homo sapiens
gattatatacaacctaatcaacttttttttttttctgaggatgaccaagatttgggcttcagtgacaatagttgtcccctaaatatttatactcaaaatctaggatcaccagtacaatgttgaatagaggtgatgaacacacacatccctttcttgtcctaatctatgtggtttaaacatttacgctttcaccattaaatatagtattgtttatatgttttgttgtggatgctttccatcacttcgagaaaatttctttatctagcttgctgagagtttttttttttaaatcagcaatagattttctccaaagaaaatatccacatgaccaacagatacagaaaaaaatgcgcagcatcactatcaagggaaatgcaaatcaaaaccacaaagagatattgcctcaaagccctttagaatggtcttattaaaagaaaaagataacgagtgttaacaatggggagaaattggaacacttctacagtgtttctgggaaagtaaaactgtgcatcctctatggaaaacagtacggtggttcctcaaawaaattaagaaattagaactagcatatgatctagtagtctcacttcaggttatttatctgaaagaatg

SEQ ID NO: 598235 - DNA, 509 bp, Homo sapiens
atttctttatctagcttgctgagagtttttttttttaaatcagcaatagattttctccaaagaaaatatccacatgaccaacagatacagaaaaaaatgcgcagcatcactatcaagggaaatgcaaatcaaaaccacaaagagatattgcctcaaagccctttagaatggtcttattaaaagaaaaagataacgagtgttaacaatggggagaaattggaacacttctacagtgtttctgggaaagtaaaactgtgcatcctctatggaaaacagtacggtggttcctcaaataaattaagaaaktagaactagcatatgatctagtagtctcacttcaggttatttatctgaaagaatggagattgggatgattctcaggttcattgcagcattatttacactaattaaaatgtgggaataaggttaatgtctattggcagatgaaaagataaagaaaatgtggtatattcatacaacggaatattattcagctttaaaacaagaaa

SEQ ID NO: 598236 - DNA, 612 bp, Homo sapiens
gattatatacaacctaatcaacttttttttttttctgaggatgaccaagatttgggcttcagtgacaatagttgtcccctaaatatttatactcaaaatctaggatcaccagtacaatgttgaatagaggtgatgaacacacacatccctttcttgtcctaatctatgtggtttaaacatttacgctttcaccattaaatatagtattgtttatatgttttgttgtggatgctttccatcacttcgagaaaatttctttatctagcttgctgagagtttttttttttaaatcagcaatagattttctccaaagaaaatatccacatgaccaacagatacagaaaaaaatgcgcagcatcactatcaagggaaatgcaaatcaaaaccacaaagagatattgcctcaaagccctttagaatggtcttattaaaagaaaaagataacgagtgttaacaatggggagaaattggaacacttctacagtgtttctgggaaagtaaaactgtgcatcctctatggaaaacagtacggtggttcctcaaataaattaagaaattagaactagcatatgatctagtartctcacttcaggttatttatctgaaagaatg

SEQ ID NO: 598237 - DNA, 327 bp, Homo sapiens
gtacggtggttcctcaaataaattaagaaattagaactagcatatgatctagtagtctcacttcaggttatttatctgaaagaatggagattgggatgattctcaggytcattgcagcattatttacactaattaaaatgtgggaataaggttaatgtctattggcagatgaaaagataaagaaaatgtggtatattcatacaacggaatattattcagctttaaaacaagaaagcccgtcaatatgcaacatggatgaacctagaggacattaatgctaagtaaagtaaatcagtcacagaaggacaaactgtatgattccacttg

SEQ ID NO: 598238 - DNA, 327 bp, Homo sapiens
gtacggtggttcctcaaataaattaagaaattagaactagcatatgatctagtagtctcacttcaggttatttatctgaaagaatggagattgggatgattctcaggttcattgcagcattatttacactaattaaaatgtggraataaggttaatgtctattggcagatgaaaagataaagaaaatgtggtatattcatacaacggaatattattcagctttaaaacaagaaagcccgtcaatatgcaacatggatgaacctagaggacattaatgctaagtaaagtaaatcagtcacagaaggacaaactgtatgattccacttg

SEQ ID NO: 598239 - DNA, 589 bp, Homo sapiens
ttcatacaacggaatattattcagctttaaaacaagaaagcccgtcaatatgcaacatggatgaacctagaggacattaatgctaagtaaagtaaatcagtcacagaaggacaaactgtatgattccacttgtataaagtatctaagatagccaaattcattagaatcacagattagaatggtgatagctctttaarttgaagtcaattttgcattcctaggttttgtaattttggtatcaggattctgactcataaaacaagtttggaatttcccccttctttatttctgaaataatttaaaaattttattttttttaaacgtttgaaagaattcaccagtgaaattctttagatctggggtttgcttatttttttatttatttaattttatgtttttatgtgcaggtattttacaattaatttaattactttaataaatgtcaattacttcctatgttccattaaatcttgtgaaattttttataagtttttttcaaggaagtcaccctttcatccaagtaatgaaaatttgtatataatgtttcacaatattccgttatcttgttaatgtctcttgtgtctacaac

SEQ ID NO: 598240 - DNA, 628 bp, Homo sapiens
cccccttctttatttctgaaataatttaaaaattttattttttttaaacgtttgaaagaattcaccagtgaaattctttagatctggggtttgcttatttttttatttatttaattttatgtttttatgtgcaggtattttacaattaatttaattactttaataaatgtcaattacttcmtatgttccattaaatcttgtgaaattttttataagtttttttcaaggaagtcaccctttcatccaagtaatgaaaatttgtatataatgtttcacaatattccgttatcttgttaatgtctcttgtgtctacaactgtacaatctcattaatccctgatacgtataatttgcgttttctttctttctcacagaactaacttttggccatgttgattttctcctgtttctgttttctgtctcattgatttctaatttctgttttatttcctttcctctacttgttttggacttaatttgctctcttgttttagattttctttttaaggtagaaattagttcacttgttttgaacttctcttttctagaataagcatttatacaaaaaatttactctgggtctgcttaactttatcccatacattttgatatagtatatttttatttgt

SEQ ID NO: 598241 - DNA, 628 bp, Homo sapiens
cccccttctttatttctgaaataatttaaaaattttattttttttaaacgtttgaaagaattcaccagtgaaattctttagatctggggtttgcttatttttttatttatttaattttatgtttttatgtgcaggtattttacaattaatttaattactttaataaatgtcaattacttcctatgttccattaaatcttgtgaawttttttataagtttttttcaaggaagtcaccctttcatccaagtaatgaaaatttgtatataatgtttcacaatattccgttatcttgttaatgtctcttgtgtctacaactgtacaatctcattaatccctgatacgtataatttgcgttttctttctttctcacagaactaacttttggccatgttgattttctcctgtttctgttttctgtctcattgatttctaatttctgttttatttcctttcctctacttgttttggacttaatttgctctcttgttttagattttctttttaaggtagaaattagttcacttgttttgaacttctcttttctagaataagcatttatacaaaaaatttactctgggtctgcttaactttatcccatacattttgatatagtatatttttatttgt

SEQ ID NO: 598242 - DNA, 628 bp, Homo sapiens
cccccttctttatttctgaaataatttaaaaattttattttttttaaacgtttgaaagaattcaccagtgaaattctttagatctggggtttgcttatttttttatttatttaattttatgtttttatgtgcaggtattttacaattaatttaattactttaataaatgtcaattacttcctatgttccattaaatcttgtgaaattttttataagtttttttcaaggaagtcaccctttcatccaagtaatgaaaatttgtatataatgtttcacaatattccrttatcttgttaatgtctcttgtgtctacaactgtacaatctcattaatccctgatacgtataatttgcgttttctttctttctcacagaactaacttttggccatgttgattttctcctgtttctgttttctgtctcattgatttctaatttctgttttatttcctttcctctacttgttttggacttaatttgctctcttgttttagattttctttttaaggtagaaattagttcacttgttttgaacttctcttttctagaataagcatttatacaaaaaatttactctgggtctgcttaactttatcccatacattttgatatagtatatttttatttgt

SEQ ID NO: 598243 - DNA, 416 bp, Homo sapiens
tgttccattaaatcttgtgaaattttttataagtttttttcaaggaagtcaccctttcatccaagtaatgaaaatttgtatataatgtttcacaatattccgttatcttgttaatgtctcttgtgtctacaactgtacaatctcattaatccctgataygtataatttgcgttttctttctttctcacagaactaacttttggccatgttgattttctcctgtttctgttttctgtctcattgatttctaatttctgttttatttcctttcctctacttgttttggacttaatttgctctcttgttttagattttctttttaaggtagaaattagttcacttgttttgaacttctcttttctagaataagcatttatacaaaaaatttactctgggtctgcttaactttatcccat

SEQ ID NO: 598244 - DNA, 535 bp, Homo sapiens
ttgctcttatgttctatttgctccatcattttttgctcctctttctttcatgcctttttatattaactgaacaatattcagcgttccattttaattcctttattggcattttagaagagtatcttcatataatgtggtggttctctagggattataataaacatcctgggcttatcgcagtccacttagtgttaatagtcagcgttttcatgtaacataargaaaagttgcggcaaaattgttgcgtttagtctcctgtcagagctattaatttagaatattttacacacattatcaatagtacacttaattttttattcaaagcatcagttgtttgttataaaactaaaaaaaaaagccttagtttttcacgtttatgcacatgccattcctagagcttctccttgcttcctgtagctcagaatttccgtctgttgttatctttctttagcctaaaaaatttccgtttgcatttcttgtatcttggtctgctaatgacaattgtttgaagctttcttttatctgaataaatctt

SEQ ID NO: 598245 - DNA, 645 bp, Homo sapiens
ctgggcttatcgcagtccacttagtgttaatagtcagcgttttcatgtaacataaggaaaagttgcggcaaaattgttgcgtttagtctcctgtcagagctattaatttagaatattttacacacattatcaatagtacacttaattttttattcaaagcatcagttgtttgttataaaactaaaaaaaaaagycttagtttttcacgtttatgcacatgccattcctagagcttctccttgcttcctgtagctcagaatttccgtctgttgttatctttctttagcctaaaaaatttccgtttgcatttcttgtatcttggtctgctaatgacaattgtttgaagctttcttttatctgaataaatctttcttttctcaagaattactttatctagttatagaatttggagttgacagttttcttttgaagatgtagtttcattgctttttaaagtgtcatttctgatgacaggtcatctgtctatttgtttccacggatgtaaattattttctccctccctttagctactttcaagatttactcttttttttgcccagtggtttgactatggtatgtctacatttggttctctttatttttattctgttctttgagtttcttaaacctgtaagttgatatatg

SEQ ID NO: 598246 - DNA, 531 bp, Homo sapiens
atcctgggcttatcgcagtccacttagtgttaatagtcagcgttttcatgtaacataaggaaaagttgcggcaaaattgttgcgtttagtctcctgtcagagctattaatttagaatattttacacacattatcaatagtacacttaattttttattcaaagcatcagttgtttgttataaaactaaaaaaaaaagccttagtttttcacgtttatgcacatgccattcctagagcttctccttgcttcctgtagstcagaatttccgtctgttgttatctttctttagcctaaaaaatttccgtttgcatttcttgtatcttggtctgctaatgacaattgtttgaagctttcttttatctgaataaatctttcttttctcaagaattactttatctagttatagaatttggagttgacagttttcttttgaagatgtagtttcattgctttttaaagtgtcatttctgatgacaggtcatctgtctatttgtttccacggatgtaaattattttctccctccctttagc

SEQ ID NO: 598247 - DNA, 645 bp, Homo sapiens
ctgggcttatcgcagtccacttagtgttaatagtcagcgttttcatgtaacataaggaaaagttgcggcaaaattgttgcgtttagtctcctgtcagagctattaatttagaatattttacacacattatcaatagtacacttaattttttattcaaagcatcagttgtttgttataaaactaaaaaaaaaagccttagtttttcacgtttatgcacatgccattcctagagcttctccttgcttcctgtagctcagaatttccgtctgttgttatctttctttagcctaaaaaatttccgtttgcatttcttgtatctwggtctgctaatgacaattgtttgaagctttcttttatctgaataaatctttcttttctcaagaattactttatctagttatagaatttggagttgacagttttcttttgaagatgtagtttcattgctttttaaagtgtcatttctgatgacaggtcatctgtctatttgtttccacggatgtaaattattttctccctccctttagctactttcaagatttactcttttttttgcccagtggtttgactatggtatgtctacatttggttctctttatttttattctgttctttgagtttcttaaacctgtaagttgatatatg

SEQ ID NO: 598248 - DNA, 582 bp, Homo sapiens
ttctccttgcttcctgtagctcagaatttccgtctgttgttatctttctttagcctaaaaaatttccgtttgcatttcttgtatcttggtctgctaatgacaattgtttgaagctttcttttatctgaataaatctttcttttctcaagaattactttatctagttatagaatttggagttgacagttttcttttgaagatgtagtttcattgctttttaaagtgtcatttctgatgayaggtcatctgtctatttgtttccacggatgtaaattattttctccctccctttagctactttcaagatttactcttttttttgcccagtggtttgactatggtatgtctacatttggttctctttatttttattctgttctttgagtttcttaaacctgtaagttgatatatgctgacaattaggaaaacttttggtctttactttttcaaatagctttttctgtctcatttacttctctactctttctaggactccaattatattagtgctagactggccctatttttattatttttcttcgtttgtattaactgtattgggaaattgttcttgatctgttt

SEQ ID NO: 598249 - DNA, 645 bp, Homo sapiens
ctgggcttatcgcagtccacttagtgttaatagtcagcgttttcatgtaacataaggaaaagttgcggcaaaattgttgcgtttagtctcctgtcagagctattaatttagaatattttacacacattatcaatagtacacttaattttttattcaaagcatcagttgtttgttataaaactaaaaaaaaaagccttagtttttcacgtttatgcacatgccattcctagagcttctccttgcttcctgtagctcagaatttccgtctgttgttatctttctttagcctaaaaaatttccgtttgcatttcttgtatcttggtctgctaatgacaattgtttgaagctttcttttatctgaataaatctttcttttctcaagaattactttatctagttatagaatttggagttgacagttttcttttgaagatgtagtttcattgctttttaaagtgtcatttctgatgacaggtcatctgtctatttgtttccacggatgtaaattattttctccytccctttagctactttcaagatttactcttttttttgcccagtggtttgactatggtatgtctacatttggttctctttatttttattctgttctttgagtttcttaaacctgtaagttgatatatg

SEQ ID NO: 598250 - DNA, 619 bp, Homo sapiens
atcagttgtttgttataaaactaaaaaaaaaagccttagtttttcacgtttatgcacatgccattcctagagcttctccttgcttcctgtagctcagaatttccgtctgttgttatctttctttagcctaaaaaatttccgtttgcatttcttgtatcttggtctgctaatgacaattgtttgaagctttcttttatctgaataaatctttcttttctcaagaattactttatctagttatagaatttggagttgacagttttcttttgaagatgtagtttcattgctttttaaagtgtcatttctgatgacaggtcatctgtctatttgtttccacggatgtaaattattttctccctccctttagctactttcaagatttactcttttttttgcccagtggtttgactatggtatgtctacatttggttctctttatttttattctgttctttgagtttcttaaacctgtaagttgatatatgctgacaattaggaaaacttttrgtctttactttttcaaatagctttttctgtctcatttacttctctactctttctaggactccaattatattagtgctagactggccctatttttattatttttcttcgtttg

SEQ ID NO: 598251 - DNA, 592 bp, Homo sapiens
atttttcttcgtttgtattaactgtattgggaaattgttcttgatctgtttttaagtgcactgataattttttgtgccatctttaatttactggtatgtacataaaatgacatttttatataagatactctgtctctcagttctaaaatttgtcctattatctctttatcatttttacttctctgttgagattctccatatattccctcttatgaccatctattccttaaatccttgaatatgcttataatagcttattttaaatttcttatattctaattccagcrtgtgggccatttcaatgtcttaatccattgtttactttttttgttatgtgtcatattttcctggttctatgtctaggcagattaaattatatgttagattatgtgtatgatattttgtagagataggttcgtttattttcctttgaagaatgactcttttctaacattagtcttctttccgtagtcaaacaccaaactttcactcctgagctatatgcaatggttgaaatctctgctctgtactagcaatttagctgttgttttctgctggattctatggagtctccttttatgaatgtgaaatg

SEQ ID NO: 598252 - DNA, 592 bp, Homo sapiens
atttttcttcgtttgtattaactgtattgggaaattgttcttgatctgtttttaagtgcactgataattttttgtgccatctttaatttactggtatgtacataaaatgacatttttatataagatactctgtctctcagttctaaaatttgtcctattatctctttatcatttttacttctctgttgagattctccatatattccctcttatgaccatctattccttaaatccttgaatatgcttataatagcttattttaaatttcttatattctaattccagcgtgtgggccatttcaatgtcttaatccattgtttactttttttgttatgtgtcatattttcctggttctatgtctaggcagrttaaattatatgttagattatgtgtatgatattttgtagagataggttcgtttattttcctttgaagaatgactcttttctaacattagtcttctttccgtagtcaaacaccaaactttcactcctgagctatatgcaatggttgaaatctctgctctgtactagcaatttagctgttgttttctgctggattctatggagtctccttttatgaatgtgaaatg

SEQ ID NO: 598253 - DNA, 579 bp, Homo sapiens
tgcttataatagcttattttaaatttcttatattctaattccagcgtgtgggccatttcaatgtcttaatccattgtttactttttttgttatgtgtcatattttcctggttctatgtctaggcagattaaattatatgttagattatgtgtatgatattttgtagagataggttygtttattttcctttgaagaatgactcttttctaacattagtcttctttccgtagtcaaacaccaaactttcactcctgagctatatgcaatggttgaaatctctgctctgtactagcaatttagctgttgttttctgctggattctatggagtctccttttatgaatgtgaaatgtagcagccatcatatatttgaatgaagttgaagtgctgattttagatttttactctgtgatattctcctctgtgactttcagttgtgtgagatgtcctcccatgtcatttaaatttcccagttcctcttttctgtcagcctggaactctgtgctcttattcctcaagctagtaaaactcaccgctttactcgtagacatctaattttgcacagactgggaagcgtcat

SEQ ID NO: 598254 - DNA, 517 bp, Homo sapiens
tgtttactttttttgttatgtgtcatattttcctggttctatgtctaggcagattaaattatatgttagattatgtgtatgatattttgtagagataggttcgtttattttcctttgaagaatgactcttttctaacattagtcttctttccgtagtcaaacaccaaactttcactcctgagctatatgcratggttgaaatctctgctctgtactagcaatttagctgttgttttctgctggattctatggagtctccttttatgaatgtgaaatgtagcagccatcatatatttgaatgaagttgaagtgctgattttagatttttactctgtgatattctcctctgtgactttcagttgtgtgagatgtcctcccatgtcatttaaatttcccagttcctcttttctgtcagcctggaactctgtgctcttattcctcaagctagtaaaactcaccgctttactcgtagacatctaattttgcacagactgggaagcgtcatcaggtgtgaagt

SEQ ID NO: 598255 - DNA, 517 bp, Homo sapiens
tgtttactttttttgttatgtgtcatattttcctggttctatgtctaggcagattaaattatatgttagattatgtgtatgatattttgtagagataggttcgtttattttcctttgaagaatgactcttttctaacattagtcttctttccgtagtcaaacaccaaactttcactcctgagctatatgcaatggttgaaatctctgctctgtactagcaatttagctgttgttttctgctggattctatggagtctccttttatgaatgtgaaatgtagcagccatcatatatttgaatgaagktgaagtgctgattttagatttttactctgtgatattctcctctgtgactttcagttgtgtgagatgtcctcccatgtcatttaaatttcccagttcctcttttctgtcagcctggaactctgtgctcttattcctcaagctagtaaaactcaccgctttactcgtagacatctaattttgcacagactgggaagcgtcatcaggtgtgaagt

SEQ ID NO: 598256 - DNA, 621 bp, Homo sapiens
tactttttttgttatgtgtcatattttcctggttctatgtctaggcagattaaattatatgttagattatgtgtatgatattttgtagagataggttcgtttattttcctttgaagaatgactcttttctaacattagtcttctttccgtagtcaaacaccaaactttcactcctgagctatatgcaatggttgaaatctctgctctgtactagcaatttagctgttgttttctgctggattctatggagtctccttttatgaatgtgaaatgtagcagccatcatatatttgaatgaagttgaagtgctgattttagatttttactctgtgatattctcctctgtgactttcagttgtgtgagatgtcctcccatgtcattyaaatttcccagttcctcttttctgtcagcctggaactctgtgctcttattcctcaagctagtaaaactcaccgctttactcgtagacatctaattttgcacagactgggaagcgtcatcaggtgtgaagttgccttgatgcaaatttaaatcattgcaattttctttattcaatggtcaaatacttcatcattagtggagtattctactatttctgcctgttttctgtttctcattac

SEQ ID NO: 598257 - DNA, 529 bp, Homo sapiens
tgtttactttttttgttatgtgtcatattttcctggttctatgtctaggcagattaaattatatgttagattatgtgtatgatattttgtagagataggttcgtttattttcctttgaagaatgactcttttctaacattagtcttctttccgtagtcaaacaccaaactttcactcctgagctatatgcaatggttgaaatctctgctctgtactagcaatttagctgttgttttctgctggattctatggagtctccttttatgaatgtgaaatgtagcagccatcatatatttgaatgaagttgaagtgctgattttagatttttactctgtgatattctcctctgtgactttcagttgtgtgagatgtcctcccatgtcatttaaatttcccagttcctcttttctgtcagcctggaactctgtgctcttattcctcaagctagtaaaactcaccgctttactcgtagacatctaattttgcacagactgggaagcgtcatcargtgtgaagttgccttgatgca

SEQ ID NO: 598258 - DNA, 641 bp, Homo sapiens
ctcaaacttctaaatactctacaaacattaggatcagggctcacattcccagtttcccttgtagccagatgtacatatggaacatggcctcagctaatgaagcatacccacatatttgaaagtaagaaaagtgttaagaggaastgtagatatcattttagttgatgcaaggatggaaaaaaataaccaactttcactggtgaactttgtcttcaatcattgttttcccgtgggtaagtggctaattttctggcctagaggtggaattggggtgttggtaacaattgatttgatgataacctgcttttgtctttttaaaaattgctaatctaccattgtttctggtcctgttttatatttatgcagtgtataatgtctcatgcaaaatttagttctttgtttctcagcttaaactggattttgatgagcagttttcaccttcaaatgaaagaaatggctttggttgatgttagacaaaaataacaagaaggaattaaagaaatatgtttgtcctcttgtaacattaaataaatgaaactgaaaattcaataattctgcttcataaaaaaatagaaagtttctactggttttcattatttttgaagctgtatcattaaatgaaatttctgcctcatggaagg

SEQ ID NO: 598259 - DNA, 577 bp, Homo sapiens
accaactttcactggtgaactttgtcttcaatcattgttttcccgtgggtaagtggctaattttmtggcctagaggtggaattggggtgttggtaacaattgatttgatgataacctgcttttgtctttttaaaaattgctaatctaccattgtttctggtcctgttttatatttatgcagtgtataatgtctcatgcaaaatttagttctttgtttctcagcttaaactggattttgatgagcagttttcaccttcaaatgaaagaaatggctttggttgatgttagacaaaaataacaagaaggaattaaagaaatatgtttgtcctcttgtaacattaaataaatgaaactgaaaattcaataattctgcttcataaaaaaatagaaagtttctactggttttcattatttttgaagctgtatcattaaatgaaatttctgcctcatggaaggtttttagaactatgtaataataccatacagaccattaggagagaaatgaataaagactgaaagaagtaagcactgtgtggtaacatagatggcgcacagttgtgtgcatggagccctaata

SEQ ID NO: 598260 - DNA, 476 bp, Homo sapiens
cagggctcacattcccagtttcccttgtagccagatgtacatatggaacatggcctcagctaatgaagcatacccacatatttgaaagtaagaaaagtgttaagaggaactgtagatatcattttagttgatgcaaggatggaaaaaaataaccaactttcactggtgaactttgtcttcaatcattgttttcccgtgggtaagtggctaattttctggcctagaggtggaattggkgtgttggtaacaattgatttgatgataacctgcttttgtctttttaaaaattgctaatctaccattgtttctggtcctgttttatatttatgcagtgtataatgtctcatgcaaaatttagttctttgtttctcagcttaaactggattttgatgagcagttttcaccttcaaatgaaagaaatggctttggttgatgttagacaaaaataacaagaaggaattaaagaaatatgtttg

SEQ ID NO: 598261 - DNA, 607 bp, Homo sapiens
aacattaggatcagggctcacattcccagtttcccttgtagccagatgtacatatggaacatggcctcagctaatgaagcatacccacatatttgaaagtaagaaaagtgttaagaggaactgtagatatcattttagttgatgcaaggatggaaaaaaataaccaactttcactggtgaactttgtcttcaatcattgttttcccgtgggtaagtggctaattttctggcctagaggtggaattggggtgttggtaacaattgatttgatgataacctgcttttgtctttttaaaaattgctaatctaccattgtttctggtcctgttttatatttatgcagtgtataatgtctcatgmaaaatttagttctttgtttctcagcttaaactggattttgatgagcagttttcaccttcaaatgaaagaaatggctttggttgatgttagacaaaaataacaagaaggaattaaagaaatatgtttgtcctcttgtaacattaaataaatgaaactgaaaattcaataattctgcttcataaaaaaatagaaagtttctactggttttcattatttttgaagctgtatcattaaatgaaatttctgc

SEQ ID NO: 598262 - DNA, 607 bp, Homo sapiens
aacattaggatcagggctcacattcccagtttcccttgtagccagatgtacatatggaacatggcctcagctaatgaagcatacccacatatttgaaagtaagaaaagtgttaagaggaactgtagatatcattttagttgatgcaaggatggaaaaaaataaccaactttcactggtgaactttgtcttcaatcattgttttcccgtgggtaagtggctaattttctggcctagaggtggaattggggtgttggtaacaattgatttgatgataacctgcttttgtctttttaaaaattgctaatctaccattgtttctggtcctgttttatatttatgcagtgtataatgtctcatgcaaaatttagttctttgtttctcagcttaaactggattttgatgrgcagttttcaccttcaaatgaaagaaatggctttggttgatgttagacaaaaataacaagaaggaattaaagaaatatgtttgtcctcttgtaacattaaataaatgaaactgaaaattcaataattctgcttcataaaaaaatagaaagtttctactggttttcattatttttgaagctgtatcattaaatgaaatttctgc

SEQ ID NO: 598263 - DNA, 607 bp, Homo sapiens
aacattaggatcagggctcacattcccagtttcccttgtagccagatgtacatatggaacatggcctcagctaatgaagcatacccacatatttgaaagtaagaaaagtgttaagaggaactgtagatatcattttagttgatgcaaggatggaaaaaaataaccaactttcactggtgaactttgtcttcaatcattgttttcccgtgggtaagtggctaattttctggcctagaggtggaattggggtgttggtaacaattgatttgatgataacctgcttttgtctttttaaaaattgctaatctaccattgtttctggtcctgttttatatttatgcagtgtataatgtctcatgcaaaatttagttctttgtttctcagcttaaactggattttgatgagcagttttcaccttcaaatgaaagaaatggctttggttgatgttagacaaaaataacaagaagraattaaagaaatatgtttgtcctcttgtaacattaaataaatgaaactgaaaattcaataattctgcttcataaaaaaatagaaagtttctactggttttcattatttttgaagctgtatcattaaatgaaatttctgc

SEQ ID NO: 598264 - DNA, 577 bp, Homo sapiens
accaactttcactggtgaactttgtcttcaatcattgttttcccgtgggtaagtggctaattttctggcctagaggtggaattggggtgttggtaacaattgatttgatgataacctgcttttgtctttttaaaaattgctaatctaccattgtttctggtcctgttttatatttatgcagtgtataatgtctcatgcaaaatttagttctttgtttctcagcttaaactggattttgatgagcagttttcaccttcaaatgaaagaaatggctttggttgatgttagacaaaaataacaagaaggaattaaagaaatatgtttgtcctcttgtaacattaaataaatgaaactgaaaattcaataattctgcttcataaaaaaatagaaartttctactggttttcattatttttgaagctgtatcattaaatgaaatttctgcctcatggaaggtttttagaactatgtaataataccatacagaccattaggagagaaatgaataaagactgaaagaagtaagcactgtgtggtaacatagatggcgcacagttgtgtgcatggagccctaata

SEQ ID NO: 598265 - DNA, 627 bp, Homo sapiens
tgatgataacctgcttttgtctttttaaaaattgctaatctaccattgtttctggtcctgttttatatttatgcagtgtataatgtctcatgcaaaatttagttctttgtttctcagcttaaactggattttgatgagcagttttcaccttcaaatgaaagaaatggctttggttgatgttagacaaaaataacaagaaggaattaaagaaatatgtttgtcctcttgtaacattaaataaatgaaactgaaaattcaataattctgcttcataaaaaaatagaaagtttctactggttttcattatttttgaagctgtatcattaaatgaaatttctgcctcatggaaggtttttagaactatgtaataataccatacagaccattaggagagaaatgaataaagactgaaagaagtaagcactgtgtggtaacatagatggcgcrcagttgtgtgcatggagccctaatacatttgaccatggaatttatacaataaatgttagtttcctgtgaacctgctaattaatatgacttttgcagacatttccttaacctaaacagtttgggtttcctgtatatagactgcatgtattctcacctttaacctttccataatcttcccta

SEQ ID NO: 598266 - DNA, 594 bp, Homo sapiens
aaaattcaataattctgcttcataaaaaaatagaaagtttctactggttttcattatttttgaagctgtatcattaaatgaaatttctgcctcatggaaggtttttagaactatgtaataataccatacagaccattaggagagaaatgaataaagactgaaagaagtaagcactgtgtggtaacatagatggcgcacagttgtgtgcrtggagccctaatacatttgaccatggaatttatacaataaatgttagtttcctgtgaacctgctaattaatatgacttttgcagacatttccttaacctaaacagtttgggtttcctgtatatagactgcatgtattctcacctttaacctttccataatcttccctaattacagatgtcattggttcttaacagcaaaagaacagcagtagcttataaagttatattatttgttttttactaatatgtgaagtgattttgtctttcatttcacctgtagagctaattatgtcttctagggaacaaaaattccagatcataccatcattagtttaaactttacaatgaaatcattatttctatttattactagcctgcattatag

SEQ ID NO: 598267 - DNA, 512 bp, Homo sapiens
taaaaaaaaaaggaaaacccatgtttactataccagcttagaaacgtgccccatttctaggaaataaaaggtagaggtgagagatgatttacttgagaaaagacattgtgtcacctatgaaattttattaggcacagagtcatattttaaggtagatagttctgtactggtgaaataataattttaatgactttatgttgccacatgttaagaccataatgtaagtataaatggaaatgtttacacctgaaatgagtattttcaaattaaaatttaaytgattttctttgacacttaattctagatttcccagatgaactgaagtgtattgctgtgtcttgtaataccttgctttaagtagctttttatgtattttagttggtatatctttgttattaatcatattaatttaacaaatctgaaaatatgtcaaattacatatttttatgactatgtaatgttttaagaggcagcctacttcttataaaatcataatttaggatacatgtggt

SEQ ID NO: 598268 - DNA, 512 bp, Homo sapiens
taaaaaaaaaaggaaaacccatgtttactataccagcttagaaacgtgccccatttctaggaaataaaaggtagaggtgagagatgatttacttgagaaaagacattgtgtcacctatgaaattttattaggcacagagtcatattttaaggtagatagttctgtactggtgaaataataattttaatgactttatgttgccacatgttaagaccataatgtaagtataaatggaaatgtttacacctgaaatgagtattttcaaattaaaatttaattgattttctttgacacttaattctagatttcccagatgaactgaagtgtattgctgtgtcttgtaataccttgctttaagtarctttttatgtattttagttggtatatctttgttattaatcatattaatttaacaaatctgaaaatatgtcaaattacatatttttatgactatgtaatgttttaagaggcagcctacttcttataaaatcataatttaggatacatgtggt

SEQ ID NO: 598269 - DNA, 539 bp, Homo sapiens
tgtgtcacctatgaaattttattaggcacagagtcatattttaaggtagatagttctgtactggtgaaataataattttaatgactttatgttgccacatgttaagaccataatgtaagtataaatggaaatgtttacacctgaaatgagtattttcaaattaaaatttaattgattttctttgacacttaattctagatttcccagatgaactgaagtgtattgctgtgtcttgtaataccttgctttaagtagctttttatgtattttagttggtatatctttgttattaatcatattaatttaacaaatctgaaaatatgtcaaattacawatttttatgactatgtaatgttttaagaggcagcctacttcttataaaatcataatttaggatacatgtggtaatatttagcaaaagtatattttggtttagtcttcccacttggtatttatagtttactttgaatatttatattaataattagctcctaatttttatttcaaggctcaatggctatcattggaatataattttg

SEQ ID NO: 598270 - DNA, 512 bp, Homo sapiens
taaaaaaaaaaggaaaacccatgtttactataccagcttagaaacgtgccccatttctaggaaataaaaggtagaggtgagagatgatttacttgagaaaagacattgtgtcacctatgaaattttattaggcacagagtcatattttaaggtagatagttctgtactggtgaaataataattttaatgactttatgttgccacatgttaagaccataatgtaagtataaatggaaatgtttacacctgaaatgagtattttcaaattaaaatttaattgattttctttgacacttaattctagatttcccagatgaactgaagtgtattgctgtgtcttgtaataccttgctttaagtagctttttatgtattttagttggtatatctttgttattaatcatattaatttaacaaatctgaaaatatgtcaaattacatatttttatgactatgtaatgttttaagaggcagcctacttsttataaaatcataatttaggatacatgtggt

SEQ ID NO: 598271 - DNA, 333 bp, Homo sapiens
tagctgcctgtgatttatgagtaaggcattagatccctattttcagactgaggggtggcaggcttcaygtacagtgggaatggagtaattacaggagggagttgtaagagctttgaagtcagagagggaggtagagacctgtttacctaggacctcaaaggccattggaattttactcttattctgagataggaatctgttggaaggatttgaacaggtgattgaatatgtgaggaactttgaggttgagttgagcttctaagatgattgaatggtgggatgaatctgttatgtaagtaagagaataccaatttggcaggaagagaacatatt

SEQ ID NO: 598272 - DNA, 634 bp, Homo sapiens
gaaaatatgtcaaattacatatttttatgactatgtaatgttttaagaggcagcctacttcttataaaatcataatttaggatacatgtggtaatatttagcaaaagtatattttggtttagtcttcccacttggtatttatagtttactttgaatatttatattaataattagctcctaatttttatttcaaggctcaatggctatcattggaatataattttgttcagtacaaagatacttgtagctgcctgtgatttatgagtaaggcattagatccctattttcagactgaggggtggcaggcttcatgtacagtgggaatggagtaattacaggagggagttgtargagctttgaagtcagagagggaggtagagacctgtttacctaggacctcaaaggccattggaattttactcttattctgagataggaatctgttggaaggatttgaacaggtgattgaatatgtgaggaactttgaggttgagttgagcttctaagatgattgaatggtgggatgaatctgttatgtaagtaagagaataccaatttggcaggaagagaacatattgtgcatccctcactgaattcagtaataaataaaaatgtgtacatgtgattaaaagaa

SEQ ID NO: 598273 - DNA, 634 bp, Homo sapiens
gaaaatatgtcaaattacatatttttatgactatgtaatgttttaagaggcagcctacttcttataaaatcataatttaggatacatgtggtaatatttagcaaaagtatattttggtttagtcttcccacttggtatttatagtttactttgaatatttatattaataattagctcctaatttttatttcaaggctcaatggctatcattggaatataattttgttcagtacaaagatacttgtagctgcctgtgatttatgagtaaggcattagatccctattttcagactgaggggtggcaggcttcatgtacagtgggaatggagtaattacaggagggagttgtaagagctttgaagtcagagagggaggtagagacctgtttacctaggacctcaaaggccattggaattttactyttattctgagataggaatctgttggaaggatttgaacaggtgattgaatatgtgaggaactttgaggttgagttgagcttctaagatgattgaatggtgggatgaatctgttatgtaagtaagagaataccaatttggcaggaagagaacatattgtgcatccctcactgaattcagtaataaataaaaatgtgtacatgtgattaaaagaa

SEQ ID NO: 598274 - DNA, 551 bp, Homo sapiens
agactgaggggtggcaggcttcatgtacagtgggaatggagtaattacaggagggagttgtaagagctttgaagtcagagagggaggtagagacctgtttacctaggacctcaaaggccattggaattttactcttattctgagataggaatctgttggaaggatttgaacaggtgattgaatatgtgaggaactttgaggttgagttgagcttctaagatgattgaatggtgggatgaatctgttatgtaagtaagagaataccaatttggcaggaagagaacatattgtgcatccctcactgaattcagtaataaataaaaatgtgtacatgtgattaaaagaaggtgaatygatatgtgtggtgataattttcaaagtacgtatgttagagttaaatattattaacataatttaataataaggcaatttataaaatcagtaacaaaactattttctcaggtggttgtgagacaacttcagcaagaagcagctgacagcctaaaaaaattaactatgttagagtctccactggaagtatatcacattat

SEQ ID NO: 598275 - DNA, 551 bp, Homo sapiens
agactgaggggtggcaggcttcatgtacagtgggaatggagtaattacaggagggagttgtaagagctttgaagtcagagagggaggtagagacctgtttacctaggacctcaaaggccattggaattttactcttattctgagataggaatctgttggaaggatttgaacaggtgattgaatatgtgaggaactttgaggttgagttgagcttctaagatgattgaatggtgggatgaatctgttatgtaagtaagagaataccaatttggcaggaagagaacatattgtgcatccctcactgaattcagtaataaataaaaatgtgtacatgtgattaaaagaaggtgaatcgatatgtgtggtgataattttcaaagtacgtatgttagagttaaatattattaacataatttaataataaggcaatttataaaatcagtaacaaaamtattttctcaggtggttgtgagacaacttcagcaagaagcagctgacagcctaaaaaaattaactatgttagagtctccactggaagtatatcacattat

SEQ ID NO: 598276 - DNA, 551 bp, Homo sapiens
agactgaggggtggcaggcttcatgtacagtgggaatggagtaattacaggagggagttgtaagagctttgaagtcagagagggaggtagagacctgtttacctaggacctcaaaggccattggaattttactcttattctgagataggaatctgttggaaggatttgaacaggtgattgaatatgtgaggaactttgaggttgagttgagcttctaagatgattgaatggtgggatgaatctgttatgtaagtaagagaataccaatttggcaggaagagaacatattgtgcatccctcactgaattcagtaataaataaaaatgtgtacatgtgattaaaagaaggtgaatcgatatgtgtggtgataattttcaaagtacgtatgttagagttaaatattattaacataatttaataataaggcaatttataaaatcagtaacaaaactattttctcaggtggttgtgagacaacttcarcaagaagcagctgacagcctaaaaaaattaactatgttagagtctccactggaagtatatcacattat

SEQ ID NO: 598277 - DNA, 551 bp, Homo sapiens
agactgaggggtggcaggcttcatgtacagtgggaatggagtaattacaggagggagttgtaagagctttgaagtcagagagggaggtagagacctgtttacctaggacctcaaaggccattggaattttactcttattctgagataggaatctgttggaaggatttgaacaggtgattgaatatgtgaggaactttgaggttgagttgagcttctaagatgattgaatggtgggatgaatctgttatgtaagtaagagaataccaatttggcaggaagagaacatattgtgcatccctcactgaattcagtaataaataaaaatgtgtacatgtgattaaaagaaggtgaatcgatatgtgtggtgataattttcaaagtacgtatgttagagttaaatattattaacataatttaataataaggcaatttataaaatcagtaacaaaactattttctcaggtggttgtgagacaacttcagcaagaagcrgctgacagcctaaaaaaattaactatgttagagtctccactggaagtatatcacattat

SEQ ID NO: 598278 - DNA, 575 bp, Homo sapiens
tttcattacaatgaattatttccattttactatctctataatgtacttatttttttatatagtgactttcattctaccattttgaaaaaccattgcataccttttctcttacaatatgtacccttggaaaagttgagaattatacatcattcctcatagaaaactgacttttgtcctgttaaaacagtatttttaagtaatttttgtattgctctgatgaggcaggccagattaaatcagagaagaatgtttmatggaatgttccagaaaattgtcttatttcttcacttttgtgagtggacacagaatctgtgtctatttatttcacagattctaggttaacttgtacagaaaggccattatactattcttttaaaagtgcatgttttaggttaatttacaaactatttgaaaagttaggcattttctttatcttttatttaaaatatactataaaactgtggaaatatttaaatttgagataacatgtacatcaaaaattgagagttgagaaaattatcttgatcctgcctttggattttaaagacagtttcactgagatatcattcacattt

SEQ ID NO: 598279 - DNA, 588 bp, Homo sapiens
cttttgtcctgttaaaacagtatttttaagtaatttttgtattgctctgatgaggcaggccagattaaatcagagaagaatgtttaatggaatgttccagaaaattgtcttatttcttcacttttgtgagtggacacagaatctgtgtctatttatttcacagattctaggttaacttgtacagaaaggccattatactattcttttaaaagtgcatgttttaggttaatttacaaactatttgaaaagttaggcattttctttatcttttatttaaaatatactataaaactgtggaaatatttaaatttgagataacatgtacatcaaaaattgagagttgagaaaattatcttgatcctgcctttggattttaaaracagtttcactgagatatcattcacatttgagagagttcaaccatttaaaatgtacaactgagtatctattagtatattcacagcattttcatcacctgaaaagcaaccccacatctcctaggcatgactgcagccttcctccatgtccctccacctacctctgttgtaggcaaccaccatctatctacttttgtctccatatgtttac

SEQ ID NO: 598280 - DNA, 492 bp, Homo sapiens
tggttttccattcattcatcggttgatggacctttaggttagtttccactgtttagctcttatgaaaaatgctgctgcgaacattcacttacargttattatgtggacaagcgtttttatttctctgccattggactttatcctcagagttaattgggcagatttcagcacttgtcttgctcatgctatcctttctgccttctcagtttctattcatctagcctcattcactcggacgtggcagacaatttattgttttcatgaagctttctctgagtgttctctcattgacctcatgtgttagcaatcgttgtctagtctgtgcagaaaaacttagttcttaattttacatggcttttatttttttatggaagatagctttctctcattataaatttgcttaatgggggaataatatataatatgtatgccacctatccttgcatacattgaaaatattttagcttagaagtttgtagcatacaattcaat

SEQ ID NO: 598281 - DNA, 598 bp, Homo sapiens
aagcgtttttatttctctgccattggactttatcctcagagttaattgggcagatttcagcacttgtcttgctcatgctatcctttctgccttctcagtttctattcatctagcctcattcactcrgacgtggcagacaatttattgttttcatgaagctttctctgagtgttctctcattgacctcatgtgttagcaatcgttgtctagtctgtgcagaaaaacttagttcttaattttacatggcttttatttttttatggaagatagctttctctcattataaatttgcttaatgggggaataatatataatatgtatgccacctatccttgcatacattgaaaatattttagcttagaagtttgtagcatacaattcaatactttataccataccaattatttcttctttgagaccttgacacagtaaggtttgtattctaagtgtgtttttagcaattaaatatcaaagccaacccaattagtctaatacaggagactcgttcaatcacatgtttatgtttttctctctatgaaaaataatctaaattggccttttttcactatgcagcagaactgtgtttctggactgctac

SEQ ID NO: 598282 - DNA, 642 bp, Homo sapiens
caggttattatgtggacaagcgtttttatttctctgccattggactttatcctcagagttaattgggcagatttcagcacttgtcttgctcatgctatcctttctgccttctcagtttctattcatctagcctcattcactcggacgtggcagacaatttattgttttcatgaagctttctctgagtgttctctcattgacctcatgtgttagcaatcgttgtctagtctgtgcagaaaaacttagttcttaattttacatggcttttatttttttatggaagatagytttctctcattataaatttgcttaatgggggaataatatataatatgtatgccacctatccttgcatacattgaaaatattttagcttagaagtttgtagcatacaattcaatactttataccataccaattatttcttctttgagaccttgacacagtaaggtttgtattctaagtgtgtttttagcaattaaatatcaaagccaacccaattagtctaatacaggagactcgttcaatcacatgtttatgtttttctctctatgaaaaataatctaaattggccttttttcactatgcagcagaactgtgtttctggactgctaccagtttgtcagctgaacagttctgggt

SEQ ID NO: 598283 - DNA, 534 bp, Homo sapiens
ttcagcacttgtcttgctcatgctatcctttctgccttctcagtttctattcatctagcctcattcactcggacgtggcagacaatttattgttttcatgaagctttctctgagtgttctctcattgacctcatgtgttagcaatcgttgtctagtctgtgcagaaaaacttagttcttaattttacatggcttttatttttttatggaagatagctttctctcattataaatttgcttaatgggggaataatatataatatgtatgycacctatccttgcatacattgaaaatattttagcttagaagtttgtagcatacaattcaatactttataccataccaattatttcttctttgagaccttgacacagtaaggtttgtattctaagtgtgtttttagcaattaaatatcaaagccaacccaattagtctaatacaggagactcgttcaatcacatgtttatgtttttctctctatgaaaaataatctaaattggccttttttcactatgcagcagaactgtgtttctg

SEQ ID NO: 598284 - DNA, 534 bp, Homo sapiens
ttcagcacttgtcttgctcatgctatcctttctgccttctcagtttctattcatctagcctcattcactcggacgtggcagacaatttattgttttcatgaagctttctctgagtgttctctcattgacctcatgtgttagcaatcgttgtctagtctgtgcagaaaaacttagttcttaattttacatggcttttatttttttatggaagatagctttctctcattataaatttgcttaatgggggaataatatataatatgtatgccacctatccttgcatacattgaaaatattttagcttagaagtttgtarcatacaattcaatactttataccataccaattatttcttctttgagaccttgacacagtaaggtttgtattctaagtgtgtttttagcaattaaatatcaaagccaacccaattagtctaatacaggagactcgttcaatcacatgtttatgtttttctctctatgaaaaataatctaaattggccttttttcactatgcagcagaactgtgtttctg

SEQ ID NO: 598285 - DNA, 465 bp, Homo sapiens
aagtgtgtttttagcaattaaatatcaaagccaacccaattagtctaatacaggagactcgttcaatcacatgtttatgtttttctctctatgaaaaataatstaaattggccttttttcactatgcagcagaactgtgtttctggactgctaccagtttgtcagctgaacagttctgggtgcagcttgtccgatgacggatagcacagcccctcaatctgagtgctcagcagagtgcttgtgaaggcagcaccacagcaacagttgctcagagggaacggattcaggagccttgatttagcaatagagtccagggttttcagctcagtgtctttagcctgtctctgctggtcatgtcagttatgtactattcaatccaggaggtgctgtttacattgtagtacatacatagtcattgcctaatgagtcatacagagagaaaagtaagttataaattatgtcccc

SEQ ID NO: 598286 - DNA, 465 bp, Homo sapiens
aagtgtgtttttagcaattaaatatcaaagccaacccaattagtctaatacaggagactcgttcaatcacatgtttatgtttttctctctatgaaaaataatctaaattggccttttttcactatgcagcagaactgtgtttctggactgctaccagtttgtcagctgaacagttctgggtgcagcttgtccgatgacggatagcacagcccctcaatctgwgtgctcagcagagtgcttgtgaaggcagcaccacagcaacagttgctcagagggaacggattcaggagccttgatttagcaatagagtccagggttttcagctcagtgtctttagcctgtctctgctggtcatgtcagttatgtactattcaatccaggaggtgctgtttacattgtagtacatacatagtcattgcctaatgagtcatacagagagaaaagtaagttataaattatgtcccc

SEQ ID NO: 598287 - DNA, 589 bp, Homo sapiens
aactgtgtttctggactgctaccagtttgtcagctgaacagttctgggtgcagcttgtccgatgacggatagcacagcccctcaatctgagtgctcagcagagtgmttgtgaaggcagcaccacagcaacagttgctcagagggaacggattcaggagccttgatttagcaatagagtccagggttttcagctcagtgtctttagcctgtctctgctggtcatgtcagttatgtactattcaatccaggaggtgctgtttacattgtagtacatacatagtcattgcctaatgagtcatacagagagaaaagtaagttataaattatgtcccccatttgctgcaactctcagtggtaagaatgattcagtgcagctatagtagagtacttccattggcatgccacctgcctaaaatacacaattttgttaagatatacaataaaattattatgctaatagcaaatattttatgtagctcactatgttccacgtagtcttctaagtgtttcatgttagtccccagttaaacacctggttttggaaggctgaagcaggaggatcgtttgagcccatgagtttgagaccagc

SEQ ID NO: 598288 - DNA, 589 bp, Homo sapiens
aactgtgtttctggactgctaccagtttgtcagctgaacagttctgggtgcagcttgtccgatgacggatagcacagcccctcaatctgagtgctcagcagagtgcttgtgaaggcagcaccacagcaacagttgctcagagggaacggattcaggagccttgatttarcaatagagtccagggttttcagctcagtgtctttagcctgtctctgctggtcatgtcagttatgtactattcaatccaggaggtgctgtttacattgtagtacatacatagtcattgcctaatgagtcatacagagagaaaagtaagttataaattatgtcccccatttgctgcaactctcagtggtaagaatgattcagtgcagctatagtagagtacttccattggcatgccacctgcctaaaatacacaattttgttaagatatacaataaaattattatgctaatagcaaatattttatgtagctcactatgttccacgtagtcttctaagtgtttcatgttagtccccagttaaacacctggttttggaaggctgaagcaggaggatcgtttgagcccatgagtttgagaccagc

SEQ ID NO: 598289 - DNA, 606 bp, Homo sapiens
gtagtgaacagtgatcaagctgctgcgctccaggctgggtaacagagggagactctgtctcataaataaaacgttttgyatagattcccttagaagtgagttagacatcagtcatagaattattagccactttgatgtctaccttgggagtaaaacatataataaggggcagcgttaaaccatctcaatcactagcctccaacttctcaagaaggttcttatttcatgaatttctacacaaaagactaactggattaagacatttggtggacaccattttgagatgaagaatcttgagtgagaagaagggagatctctacttactgaagcttcccaatgacatagttaaatgtcccccaaaagaaactttagaacaagactttcatcatgccatatctctatggaaaaggaatttctttaaaagaaaacaaaggcaaacaattgataatatgattctcatgggaaagttttcatcataaaagaaaaagagggctgggtgccgtggctcacgtctgtaatcccaacactttgggaggctgaggtgcgtggattacctgaggtcagcagttcaaaaacagcctggccaacatggtgaaaccctgtctc

SEQ ID NO: 598290 - DNA, 606 bp, Homo sapiens
gtagtgaacagtgatcaagctgctgcgctccaggctgggtaacagagggagactctgtctcataaataaaacgttttgtatagattcccttagaagtgagttagacatcagtcatagaattattagccactttgatgtctaccttgggagtaaaacatataataakgggcagcgttaaaccatctcaatcactagcctccaacttctcaagaaggttcttatttcatgaatttctacacaaaagactaactggattaagacatttggtggacaccattttgagatgaagaatcttgagtgagaagaagggagatctctacttactgaagcttcccaatgacatagttaaatgtcccccaaaagaaactttagaacaagactttcatcatgccatatctctatggaaaaggaatttctttaaaagaaaacaaaggcaaacaattgataatatgattctcatgggaaagttttcatcataaaagaaaaagagggctgggtgccgtggctcacgtctgtaatcccaacactttgggaggctgaggtgcgtggattacctgaggtcagcagttcaaaaacagcctggccaacatggtgaaaccctgtctc

SEQ ID NO: 598291 - DNA, 645 bp, Homo sapiens
aagctgctgcgctccaggctgggtaacagagggagactctgtctcataaataaaacgttttgtatagattcccttagaagtgagttagacatcagtcatagaattattagccactttgatgtctaccttgggagtaaaacatataataaggggcagcgttaaacsatctcaatcactagcctccaacttctcaagaaggttcttatttcatgaatttctacacaaaagactaactggattaagacatttggtggacaccattttgagatgaagaatcttgagtgagaagaagggagatctctacttactgaagcttcccaatgacatagttaaatgtcccccaaaagaaactttagaacaagactttcatcatgccatatctctatggaaaaggaatttctttaaaagaaaacaaaggcaaacaattgataatatgattctcatgggaaagttttcatcataaaagaaaaagagggctgggtgccgtggctcacgtctgtaatcccaacactttgggaggctgaggtgcgtggattacctgaggtcagcagttcaaaaacagcctggccaacatggtgaaaccctgtctctactgaaaatacaaaaattagccaggtgtggtggtgtgcacctgtagtcgcagct

SEQ ID NO: 598292 - DNA, 501 bp, Homo sapiens
aataaaacgttttgtatagattcccttagaagtgagttagacatcagtcatagaattattagccactttgatgtctaccttgggagtaaaacatataataaggggcagcgttaaaccatctcaatcactagcctccaacttctcragaaggttcttatttcatgaatttctacacaaaagactaactggattaagacatttggtggacaccattttgagatgaagaatcttgagtgagaagaagggagatctctacttactgaagcttcccaatgacatagttaaatgtcccccaaaagaaactttagaacaagactttcatcatgccatatctctatggaaaaggaatttctttaaaagaaaacaaaggcaaacaattgataatatgattctcatgggaaagttttcatcataaaagaaaaagagggctgggtgccgtggctcacgtctgtaatcccaacactttgggaggctgaggtgcgtggattacctgaggtcagc

SEQ ID NO: 598293 - DNA, 501 bp, Homo sapiens
aataaaacgttttgtatagattcccttagaagtgagttagacatcagtcatagaattattagccactttgatgtctaccttgggagtaaaacatataataaggggcagcgttaaaccatctcaatcactagcctccaacttctcaagaaggttcttatttcatgaatttctacacaaaagactamctggattaagacatttggtggacaccattttgagatgaagaatcttgagtgagaagaagggagatctctacttactgaagcttcccaatgacatagttaaatgtcccccaaaagaaactttagaacaagactttcatcatgccatatctctatggaaaaggaatttctttaaaagaaaacaaaggcaaacaattgataatatgattctcatgggaaagttttcatcataaaagaaaaagagggctgggtgccgtggctcacgtctgtaatcccaacactttgggaggctgaggtgcgtggattacctgaggtcagc

SEQ ID NO: 598294 - DNA, 515 bp, Homo sapiens
agccaggtgtggtggtgtgcacctgtagtcgcagctacttgggatgccgaggcaggagaatcacttgaacccaggaggtggaagttgcagtaagccgagatggtgctactgcactccagcctggatgacacagtgtgactccatcaaaaaaaagaaaaaaagaaaaacaaaaaaagggacaaagtatactggtccaaaaaagaagaaagcaagaaaaaaaggacaaagtatactgsttagtatcataacagtgagatagtccccctttgagattagaaaataacagtatactcaaagtaacattaatgagaaccaacataaaatagacaacattcactatctacaaaagtaatctgcaccaattagcaatgtatgagcatgtggttgagaatattttctataatatgggtactagaaggaagagacctcaagaaaatggtcagagctggaaatgtagattagggaatctaggtcaaagttttgagattttaggagtcctgagagaatttaaaaag

SEQ ID NO: 598295 - DNA, 515 bp, Homo sapiens
agccaggtgtggtggtgtgcacctgtagtcgcagctacttgggatgccgaggcaggagaatcacttgaacccaggaggtggaagttgcagtaagccgagatggtgctactgcactccagcctggatgacacagtgtgactccatcaaaaaaaagaaaaaaagaaaaacaaaaaaagggacaaagtatactggtccaaaaaagaagaaagcaagaaaaaaaggacaaagtatactgcttagtatcataacagtgagatagtccccctttgagattagaaaataacagtatactcaaagtaacattaatgagaaccaacataaaatagacaacattcactatctacaaaagtaatctgcaccaattagcaatgtatgagcatgtggttgagaatattttctataatatkggtactagaaggaagagacctcaagaaaatggtcagagctggaaatgtagattagggaatctaggtcaaagttttgagattttaggagtcctgagagaatttaaaaag

SEQ ID NO: 598296 - DNA, 515 bp, Homo sapiens
agccaggtgtggtggtgtgcacctgtagtcgcagctacttgggatgccgaggcaggagaatcacttgaacccaggaggtggaagttgcagtaagccgagatggtgctactgcactccagcctggatgacacagtgtgactccatcaaaaaaaagaaaaaaagaaaaacaaaaaaagggacaaagtatactggtccaaaaaagaagaaagcaagaaaaaaaggacaaagtatactgcttagtatcataacagtgagatagtccccctttgagattagaaaataacagtatactcaaagtaacattaatgagaaccaacataaaatagacaacattcactatctacaaaagtaatctgcaccaattagcaatgtatgagcatgtggttgagaatattttctataatatgkgtactagaaggaagagacctcaagaaaatggtcagagctggaaatgtagattagggaatctaggtcaaagttttgagattttaggagtcctgagagaatttaaaaag

SEQ ID NO: 598297 - DNA, 542 bp, Homo sapiens
caggcatggtggccacacctgtaatcccagcactttgggaggccaaggcaggaagatcatgaggtcaggarttcaagaccagtctggccaacaagtttcttatataggtaaacgtgttccatgatggtttgctgcacctatcaatccatcacctagatattaagccctgtgggcattagttattgatgttgatgctctccctcctgaccccaacaggccccagtgtttgttgttcccctccccgagtccatgtgttcttatcgttcagctcccacttataagtgagaagatgcagtgtttggttttttcttcctgcattagtttgctgaagatatcagcttcgggttcatccatatccctgcaaagagcatgatctcattcatttttatggctccatagtattccatggtgtatatataccacattttctttatcccattatcactgataatgtccatctgggttgattccatgtctttactattgtgaatagtgctgcagtgaacatgcaaatgcatgtatctttataatagaataattta

SEQ ID NO: 598298 - DNA, 542 bp, Homo sapiens
caggcatggtggccacacctgtaatcccagcactttgggaggccaaggcaggaagatcatgaggtcaggaattcaagaccagtctggccaacaagtttcttatataggtaaacgtgttccatgatggtttgctgcacctatcaatccatcacctagatattaagccctgtgggcattagttattgatsttgatgctctccctcctgaccccaacaggccccagtgtttgttgttcccctccccgagtccatgtgttcttatcgttcagctcccacttataagtgagaagatgcagtgtttggttttttcttcctgcattagtttgctgaagatatcagcttcgggttcatccatatccctgcaaagagcatgatctcattcatttttatggctccatagtattccatggtgtatatataccacattttctttatcccattatcactgataatgtccatctgggttgattccatgtctttactattgtgaatagtgctgcagtgaacatgcaaatgcatgtatctttataatagaataattta

SEQ ID NO: 598299 - DNA, 599 bp, Homo sapiens
ggttgagaatattttctataatatgggtactagaaggaagagacctcaagaaaatggtcagagctggaaatgtagattagggaatctaggtcaaagttttgagattttaggagtcctgagagaatttaaaaagagaaatagccaccaggcatggtggccacacctgtaatcccagcactttgggaggccaaggcaggaagatcatgaggtcaggaattcaagaccagtctggccaacaagtttcttatataggtaaacgtgttccatgatggtttgctgcacctatcaatccatcacctagatattaagccctgtgggcattagttattgatgttgatgctctccctcctgaccccaacaggccccagtgtttgttgttcccctcccygagtccatgtgttcttatcgttcagctcccacttataagtgagaagatgcagtgtttggttttttcttcctgcattagtttgctgaagatatcagcttcgggttcatccatatccctgcaaagagcatgatctcattcatttttatggctccatagtattccatggtgtatatataccacattttctttatcccattatcactgataatgt

SEQ ID NO: 598300 - DNA, 542 bp, Homo sapiens
caggcatggtggccacacctgtaatcccagcactttgggaggccaaggcaggaagatcatgaggtcaggaattcaagaccagtctggccaacaagtttcttatataggtaaacgtgttccatgatggtttgctgcacctatcaatccatcacctagatattaagccctgtgggcattagttattgatgttgatgctctccctcctgaccccaacaggccccagtgtttgttgttcccctccccgagtccatgtgttcttatcgttcagctcccacttatargtgagaagatgcagtgtttggttttttcttcctgcattagtttgctgaagatatcagcttcgggttcatccatatccctgcaaagagcatgatctcattcatttttatggctccatagtattccatggtgtatatataccacattttctttatcccattatcactgataatgtccatctgggttgattccatgtctttactattgtgaatagtgctgcagtgaacatgcaaatgcatgtatctttataatagaataattta

SEQ ID NO: 598301 - DNA, 599 bp, Homo sapiens
ggttgagaatattttctataatatgggtactagaaggaagagacctcaagaaaatggtcagagctggaaatgtagattagggaatctaggtcaaagttttgagattttaggagtcctgagagaatttaaaaagagaaatagccaccaggcatggtggccacacctgtaatcccagcactttgggaggccaaggcaggaagatcatgaggtcaggaattcaagaccagtctggccaacaagtttcttatataggtaaacgtgttccatgatggtttgctgcacctatcaatccatcacctagatattaagccctgtgggcattagttattgatgttgatgctctccctcctgaccccaacaggccccagtgtttgttgttcccctccccgagtccatgtgttcttatcgttcagctcccacttataagtgagaagatgcagtgtttggttttttcttcctgcattagtttgctgaagatatcagcttcgggttcatccatatccctgcaaagagcaygatctcattcatttttatggctccatagtattccatggtgtatatataccacattttctttatcccattatcactgataatgt

SEQ ID NO: 598302 - DNA, 530 bp, Homo sapiens
ggccccagtgtttgttgttcccctccccgagtccatgtgttcttatcgttcagctcccacttataagtgagaagatgcagtgtttggttttttcttcctgcattagtttgctgaagatatcagcttcgggttcatccatatccctgcaaagagcatgatctcattcatttttatggctccatagtattccatggtgtatatataccacattttctttatcccattatcactgataatgtccatctgkgttgattccatgtctttactattgtgaatagtgctgcagtgaacatgcaaatgcatgtatctttataatagaataatttatattccaacatatggtaattttaaatcagttttggtattaaaaatcatgcattttggaaaatattgataatggaaaaatccaaattctgccaaaatatgttgagaaaatagagagtaagtatatcttttcaaactttaaatgcctcagtctcttagttaatcttccccagatctgggaagacctagaaggggagattgggcta

SEQ ID NO: 598303 - DNA, 530 bp, Homo sapiens
ggccccagtgtttgttgttcccctccccgagtccatgtgttcttatcgttcagctcccacttataagtgagaagatgcagtgtttggttttttcttcctgcattagtttgctgaagatatcagcttcgggttcatccatatccctgcaaagagcatgatctcattcatttttatggctccatagtattccatggtgtatatataccacattttctttatcccattatcactgataatgtccatctgggttgattccatgtctttactattgtgaatagtgctgcagtgaacatgcaaatgcatgtatctttataatagaataatttatattccaacrtatggtaattttaaatcagttttggtattaaaaatcatgcattttggaaaatattgataatggaaaaatccaaattctgccaaaatatgttgagaaaatagagagtaagtatatcttttcaaactttaaatgcctcagtctcttagttaatcttccccagatctgggaagacctagaaggggagattgggcta

SEQ ID NO: 598304 - DNA, 530 bp, Homo sapiens
ggccccagtgtttgttgttcccctccccgagtccatgtgttcttatcgttcagctcccacttataagtgagaagatgcagtgtttggttttttcttcctgcattagtttgctgaagatatcagcttcgggttcatccatatccctgcaaagagcatgatctcattcatttttatggctccatagtattccatggtgtatatataccacattttctttatcccattatcactgataatgtccatctgggttgattccatgtctttactattgtgaatagtgctgcagtgaacatgcaaatgcatgtatctttataatagaataatttatattccaacatatggtaattttaaatcagttttggtattaaaaatcatgcattttggaaaatattgataatggaaaaatccaaattctgccaaaatatgttgagaaaatagagagtaartatatcttttcaaactttaaatgcctcagtctcttagttaatcttccccagatctgggaagacctagaaggggagattgggcta

SEQ ID NO: 598305 - DNA, 466 bp, Homo sapiens
agatctgggaagacctagaaggggagattgggctaccttaatgagggccatttcaatctcttggccctgcagcagccatttcaaaatamgtcaaacaatatatttgggggtaaattattttgatttccttcagcttcttctctctgtgatgttgcaccagaatcagattagaaaggaagccacattataagtgttaataaaacccatctgatgagatttgatagtttgaagggtgtgtttccccagaccctttagatagaaattagggccaaggaaaacaaggtcttattcctctatataaatctgtcagtgctttaagcagtgaaagaaagatttttcattgaattttacagacttgatactaatgaaaaggatagcttgtaaaatataaatctctttttctataaaaaggacatgttgttgattctcttagaccttgaaccctggccagtgatttgaaaccaag

SEQ ID NO: 598306 - DNA, 453 bp, Homo sapiens
cctagaaggggagattgggctaccttaatgagggccatttcaatctcttggccctgcagcagccatttcaaaatacgtcaaacaatatatttgggggtaaattattttgatttccttcagcttcttctctctgtgatgttgcaccagaatcagattagaaaggaagccacattataagtgttaataaaacccatctgatgagatttgatagtttgaagggtgtgtttccccagaccctttagatagaaattagggccaaggaawacaaggtcttattcctctatataaatctgtcagtgctttaagcagtgaaagaaagatttttcattgaattttacagacttgatactaatgaaaaggatagcttgtaaaatataaatctctttttctataaaaaggacatgttgttgattctcttagaccttgaaccctggccagtgatttgaaaccaag

SEQ ID NO: 598307 - DNA, 466 bp, Homo sapiens
agatctgggaagacctagaaggggagattgggctaccttaatgagggccatttcaatctcttggccctgcagcagccatttcaaaatacgtcaaacaatatatttgggggtaaattattttgatttccttcagcttcttctctctgtgatgttgcaccagaatcagattagaaaggaagccacattataagtgttaataaaacccatctgatgagatttgatagtttgaagggtgtgtttccccagaccctttagatagaaattagggccaaggaaaacaaggtyttattcctctatataaatctgtcagtgctttaagcagtgaaagaaagatttttcattgaattttacagacttgatactaatgaaaaggatagcttgtaaaatataaatctctttttctataaaaaggacatgttgttgattctcttagaccttgaaccctggccagtgatttgaaaccaag

SEQ ID NO: 598308 - DNA, 453 bp, Homo sapiens
ggggagattgggctaccttaatgagggccatttcaatctcttggccctgcagcagccatttcaaaatacgtcaaacaatatatttgggggtaaattattttgatttccttcagcttcttctctctgtgatgttgcaccagaatcagattagaaaggaagccacattataagtgttaataaaacccatctgatgagatttgatagtttgaagggtgtgtttccccagaccctttagatagaaattagggccaaggaaaacaaggtcttattcctctatataaatctgtcagtgctttaagcagtgaaagaaagatttttcrttgaattttacagacttgatactaatgaaaaggatagcttgtaaaatataaatctctttttctataaaaaggacatgttgttgattctcttagaccttgaaccctggccagtgatttgaaaccaagcagtacc

SEQ ID NO: 598309 - DNA, 495 bp, Homo sapiens
gtcttattcctctatataaatctgtcagtgctttaagcagtgaaagaaagatttttcattkaattttacagacttgatactaatgaaaaggatagcttgtaaaatataaatctctttttctataaaaaggacatgttgttgattctcttagaccttgaaccctggccagtgatttgaaaccaagcagtacctatctgcaaatctctagtaccaaattaatttggggtggggggtaacaggtttattgagaaataatgaacacgccatgcaattcactcatttaaagtatagaattcattaactttagtattttcagagagttatgccgtcatcattacaattaattttagaacattttcatcaccctaaaaacaaaccccacatcatttagccatcttcactagttttcccttcctccctcagccctagggaaccacccaccttctttgtatagatttgcctataagcctctgaaataaaaagcaagtggtctgc

SEQ ID NO: 598310 - DNA, 596 bp, Homo sapiens
attataagtgttaataaaacccatctgatgagatttgatagtttgaagggtgtgtttccccagaccctttagatagaaattagggccaaggaaaacaaggtcttattcctctatataaatctgtcagtgctttaagcagtgaaagaaagatttttcattgaattttacagacttgatactaatgaaaaggatagcttgtaaaatataaatctmtttttctataaaaaggacatgttgttgattctcttagaccttgaaccctggccagtgatttgaaaccaagcagtacctatctgcaaatctctagtaccaaattaatttggggtggggggtaacaggtttattgagaaataatgaacacgccatgcaattcactcatttaaagtatagaattcattaactttagtattttcagagagttatgccgtcatcattacaattaattttagaacattttcatcaccctaaaaacaaaccccacatcatttagccatcttcactagttttcccttcctccctcagccctagggaaccacccaccttctttgtatagatttgcctataagcctctgaaataaaaagcaagtggtctgctg

SEQ ID NO: 598311 - DNA, 466 bp, Homo sapiens
agatctgggaagacctagaaggggagattgggctaccttaatgagggccatttcaatctcttggccctgcagcagccatttcaaaatacgtcaaacaatatatttgggggtaaattattttgatttccttcagcttcttctctctgtgatgttgcaccagaatcagattagaaaggaagccacattataagtgttaataaaacccatctgatgagatttgatagtttgaagggtgtgtttccccagaccctttagatagaaattagggccaaggaaaacaaggtcttattcctctatataaatctgtcagtgctttaagcagtgaaagaaagatttttcattgaattttacagacttgatactaatgaaaaggatagcttgtaaaatataaatctctttttytataaaaaggacatgttgttgattctcttagaccttgaaccctggccagtgatttgaaaccaag

SEQ ID NO: 598312 - DNA, 659 bp, Homo sapiens
tttcattgaattttacagacttgatactaatgaaaaggatagcttgtaaaatataaatctctttttctataaaaaggacatgttgttgattctcttagaccttgaaccctggccagtgatttgaaaccaagcagtacctatctgcaratctctagtaccaaattaatttggggtggggggtaacaggtttattgagaaataatgaacacgccatgcaattcactcatttaaagtatagaattcattaactttagtattttcagagagttatgccgtcatcattacaattaattttagaacattttcatcaccctaaaaacaaaccccacatcatttagccatcttcactagttttcccttcctccctcagccctagggaaccacccaccttctttgtatagatttgcctataagcctctgaaataaaaagcaagtggtctgctgggactggcttatttcacttagcataatttttcatgctgcatctgtgctgtagcaggtattgatgccgggtttttgctccttagttcagctacatctgtgttcttctctcatgaccaggaaaaattaagcatgcagacacattgaggagggcagaatttattatgtgaaagcacagctctcagcaaagagcggggtcctgcaaagaggtttccacc

SEQ ID NO: 598313 - DNA, 495 bp, Homo sapiens
gtcttattcctctatataaatctgtcagtgctttaagcagtgaaagaaagatttttcattgaattttacagacttgatactaatgaaaaggatagcttgtaaaatataaatctctttttctataaaaaggacatgttgttgattctcttagaccttgaaccctggccagtgatttgaaaccaagcagtacctatctgcaaatctctagtaccaaattaatttggggtggggggtaacaggtttattgagaaataatgaacacgccatgcaattcactcatttaaagtatasaattcattaactttagtattttcagagagttatgccgtcatcattacaattaattttagaacattttcatcaccctaaaaacaaaccccacatcatttagccatcttcactagttttcccttcctccctcagccctagggaaccacccaccttctttgtatagatttgcctataagcctctgaaataaaaagcaagtggtctgc

SEQ ID NO: 598314 - DNA, 458 bp, Homo sapiens
gaattcattaactttagtattttcagagagttatgccgtcatcattacaattaattttagaacattttcatcaccctaaaaacaaaccccacatcatttagccatcttcactagttttcccttcctccctcagccctagggaaccacccaccttctttgtatagatttgcctataagcctctgaaataaaaagcaagtkgtctgctgggactggcttatttcacttagcataatttttcatgctgcatctgtgctgtagcaggtattgatgccgggtttttgctccttagttcagctacatctgtgttcttctctcatgaccaggaaaaattaagcatgcagacacattgaggagggcagaatttattatgtgaaagcacagctctcagcaaagagcggggtcctgcaaagaggtttccacctcacaattgaataccaggagcacatgagctgaagcg

SEQ ID NO: 598315 - DNA, 471 bp, Homo sapiens
gaattcattaactttagtattttcagagagttatgccgtcatcattacaattaattttagaacattttcatcaccctaaaaacaaaccccacatcatttagccatcttcactagttttcccttcctccctcagccctagggaaccacccaccttctttgtatagatttgcctataagcctctgaaataaaaagcaagtggtctgctgggactggcttatttcacttagcataatttttcatgctgcatctgtgctgtagcaggtattgatgcygggtttttgctccttagttcagctacatctgtgttcttctctcatgaccaggaaaaattaagcatgcagacacattgaggagggcagaatttattatgtgaaagcacagctctcagcaaagagcggggtcctgcaaagaggtttccacctcacaattgaataccaggagcacatgagctgaagcggccaggctcctcc

SEQ ID NO: 598316 - DNA, 471 bp, Homo sapiens
gaattcattaactttagtattttcagagagttatgccgtcatcattacaattaattttagaacattttcatcaccctaaaaacaaaccccacatcatttagccatcttcactagttttcccttcctccctcagccctagggaaccacccaccttctttgtatagatttgcctataagcctctgaaataaaaagcaagtggtctgctgggactggcttatttcacttagcataatttttcatgctgcatctgtgctgtagcaggtattgatgccgggtttttgctccttagttcagctacatctgtgttcttctctcrtgaccaggaaaaattaagcatgcagacacattgaggagggcagaatttattatgtgaaagcacagctctcagcaaagagcggggtcctgcaaagaggtttccacctcacaattgaataccaggagcacatgagctgaagcggccaggctcctcc

SEQ ID NO: 598317 - DNA, 458 bp, Homo sapiens
gaattcattaactttagtattttcagagagttatgccgtcatcattacaattaattttagaacattttcatcaccctaaaaacaaaccccacatcatttagccatcttcactagttttcccttcctccctcagccctagggaaccacccaccttctttgtatagatttgcctataagcctctgaaataaaaagcaagtggtctgctgggactggcttatttcacttagcataatttttcatgctgcatctgtgctgtagcaggtattgatgccgggtttttgctccttagttcagctacatctgtgttcttctctcatgaycaggaaaaattaagcatgcagacacattgaggagggcagaatttattatgtgaaagcacagctctcagcaaagagcggggtcctgcaaagaggtttccacctcacaattgaataccaggagcacatgagctgaagcg

SEQ ID NO: 598318 - DNA, 477 bp, Homo sapiens
tagtattttcagagagttatgccgtcatcattacaattaattttagaacattttcatcaccctaaaaacaaaccccacatcatttagccatcttcactagttttcccttcctccctcagccctagggaaccacccaccttctttgtatagatttgcctataagcctctgaaataaaaagcaagtggtctgctgggactggcttatttcacttagcataatttttcatgctgcatctgtgctgtagcaggtattgatgccgggtttttgctccttagttcagctacatctgtgttcttctctcatgaccaggaaaaattaagcatgcagacacattgaggagggcagaatttattatgtgaaagcacagctctcagcaaagagmggggtcctgcaaagaggtttccacctcacaattgaataccaggagcacatgagctgaagcggccaggctcctcctctgcataaggtgtgaattc

SEQ ID NO: 598319 - DNA, 403 bp, Homo sapiens
caggttcccttatctgcacataacatcaggtgtaaacacttgtggggctcgttggagattctccggggacccttccgtatctgcctaggcattttgctgtctcctcctaatacggtatctgtacttaatttcttcttattgctgagtaatattccattgtatggatacatcaaacattttatttatccattcgccaggtgatggacctttgggttctctcccagccaaaggtgacagacgttctggttctttccaccttttgactactattaataatgctgytgtaaacatttatgtatgagtttttgtgcttgcgtatgtttttatttttctggagtatatacttatgactggaatttgtgtgtcatatggtaacttcatgcttaaccctttaaggagctgc

SEQ ID NO: 598320 - DNA, 566 bp, Homo sapiens
acctttgggttctctcccagccaaaggtgacagacgttctggttctttccaccttttgactactattaataatgctgttgtaaacatttatgtatgagtttttgtgcttgcgtatgtttttatttttctggagtatatacttatgactggaatttgtgtgtcatatkgtaacttcatgcttaaccctttaaggagctgccagtttgttttccaaagtggctgcatcactttacattcccagcagcattagataagggttttaatttctttacatttttcctgacactcttttttcttgaacaaagattttatcctgtggtgtgaagtgataccacatgtggttttgatttacattttcctaatgactaattacattaagcatctattaatgtgcttttccatctttatatcttctttgcagatatatctattcaaaatctttgcccattttttaaaattggcttatcttgttatttattaattgcaagagttatttatatttcctatatatgtaagtcccttatcagatacacacttttcaaatactttcttctacttggcgtctt

SEQ ID NO: 598321 - DNA, 634 bp, Homo sapiens
cttcatgcttaaccctttaaggagctgccagtttgttttccaaagtggctgcatcactttacattcccagcagcattagataagggttttaatttctttacatttttcctgacactcttttttcttgaacaaagattttatcctgtggtgtgaagtgataccacatgtggttttgatttacattttcctaatgactaattacattaagcatctattaatgtgcttttccatctttatatcttctttgcagatatatctattcaaaatcyttgcccattttttaaaattggcttatcttgttatttattaattgcaagagttatttatatttcctatatatgtaagtcccttatcagatacacacttttcaaatactttcttctacttggcgtcttaccttttcatttcttcatgctgtcttctgaggcacagcagttttcaattttgaagtccattgaatccatttttcctttggagtcatagctaagaaaacactggcaaatgcagtcacaaagatttatgccagtgttttcttctgagggttttatagttttagcttttacagttaactattttattttgagttaattattaaataagatatttggtcgaaatttatttattttttgcttat

SEQ ID NO: 598322 - DNA, 634 bp, Homo sapiens
cttcatgcttaaccctttaaggagctgccagtttgttttccaaagtggctgcatcactttacattcccagcagcattagataagggttttaatttctttacatttttcctgacactcttttttcttgaacaaagattttatcctgtggtgtgaagtgataccacatgtggttttgatttacattttcctaatgactaattacattaagcatctattaatgtgcttttccatctttatatcttctttgcagatatatctattcaaaatctttgcccattttttaaaattggcttatcttgttatttattaattgyaagagttatttatatttcctatatatgtaagtcccttatcagatacacacttttcaaatactttcttctacttggcgtcttaccttttcatttcttcatgctgtcttctgaggcacagcagttttcaattttgaagtccattgaatccatttttcctttggagtcatagctaagaaaacactggcaaatgcagtcacaaagatttatgccagtgttttcttctgagggttttatagttttagcttttacagttaactattttattttgagttaattattaaataagatatttggtcgaaatttatttattttttgcttat

SEQ ID NO: 598323 - DNA, 662 bp, Homo sapiens
caaatactttcttctacttggcgtcttaccttttcatttcttcatgctgtcttctgaggcacagcagttttcaattttgaagtccattgaatccatttttcctttggagtcatagctaagaaaacactggcaaatgcagtcacaaagatttatgccagtgttttcttctgagggttttatarttttagcttttacagttaactattttattttgagttaattattaaataagatatttggtcgaaatttatttattttttgcttatggatacccagttgtcccagcaccatttgttgaaaagactattcttttcccattttgttcttttgttaagcttgtataaaatcaattgactgtaaaagtgcaggcttatttttagattgtcaattcttagcttgtttatgtctattcttatgtcaaggcccaatcgaattgaatgagaagtttttttcaatcatgttgcatattaccagttgtcttatgtcataataaaaattaaatttagtggaatgtctgtaacttcaccttttgtgtcacaaaggagtctctggccagcttataccttacttcctctaagacatgatcagacgccaggcttacaagacacacttaatttctttttttctccattcaagcctttagtctcttttccattgcctcc

SEQ ID NO: 598324 - DNA, 541 bp, Homo sapiens
aaacactggcaaatgcagtcacaaagatttatgccagtgttttcttctgagggttttatagttttagcttttacagttaactrttttattttgagttaattattaaataagatatttggtcgaaatttatttattttttgcttatggatacccagttgtcccagcaccatttgttgaaaagactattcttttcccattttgttcttttgttaagcttgtataaaatcaattgactgtaaaagtgcaggcttatttttagattgtcaattcttagcttgtttatgtctattcttatgtcaaggcccaatcgaattgaatgagaagtttttttcaatcatgttgcatattaccagttgtcttatgtcataataaaaattaaatttagtggaatgtctgtaacttcaccttttgtgtcacaaaggagtctctggccagcttataccttacttcctctaagacatgatcagacgccaggcttacaagacacacttaatttctttttttctccattcaagcctttagtctcttttccattgcctcc

SEQ ID NO: 598325 - DNA, 541 bp, Homo sapiens
aaacactggcaaatgcagtcacaaagatttatgccagtgttttcttctgagggttttatagttttagcttttacagttaactattttattttgagttaattattaaatawgatatttggtcgaaatttatttattttttgcttatggatacccagttgtcccagcaccatttgttgaaaagactattcttttcccattttgttcttttgttaagcttgtataaaatcaattgactgtaaaagtgcaggcttatttttagattgtcaattcttagcttgtttatgtctattcttatgtcaaggcccaatcgaattgaatgagaagtttttttcaatcatgttgcatattaccagttgtcttatgtcataataaaaattaaatttagtggaatgtctgtaacttcaccttttgtgtcacaaaggagtctctggccagcttataccttacttcctctaagacatgatcagacgccaggcttacaagacacacttaatttctttttttctccattcaagcctttagtctcttttccattgcctcc

SEQ ID NO: 598326 - DNA, 541 bp, Homo sapiens
aaacactggcaaatgcagtcacaaagatttatgccagtgttttcttctgagggttttatagttttagcttttacagttaactattttattttgagttaattattaaataagatatttggtcgaamtttatttattttttgcttatggatacccagttgtcccagcaccatttgttgaaaagactattcttttcccattttgttcttttgttaagcttgtataaaatcaattgactgtaaaagtgcaggcttatttttagattgtcaattcttagcttgtttatgtctattcttatgtcaaggcccaatcgaattgaatgagaagtttttttcaatcatgttgcatattaccagttgtcttatgtcataataaaaattaaatttagtggaatgtctgtaacttcaccttttgtgtcacaaaggagtctctggccagcttataccttacttcctctaagacatgatcagacgccaggcttacaagacacacttaatttctttttttctccattcaagcctttagtctcttttccattgcctcc

SEQ ID NO: 598327 - DNA, 569 bp, Homo sapiens
gagttaattattaaataagatatttggtcgaaatttatttattttttgcttatggatacccagttgtcccarcaccatttgttgaaaagactattcttttcccattttgttcttttgttaagcttgtataaaatcaattgactgtaaaagtgcaggcttatttttagattgtcaattcttagcttgtttatgtctattcttatgtcaaggcccaatcgaattgaatgagaagtttttttcaatcatgttgcatattaccagttgtcttatgtcataataaaaattaaatttagtggaatgtctgtaacttcaccttttgtgtcacaaaggagtctctggccagcttataccttacttcctctaagacatgatcagacgccaggcttacaagacacacttaatttctttttttctccattcaagcctttagtctcttttccattgcctcccactatagttatattttcagtaagttttggttacaggatctgctgacatagtctaatattcagtgcattatgttttactaactcattataattcatagaaccttccatagatgtttacca

SEQ ID NO: 598328 - DNA, 662 bp, Homo sapiens
caaatactttcttctacttggcgtcttaccttttcatttcttcatgctgtcttctgaggcacagcagttttcaattttgaagtccattgaatccatttttcctttggagtcatagctaagaaaacactggcaaatgcagtcacaaagatttatgccagtgttttcttctgagggttttatagttttagcttttacagttaactattttattttgagttaattattaaataagatatttggtcgaaatttatttattttttgcttatggatacccagttgtcccagcaccatttgytgaaaagactattcttttcccattttgttcttttgttaagcttgtataaaatcaattgactgtaaaagtgcaggcttatttttagattgtcaattcttagcttgtttatgtctattcttatgtcaaggcccaatcgaattgaatgagaagtttttttcaatcatgttgcatattaccagttgtcttatgtcataataaaaattaaatttagtggaatgtctgtaacttcaccttttgtgtcacaaaggagtctctggccagcttataccttacttcctctaagacatgatcagacgccaggcttacaagacacacttaatttctttttttctccattcaagcctttagtctcttttccattgcctcc

SEQ ID NO: 598329 - DNA, 569 bp, Homo sapiens
gagttaattattaaataagatatttggtcgaaatttatttattttttgcttatggatacccagttgtcccagcaccatttgttgaaaagactattcttttcccattttgttcttttgttaagcttgtataaaatcaattgactgtaaaagtgcaggcttatttttagattgtcaattcttagcttgttyatgtctattcttatgtcaaggcccaatcgaattgaatgagaagtttttttcaatcatgttgcatattaccagttgtcttatgtcataataaaaattaaatttagtggaatgtctgtaacttcaccttttgtgtcacaaaggagtctctggccagcttataccttacttcctctaagacatgatcagacgccaggcttacaagacacacttaatttctttttttctccattcaagcctttagtctcttttccattgcctcccactatagttatattttcagtaagttttggttacaggatctgctgacatagtctaatattcagtgcattatgttttactaactcattataattcatagaaccttccatagatgtttacca

SEQ ID NO: 598330 - DNA, 602 bp, Homo sapiens
cattgaatccatttttcctttggagtcatagctaagaaaacactggcaaatgcagtcacaaagatttatgccagtgttttcttctgagggttttatagttttagcttttacagttaactattttattttgagttaattattaaataagatatttggtcgaaatttatttattttttgcttatggatacccagttgtcccagcaccatttgttgaaaagactattcttttcccattttgttcttttgttaagcttgtataaaatcaattgactgtaaaagtgcaggcttatttttagattgtcaattcttagcttgtttatgtctattcttatgtcaaggcccaatcgaattgaatgagaagyttttttcaatcatgttgcatattaccagttgtcttatgtcataataaaaattaaatttagtggaatgtctgtaacttcaccttttgtgtcacaaaggagtctctggccagcttataccttacttcctctaagacatgatcagacgccaggcttacaagacacacttaatttctttttttctccattcaagcctttagtctcttttccattgcctcccactatagttatattttcagtaag

SEQ ID NO: 598331 - DNA, 602 bp, Homo sapiens
cattgaatccatttttcctttggagtcatagctaagaaaacactggcaaatgcagtcacaaagatttatgccagtgttttcttctgagggttttatagttttagcttttacagttaactattttattttgagttaattattaaataagatatttggtcgaaatttatttattttttgcttatggatacccagttgtcccagcaccatttgttgaaaagactattcttttcccattttgttcttttgttaagcttgtataaaatcaattgactgtaaaagtgcaggcttatttttagattgtcaattcttagcttgtttatgtctattcttatgtcaaggcccaatcgaattgaatgagaagtttttttcaatcatgktgcatattaccagttgtcttatgtcataataaaaattaaatttagtggaatgtctgtaacttcaccttttgtgtcacaaaggagtctctggccagcttataccttacttcctctaagacatgatcagacgccaggcttacaagacacacttaatttctttttttctccattcaagcctttagtctcttttccattgcctcccactatagttatattttcagtaag

SEQ ID NO: 598332 - DNA, 537 bp, Homo sapiens
ttcagtaagttttggttacaggatctgctgacatagtctaatattcagtgcattatgttttactaactcattataattcatagaaccttccatagatgtytaccatctaggaaggagaaatttaagtctgagccgccagctttcctcagtggaaatcaagtgaagtcatcatcttgcagtttacagaccctcttttctcctggtagctggttctcttgggtagcactgtggctaatccttttattagtgcagatcttgcattctcagaaaccacagttccctatattgacctccttttactgaaacagagatgcacagctctgctttctagctcagtagaggattcttggaataaaacttttaactcattccaagaaaaagtcttaggagtgcagcacttcaaagtcaggtaaggttcaggcaatttatcagagacacatagtagattagtattttgactttcaaaatttcagagccaagttgtgtgctatagagaagcattgtggcataacatagagatgggatggtcttaacttc

SEQ ID NO: 598333 - DNA, 537 bp, Homo sapiens
ttcagtaagttttggttacaggatctgctgacatagtctaatattcagtgcattatgttttactaactcattataattcatagaaccttccatagatgtttaccatctaggaaggagaartttaagtctgagccgccagctttcctcagtggaaatcaagtgaagtcatcatcttgcagtttacagaccctcttttctcctggtagctggttctcttgggtagcactgtggctaatccttttattagtgcagatcttgcattctcagaaaccacagttccctatattgacctccttttactgaaacagagatgcacagctctgctttctagctcagtagaggattcttggaataaaacttttaactcattccaagaaaaagtcttaggagtgcagcacttcaaagtcaggtaaggttcaggcaatttatcagagacacatagtagattagtattttgactttcaaaatttcagagccaagttgtgtgctatagagaagcattgtggcataacatagagatgggatggtcttaacttc

SEQ ID NO: 598334 - DNA, 563 bp, Homo sapiens
gttgcatattaccagttgtcttatgtcataataaaaattaaatttagtggaatgtctgtaacttcaccttttgtgtcacaaaggagtctctggccagcttataccttacttcctctaagacatgatcagacgccaggcttacaagacacacttaatttctttttttctccattcaagcctttagtctcttttccattgcctcccactatagttatattttcagtaagttttggttacaggatctgctgacatagtctaatattcagtgcattatgttttactaactcattataattcatagaaccttccatagatgtttaccatctaggaaggagaaatttaagtctgagccgccagctttcctcagtggaaatcaagtgaagtcatcatcttgcagtttacagaccctctttyctcctggtagctggttctcttgggtagcactgtggctaatccttttattagtgcagatcttgcattctcagaaaccacagttccctatattgacctccttttactgaaacagagatgcacagctctgctttctagctcagtagaggatt

SEQ ID NO: 598335 - DNA, 536 bp, Homo sapiens
catcttgcagtttacagaccctcttttctcctggtagctggttctcttgggtagcacwgtggctaatccttttattagtgcagatcttgcattctcagaaaccacagttccctatattgacctccttttactgaaacagagatgcacagctctgctttctagctcagtagaggattcttggaataaaacttttaactcattccaagaaaaagtcttaggagtgcagcacttcaaagtcaggtaaggttcaggcaatttatcagagacacatagtagattagtattttgactttcaaaatttcagagccaagttgtgtgctatagagaagcattgtggcataacatagagatgggatggtcttaacttctccatacaaacaagcttggagtaaggtaaaggagaaattgcatttgtgtcttaacactcaaaacacactatgcttattttacttctgtgaagaataaaaatcattccataatattctccttatttcctcatttagaaaagaaaatgaaaattgaatactaggttgatt

SEQ ID NO: 598336 - DNA, 495 bp, Homo sapiens
gcagtttacagaccctcttttctcctggtagctggttctcttgggtagcactgtggctaatccttttattagtgcagatcttgcattctcagaaaccacagttccctatattgacctccttttactgaaacagagatgcacagctctgctttctagctcagtagaggattcttggaataaaacktttaactcattccaagaaaaagtcttaggagtgcagcacttcaaagtcaggtaaggttcaggcaatttatcagagacacatagtagattagtattttgactttcaaaatttcagagccaagttgtgtgctatagagaagcattgtggcataacatagagatgggatggtcttaacttctccatacaaacaagcttggagtaaggtaaaggagaaattgcatttgtgtcttaacactcaaaacacactatgcttattttacttctgtgaagaataaaaatcattccataatattctccttatttcctcattt

SEQ ID NO: 598337 - DNA, 415 bp, Homo sapiens
gctttcctcagtggaaatcaagtgaagtcatcatcttgcagtttacagaccctcttttctcctggtagctggttctcttgggtagcactgtggctaatccttttattagtgcagatcttgcattctcagaaaccacagttccctatattgacctccttttactgaaacagagatgcacagctctgctttctagctcagtagaggattcttggaataaaacttttaactcattccaagaaaaagtcttaggagtgcagcacttcaaartcaggtaaggttcaggcaatttatcagagacacatagtagattagtattttgactttcaaaatttcagagccaagttgtgtgctatagagaagcattgtggcataacatagagatgggatggtcttaacttctccatacaaacaagct

SEQ ID NO: 598338 - DNA, 583 bp, Homo sapiens
aagacacacttaatttctttttttctccattcaagcctttagtctcttttccattgcctcccactatagttatattttcagtaagttttggttacaggatctgctgacatagtctaatattcagtgcattatgttttactaactcattataattcatagaaccttccatagatgtttaccatctaggaaggagaaatttaagtctgagccgccagctttcctcagtggaaatcaagtgaagtcatcatcttgcagtttacagaccctcttttctcctggtagctggttctcttgggtagcactgtggctaatccttttattagtgcagatcttgcattctcagaaaccacagttccctatattgacctccttttactgaaacagagatgcacagctctgctttctagctcagtagaggattcttggaataaaacttttaactcattccaagaaaaagtcttaggagtgcagcacttcaaagtcaggtaaggttcagrcaatttatcagagacacatagtagattagtattttgactttcaaaatttcagagccaagttgtgtgctatagagaagcattgtggc

SEQ ID NO: 598339 - DNA, 548 bp, Homo sapiens
atagttatattttcagtaagttttggttacaggatctgctgacatagtctaatattcagtgcattatgttttactaactcattataattcatagaaccttccatagatgtttaccatctaggaaggagaaatttaagtctgagccgccagctttcctcagtggaaatcaagtgaagtcatcatcttgcagtttacagaccctcttttctcctggtagctggttctcttgggtagcactgtggctaatccttttattagtgcagatcttgcattctcagaaaccacagttccctatattgacctccttttactgaaacagagatgcacagctctgctttctagctcagtagaggattcttggaataaaacttttaactcattccaagaaaaagtcttaggagtgcagcacttcaaagtcaggtaaggttcaggcaatttatcagagacayatagtagattagtattttgactttcaaaatttcagagccaagttgtgtgctatagagaagcattgtggcataacatagagatgggatggtcttaacttc

SEQ ID NO: 598340 - DNA, 536 bp, Homo sapiens
catcttgcagtttacagaccctcttttctcctggtagctggttctcttgggtagcactgtggctaatccttttattagtgcagatcttgcattctcagaaaccacagttccctatattgacctccttttactgaaacagagatgcacagctctgctttctagctcagtagaggattcttggaataaaacttttaactcattccaagaaaaagtcttaggagtgcagcacttcaaagtcaggtaaggttcaggcaatttatcagagacacatagtagattagtattttgactttcaaaatttcagagccaagttgtgtgctatagagaagcattgtggcataacatagagatgggatggtcttaacttctccatacaaacaagcttggmgtaaggtaaaggagaaattgcatttgtgtcttaacactcaaaacacactatgcttattttacttctgtgaagaataaaaatcattccataatattctccttatttcctcatttagaaaagaaaatgaaaattgaatactaggttgatt

SEQ ID NO: 598341 - DNA, 545 bp, Homo sapiens
aaaacacactatgcttattttacttctgtgaagaataaaaatcattccataatattctccttatttcctcatttagaaaagaaaatgaaaattgaatactaggttgattaataaatactcaaaacttcttcttttasaattttagttaattgaaatcaggtaaatgtctgattttgcctatgtcacccagtatttctagttgtttttcaaatcatacatcttcttgcttcccagtcttacttcctaacttgaggggaaattgtaagaagacacccttgccttgttatcagcgttcattattgaagttgttttaggaaaattcctcctcagcagcttatgtctctctcctggttatctactgcttctcaataatgtttgacatcaataaataaatatcaacctttattagatcctgctttaaaggagactcttttctgctgtataagttatgtttcctgttgtctctttttaaaacttattttcctaacaattacccagagtcttgtggcttgaaagaaaaacatttattttattcatgaacctgt

SEQ ID NO: 598342 - DNA, 581 bp, Homo sapiens
ttgtgtcttaacactcaaaacacactatgcttattttacttctgtgaagaataaaaatcattccataatattctccttatttcctcatttagaaaagaaaatgaaaattgaatactaggttgattaataaatactcaaaacttcttcttttacaattttagttaattgaaatcaggtaaatgtctgattttgcctatgtcacccagtatttctagttgtttttcaaatcatacatcttcttgcttcccagtcttacttcctaacttgaggggaaattgtaagaagacacccttgccttgttatcagmgttcattattgaagttgttttaggaaaattcctcctcagcagcttatgtctctctcctggttatctactgcttctcaataatgtttgacatcaataaataaatatcaacctttattagatcctgctttaaaggagactcttttctgctgtataagttatgtttcctgttgtctctttttaaaacttattttcctaacaattacccagagtcttgtggcttgaaagaaaaacatttattttattcatgaacctgtggtttgggaaaaacttggcc

SEQ ID NO: 598343 - DNA, 513 bp, Homo sapiens
tgaaaattgaatactaggttgattaataaatactcaaaacttcttcttttacaattttagttaattgaaatcaggtaaatgtctgattttgcctatgtcacccagtatttctagttgtttttcaaatcatacatcttcttgcttcccagtcttacttcctaacttgaggggaaattgtaagaagacacccttgccttgttatcagcgttcatwattgaagttgttttaggaaaattcctcctcagcagcttatgtctctctcctggttatctactgcttctcaataatgtttgacatcaataaataaatatcaacctttattagatcctgctttaaaggagactcttttctgctgtataagttatgtttcctgttgtctctttttaaaacttattttcctaacaattacccagagtcttgtggcttgaaagaaaaacatttattttattcatgaacctgtggtttgggaaaaacttggccaggacagcttgctctgctcccttcaacttccct

SEQ ID NO: 598344 - DNA, 581 bp, Homo sapiens
ttgtgtcttaacactcaaaacacactatgcttattttacttctgtgaagaataaaaatcattccataatattctccttatttcctcatttagaaaagaaaatgaaaattgaatactaggttgattaataaatactcaaaacttcttcttttacaattttagttaattgaaatcaggtaaatgtctgattttgcctatgtcacccagtatttctagttgtttttcaaatcatacatcttcttgcttcccagtcttacttcctaacttgaggggaaattgtaagaagacacccttgccttgttatcagcgttcattattgaagttgttttaggaaaattcctcctcagcagcttatgtctctctcctggttatctactgcttctcaataatgtttgacatcaataaataaatatcaacctttattagatcctgctttaaaggagactcttttctgctgyataagttatgtttcctgttgtctctttttaaaacttattttcctaacaattacccagagtcttgtggcttgaaagaaaaacatttattttattcatgaacctgtggtttgggaaaaacttggcc

SEQ ID NO: 598345 - DNA, 588 bp, Homo sapiens
ccattaaccagcctcccctccsctacttctgtgagctttttttttgttaagagacagggtcttgctagtgtagtctgggctctgggcaactgtagtcacccagactggagacagtggtttgatcatagttcactgcagcttcaaactcttgggcccatcagatcctcacacctcagcctcctgagcagctggcattatgggcatgcaccattgcacatgtctgatttttgactttgtagagatatctccctatgttgcccagggagctctggaacttttgacctcaaatgattctcttgccttggtcttacaaagagctaggaaattacaggcatcagccatattgcccagccttcaattttcctttagctcccacacatgagtaagaatgtgcagtatttatctttctgtgtctgcacttaacatccgtcagactgatccacgtggccacgaataacaggatttaattcctttatatggtgaatagtattccactgtgtttgtgtgccacagtttttcatccattcatttggtgatggacatgtatgttgattccatacacaagctgttgtggatagtgctacagta

SEQ ID NO: 598346 - DNA, 588 bp, Homo sapiens
acataattatgggctatagagtgatatttttatacacgtatatagtgtgtaatgatcaagctaactagcacatttactacttcaaccatttttcatttctttgaattgtgaacattcaaaattttctggctttttaaaaatatacaataagtcatagttaaccatattcaccctacaatgccacagaacaccagaactcactcctcttatctaactgtaattctgtatccattaaccagcctcccctcccctacttctgtgagctttttttttgttaagagacagggtcttgctagtgtagtctgggctctgggyaactgtagtcacccagactggagacagtggtttgatcatagttcactgcagcttcaaactcttgggcccatcagatcctcacacctcagcctcctgagcagctggcattatgggcatgcaccattgcacatgtctgatttttgactttgtagagatatctccctatgttgcccagggagctctggaacttttgacctcaaatgattctcttgccttggtcttacaaagagctaggaaattacaggcatcagccatattgcccagccttcaatt

SEQ ID NO: 598347 - DNA, 639 bp, Homo sapiens
atattctgttttttaaataggatgaatgtagcttctcttttgttttaattgacacatatatacataattatgggctatagagtgatatttttatacacgtatatagtgtgtaatgatcaagctaactagcacatttactacttcaaccatttttcatttctttgaattgtgaacattcaaaattttctggctttttaaaaatatacaataagtcatagttaaccatattcaccctacaatgccacagaacaccagaactcactcctcttatctaactgtaattctgtatccattaaccagcctcccctcccctacttctgtgagctttttttttgttaagagacagggtcttgctagtgtagtctgggctctgggcaactgtagtcacccagactggagacagtggtttgatcatagttcactgcagcytcaaactcttgggcccatcagatcctcacacctcagcctcctgagcagctggcattatgggcatgcaccattgcacatgtctgatttttgactttgtagagatatctccctatgttgcccagggagctctggaacttttgacctcaaatgattctcttgccttggtcttacaaagagctaggaaattacaggcatcagccatattgccca

SEQ ID NO: 598348 - DNA, 639 bp, Homo sapiens
atattctgttttttaaataggatgaatgtagcttctcttttgttttaattgacacatatatacataattatgggctatagagtgatatttttatacacgtatatagtgtgtaatgatcaagctaactagcacatttactacttcaaccatttttcatttctttgaattgtgaacattcaaaattttctggctttttaaaaatatacaataagtcatagttaaccatattcaccctacaatgccacagaacaccagaactcactcctcttatctaactgtaattctgtatccattaaccagcctcccctcccctacttctgtgagctttttttttgttaagagacagggtcttgctagtgtagtctgggctctgggcaactgtagtcacccagactggagacagtggtttgatcatagttcactgcagcttcaaactcttgggcccatcwgatcctcacacctcagcctcctgagcagctggcattatgggcatgcaccattgcacatgtctgatttttgactttgtagagatatctccctatgttgcccagggagctctggaacttttgacctcaaatgattctcttgccttggtcttacaaagagctaggaaattacaggcatcagccatattgccca

SEQ ID NO: 598349 - DNA, 639 bp, Homo sapiens
atattctgttttttaaataggatgaatgtagcttctcttttgttttaattgacacatatatacataattatgggctatagagtgatatttttatacacgtatatagtgtgtaatgatcaagctaactagcacatttactacttcaaccatttttcatttctttgaattgtgaacattcaaaattttctggctttttaaaaatatacaataagtcatagttaaccatattcaccctacaatgccacagaacaccagaactcactcctcttatctaactgtaattctgtatccattaaccagcctcccctcccctacttctgtgagctttttttttgttaagagacagggtcttgctagtgtagtctgggctctgggcaactgtagtcacccagactggagacagtggtttgatcatagttcactgcagcttcaaactcttgggcccatcagatcctcacacctcagcctcctgagcagctggcattatgggcatgcaccattgcacatgtctgatttttgactttgtagagatatctccctatgttkcccagggagctctggaacttttgacctcaaatgattctcttgccttggtcttacaaagagctaggaaattacaggcatcagccatattgccca

SEQ ID NO: 598350 - DNA, 588 bp, Homo sapiens
ccattaaccagcctcccctcccctacttctgtgagctttttttttgttaagagacagggtcttgctagtgtagtctgggctctgggcaactgtagtcacccagactggagacagtggtttgatcatagttcactgcagcttcaaactcttgggcccatcagatcctcacacctcagcctcctgagcagctggcattatgggcatgcaccattgcacatgtctgatttttgactttgtagagatatctccctatgttgcccagggagctctggaacttttgrcctcaaatgattctcttgccttggtcttacaaagagctaggaaattacaggcatcagccatattgcccagccttcaattttcctttagctcccacacatgagtaagaatgtgcagtatttatctttctgtgtctgcacttaacatccgtcagactgatccacgtggccacgaataacaggatttaattcctttatatggtgaatagtattccactgtgtttgtgtgccacagtttttcatccattcatttggtgatggacatgtatgttgattccatacacaagctgttgtggatagtgctacagta

SEQ ID NO: 598351 - DNA, 588 bp, Homo sapiens
ccattaaccagcctcccctcccctacttctgtgagctttttttttgttaagagacagggtcttgctagtgtagtctgggctctgggcaactgtagtcacccagactggagacagtggtttgatcatagttcactgcagcttcaaactcttgggcccatcagatcctcacacctcagcctcctgagcagctggcattatgggcatgcaccattgcacatgtctgatttttgactttgtagagatatctccctatgttgcccagggagctctggaacttttgacctcaaatgattctcttgccttggtcttacaaagagctaggaaattacaggcatcagccatattgcccagccttcaattttcctttagctcccacacrtgagtaagaatgtgcagtatttatctttctgtgtctgcacttaacatccgtcagactgatccacgtggccacgaataacaggatttaattcctttatatggtgaatagtattccactgtgtttgtgtgccacagtttttcatccattcatttggtgatggacatgtatgttgattccatacacaagctgttgtggatagtgctacagta

SEQ ID NO: 598352 - DNA, 588 bp, Homo sapiens
ccattaaccagcctcccctcccctacttctgtgagctttttttttgttaagagacagggtcttgctagtgtagtctgggctctgggcaactgtagtcacccagactggagacagtggtttgatcatagttcactgcagcttcaaactcttgggcccatcagatcctcacacctcagcctcctgagcagctggcattatgggcatgcaccattgcacatgtctgatttttgactttgtagagatatctccctatgttgcccagggagctctggaacttttgacctcaaatgattctcttgccttggtcttacaaagagctaggaaattacaggcatcagccatattgcccagccttcaattttcctttagctcccacacatgagtaagaatgtgcagtatttatctttctgtgtctgcacttaacatccrtcagactgatccacgtggccacgaataacaggatttaattcctttatatggtgaatagtattccactgtgtttgtgtgccacagtttttcatccattcatttggtgatggacatgtatgttgattccatacacaagctgttgtggatagtgctacagta

SEQ ID NO: 598353 - DNA, 512 bp, Homo sapiens
ggatttaattcctttatatggtgaatagtattccactgtgtttgtgtgccacagtttttcrtccattcatttggtgatggacatgtatgttgattccatacacaagctgttgtggatagtgctacagtaaacatatgaggacagatatccttttgatctattgttttcttttctattgcctgaatacccggtagtggggttgctggatccctcggcagtcccattattagtttttttgagaaaacctcctgttgttctctatagtggctgcactaatttaccttcccaccaacagcatgtaagagtttactgttctctggagcctcaccagcatttgttattttttttgtcttttcaatgacagcaatttattcaaattgaagcaagattatatcacattgtagatttgatttgtatttccctgaggattagtgatactgagcattttaaaatttatttattggctatttgtatttctttttctaaaaaaaagtatagttagatattttgcc

SEQ ID NO: 598354 - DNA, 512 bp, Homo sapiens
ggatttaattcctttatatggtgaatagtattccactgtgtttgtgtgccacagtttttcatccattcatttggtgatggacatgtakgttgattccatacacaagctgttgtggatagtgctacagtaaacatatgaggacagatatccttttgatctattgttttcttttctattgcctgaatacccggtagtggggttgctggatccctcggcagtcccattattagtttttttgagaaaacctcctgttgttctctatagtggctgcactaatttaccttcccaccaacagcatgtaagagtttactgttctctggagcctcaccagcatttgttattttttttgtcttttcaatgacagcaatttattcaaattgaagcaagattatatcacattgtagatttgatttgtatttccctgaggattagtgatactgagcattttaaaatttatttattggctatttgtatttctttttctaaaaaaaagtatagttagatattttgcc

SEQ ID NO: 598355 - DNA, 512 bp, Homo sapiens
ggatttaattcctttatatggtgaatagtattccactgtgtttgtgtgccacagtttttcatccattcatttggtgatggacatgtatgttgattccatacacaagctgttgtggatagtgctacagtaaacatatgaggacagatatccttttgatctattgttttcttttctattgcctgaatacccggtagtggggttgctggatccctcggcagtcccattattagtttttttgagaaaacctcctgttgttctctatwgtggctgcactaatttaccttcccaccaacagcatgtaagagtttactgttctctggagcctcaccagcatttgttattttttttgtcttttcaatgacagcaatttattcaaattgaagcaagattatatcacattgtagatttgatttgtatttccctgaggattagtgatactgagcattttaaaatttatttattggctatttgtatttctttttctaaaaaaaagtatagttagatattttgcc

SEQ ID NO: 598356 - DNA, 527 bp, Homo sapiens
aatttaccttcccaccaacagcatgtaagagtttactgttctctggagcctcaccagcatttgttattttttttgtcttttcaatgacagcaatttattcaaattgaagcaagattatatcacattgtagatttgatttgtatttccctgaggattagtgatactgagcattttaaaatttatttattggctatttgtatttctttttctaaaaaaaagtatagttagatattttgcccaattttaaactcagatttttttactgtgawgttgtttgagtttttttgtatattttgtgtattagtccctcattaggtgaatagcttgacaatattttctcctattctacaggttttctcttcactcagttgtttgctggacagaagctctttagcttaatgtagtgtcttttgtctatgatttgtagtttgcctatgcttctgatgttttacccataaaaatctttgtgcagactaatgtcctcaagcatataacttatatttacttagagtagtttgataattttg

SEQ ID NO: 598357 - DNA, 527 bp, Homo sapiens
aatttaccttcccaccaacagcatgtaagagtttactgttctctggagcctcaccagcatttgttattttttttgtcttttcaatgacagcaatttattcaaattgaagcaagattatatcacattgtagatttgatttgtatttccctgaggattagtgatactgagcattttaaaatttatttattggctatttgtatttctttttctaaaaaaaagtatagttagatattttgcccaattttaaactcagatttttttactgtgatgttgtttgagtttttttgtatattttgtrtattagtccctcattaggtgaatagcttgacaatattttctcctattctacaggttttctcttcactcagttgtttgctggacagaagctctttagcttaatgtagtgtcttttgtctatgatttgtagtttgcctatgcttctgatgttttacccataaaaatctttgtgcagactaatgtcctcaagcatataacttatatttacttagagtagtttgataattttg

SEQ ID NO: 598358 - DNA, 454 bp, Homo sapiens
agcatcaagagtgaggcctgatgtaaactatgaacttcaagtgattataatgtgtcaatgtaagttcatcagttgtaacaaatggaccactctctggtggaaaatattaataatgggggaggctatgcgtgtgtgggaggcatgggatatatgagaaatctctgtaccttcctctcaattttgctgtgaacctaaaactactctaagaaataaggttattgattkaaaaaaaatattcagctgggctcagtggctcatgcctgtaatctcagcactttgggaggcaaaagtgggtggatcacctgaggtcaggagttcaagaccagcctggccaacatggcaaaacctcatctctaataaaaatacaaaaattagctgggcatggtagctggcacctgtaatttcagttacctgggaggctgaggcaggagaatcgcttgagcctagaaagcag

SEQ ID NO: 598359 - DNA, 613 bp, Homo sapiens
tagctgggcatggtagctggcacctgtaatttcagytacctgggaggctgaggcaggagaatcgcttgagcctagaaagcagaggttgcagttaaccaagatcgcaccactgcactgcagcctgggagacagagtgagattctgtctcaaaaaacaaaaaagatattcactgtctatgcatcccaggatctccagaacaacaattaaaataaataaataaaaaagatggctgggggcagtggctcatgtctgtaatcccagcactttgagaggctgaggtgggtggatcacctgacgtcaggagttcgagaccagcctgactaacatggtaaaacctcatctctactgaatataaaaaattagccgggcatgatggtgcatgcctgtagttccaggtacctgggaggctgaggcaggagaatcatttgaacctgggaggtggaggttgcaatgatccaagattgtgtcattgcactgcagcctggtcaacaagagcaaaactctgtctcaaaaaaaaataagtaaataaaattaaaaataaagatattcactgaacctgttactatgatatatttaagcaagacacggtgaccctaaaaattagagatcattg

SEQ ID NO: 598360 - DNA, 551 bp, Homo sapiens
gctgggcatggtagctggcacctgtaatttcagttacctgggaggctgaggcaggagaatcgcttgagcctagaaagcagaggttgcagttaaccaagatcgcaccactgcactgcagcctgggagacagagtgagattctgtctcaaaaaacaaaaaagatattcactgtctatgcatcccaggatctccagaacaacaattaaaataaataaataaaaaagatggctgggggcagtggctcatgtctgtaatcccagcactttgagaggctgaggtgggtggatcacctgasgtcaggagttcgagaccagcctgactaacatggtaaaacctcatctctactgaatataaaaaattagccgggcatgatggtgcatgcctgtagttccaggtacctgggaggctgaggcaggagaatcatttgaacctgggaggtggaggttgcaatgatccaagattgtgtcattgcactgcagcctggtcaacaagagcaaaactctgtctcaaaaaaaaataagtaaataaaattaaaaataaagatattcactg

SEQ ID NO: 598361 - DNA, 573 bp, Homo sapiens
ggctgggggcagtggctcatgtctgtaatcccagcactttgagaggctgaggtgggtggatcacctgacgtcaggagttcgagaccagcctgactaacatggtaaaacctcatctctactgaatataaaaaattagccgggcatgatggtgcatgcctgtagttccaggtacctgggaggctgaggcaggagaatcatttgaacctgggaggtggaggttgcaatgatccaagattgtgtcattgcactgcagcctggtcaacaagagcaaaactctgtctcaaaaaaaaataagtaaataaaattaaaaataaagatattcactgaacctgttactatgatatatttaagcaagacacggtgaccctaaaaattagagatcattgaagaccaaagtaacaacaygtggtcattatttctcaaattgaagtatataaaatatataaaataaataaatttaattgcatgcttaggtaagaaaatattgataaaaatgattgaatattttatcttatttcataactctaagcagggctttagcacaatatgaaaactagattattcatgtaatcc

SEQ ID NO: 598362 - DNA, 329 bp, Homo sapiens
catgcttaggtaagaaaatattgataaaaatgattgaatattttatcttatttcataaytctaagcagggctttagcacaatatgaaaactagattattcatgtaatccaaataaaagacaatttttattctaattttaactcagaaattattttgcttatttaacaattttactgaaaggtaaatgagataaataggacagattataattacctaacattgctatggtaacttatgtacaaatagctgttcgtcactgaaagtcaaaaaagtaaccagcgctgcaacttaagatggatcatacaacagaaattagtaccaagttacct

SEQ ID NO: 598363 - DNA, 663 bp, Homo sapiens
atgagataaataggacagattataattacctaacattgctatggtaacttatgtacaaatagctgttcgtcactgaaagtcaaaaaagtaaccagcgctgcaacttaagatggatcatacaacagaaattagtaccaagttaccttatcttataatattatgttatcacccccccattttaaaacaacaccaaaaattaagttgggctatacaaagtgtgcagaattgtgacatataacaggcaagagactgccatccttagaaaggcctgggggcgaggctggcccttggctggtgtttaggaaattggaattgggagggtttccaccattccctgagaagagtggctcactgtgtctaaagtttttatagaaaccgccaatgggtgaaatccaaagcagcagctggtgtatccattaacattctcaaaacaggatgcatctggacccctgtgtgcaatcttcatagcacacagacactaaayagaaaggcagtcattgctgccaaacaggacccaaatgccacacacagtgcaatgaagctataagctccctatggagagaaaagtagacaaataaaaaatattcaatatccaatccaagtccacattaaatcttgattccagaaacgtgcattaaccacttcaaatactaaaatttaaac

SEQ ID NO: 598364 - DNA, 663 bp, Homo sapiens
atgagataaataggacagattataattacctaacattgctatggtaacttatgtacaaatagctgttcgtcactgaaagtcaaaaaagtaaccagcgctgcaacttaagatggatcatacaacagaaattagtaccaagttaccttatcttataatattatgttatcacccccccattttaaaacaacaccaaaaattaagttgggctatacaaagtgtgcagaattgtgacatataacaggcaagagactgccatccttagaaaggcctgggggcgaggctggcccttggctggtgtttaggaaattggaattgggagggtttccaccattccctgagaagagtggctcactgtgtctaaagtttttatagaaaccgccaatgggtgaaatccaaagcagcagctggtgtatccattaacattctcaaaacaggatgcatctggacccctgtgtgcaatcttcatagcacacagacactaaatagaaaggcagtcattgctgccaaacaggacccaaatgycacacacagtgcaatgaagctataagctccctatggagagaaaagtagacaaataaaaaatattcaatatccaatccaagtccacattaaatcttgattccagaaacgtgcattaaccacttcaaatactaaaatttaaac

SEQ ID NO: 598365 - DNA, 663 bp, Homo sapiens
atgagataaataggacagattataattacctaacattgctatggtaacttatgtacaaatagctgttcgtcactgaaagtcaaaaaagtaaccagcgctgcaacttaagatggatcatacaacagaaattagtaccaagttaccttatcttataatattatgttatcacccccccattttaaaacaacaccaaaaattaagttgggctatacaaagtgtgcagaattgtgacatataacaggcaagagactgccatccttagaaaggcctgggggcgaggctggcccttggctggtgtttaggaaattggaattgggagggtttccaccattccctgagaagagtggctcactgtgtctaaagtttttatagaaaccgccaatgggtgaaatccaaagcagcagctggtgtatccattaacattctcaaaacaggatgcatctggacccctgtgtgcaatcttcatagcacacagacactaaatagaaaggcagtcattgctgccaaacaggacccaaatgccacacacagtgcaatgaagctataagctccctatggagagaaaagtagacaaatmaaaaatattcaatatccaatccaagtccacattaaatcttgattccagaaacgtgcattaaccacttcaaatactaaaatttaaac

SEQ ID NO: 598366 - DNA, 583 bp, Homo sapiens
aatagaaaggcagtcattgctgccaaacaggacccaaatgccacacacagtgcaatgaagctataagctccctatggagagaaaagtagacaaataaaaaatattcaatatccaatccaagtccacattaaatcttgattccagaaacgtgcattaaccacttcaaakactaaaatttaaaccatcttttctatagcgatttcccatttggttggcaagcatacaggagtagagaatgatttaatttacttacaagtattcagaaaagatagtgacctctacattcaaccagctacagcagcttagcacccagccaaagcctgcatctctcccaccttaagatttagtggttggctagaattagcagcatccaggccacatctatctctgcattctaagtttgcttccaagataaagatacaaatgcaggctggctccaacctagtcagagatcccagccccactctctgcatcccaaaatccctcaaagacccaagagactttccagatttctacagtctcctcacaggttcccatgacagttaaatgccctctctttacctcaactagctgcaggtagaat

SEQ ID NO: 598367 - DNA, 610 bp, Homo sapiens
aaacaggacccaaatgccacacacagtgcaatgaagctataagctccctatggagagaaaagtagacaaataaaaaatattcaatatccaatccaagtccacattaaatcttgattccagaaacgtgcattaaccacttcaaatactaaaatttaaaccatcttttctatagcgatttcccatttggttggcargcatacaggagtagagaatgatttaatttacttacaagtattcagaaaagatagtgacctctacattcaaccagctacagcagcttagcacccagccaaagcctgcatctctcccaccttaagatttagtggttggctagaattagcagcatccaggccacatctatctctgcattctaagtttgcttccaagataaagatacaaatgcaggctggctccaacctagtcagagatcccagccccactctctgcatcccaaaatccctcaaagacccaagagactttccagatttctacagtctcctcacaggttcccatgacagttaaatgccctctctttacctcaactagctgcaggtagaatataatgggtacaacagaaaatcactgtaagtgtaatatgaagataaacagc

SEQ ID NO: 598368 - DNA, 583 bp, Homo sapiens
aatagaaaggcagtcattgctgccaaacaggacccaaatgccacacacagtgcaatgaagctataagctccctatggagagaaaagtagacaaataaaaaatattcaatatccaatccaagtccacattaaatcttgattccagaaacgtgcattaaccacttcaaatactaaaatttaaaccatcttttctatagcgatttcccatttggttggcaagcatacaggagtagagaatgatttaatttacttacaagtattcagaaaagatagtgacctctacattcaaccagctacagcagcttagcacccagccaaagcctgcatctctcccaccttaagatttagtggttggctagaattagcagcatccaggccacatctatctctgcattctaagtttgcttccaagataaagatacaaatgcaggctggctccaacctagycagagatcccagccccactctctgcatcccaaaatccctcaaagacccaagagactttccagatttctacagtctcctcacaggttcccatgacagttaaatgccctctctttacctcaactagctgcaggtagaat

SEQ ID NO: 598369 - DNA, 562 bp, Homo sapiens
attcaaccagctacagcagcttagcacccagccaaagcctgcatctctcccaccttaagatttagtggttggctaaagttagcagcatccaggccacatctatctctgcattctaagtttgcttacaagataaagatacaaatgcaggctggctccaacctagccagagatcccagccccactctctgcatcccaaaatccctcaaagacccaagagactttccagatttctacagtctcctcacagkttcccttgacagttaaatgccctctctttacctcaactagctgcaggtagaatataatgggtacaacagaaaatcactgtaagtgtaatatgaagatacacagcccttttaagcatttcattatattacatctagcttacctctaagggatttattcagatgtgactgaagaaagtctaaagggaaaaaaagcaatttaatttgataaattaaattatcaattatagccaaattatttggctataacaaattaaacattttaagcagacagaagatgcaaacattttaagttgacagaagatataaaatgttca

SEQ ID NO: 598370 - DNA, 610 bp, Homo sapiens
aaacaggacccaaatgccacacacagtgcaatgaagctataagctccctatggagagaaaagtagacaaataaaaaatattcaatatccaatccaagtccacattaaatcttgattccagaaacgtgcattaaccacttcaaatactaaaatttaaaccatcttttctatagcgatttcccatttggttggcaagcatacaggagtagagaatgatttaatttacttacaagtattcagaaaagatagtgacctctacattcaaccagctacagcagcttagcacccagccaaagcctgcatctctcccaccttaagatttagtggttggctagaattagcagcatccaggccacatctatctctgcattctaagtttgcttccaagataaagatacaaatgcaggctggctccaacctagtcagagatcccagccccactctctgcatcccaaaatccctcaaagacccaagagactttccagatttctacagtctcctcacaggttcccatgacagttaaatgccctctctttacctcaactagctgcaggtagaatataatgkgtacaacagaaaatcactgtaagtgtaatatgaagataaacagc

SEQ ID NO: 598371 - DNA, 479 bp, Homo sapiens
tccctcaaagacccaagagactttccagatttctacagtctcctcacaggttcccatgacagttaaatgccctctctttacctcaactagctgcaggtagaatataatgggtacaacagaaaatcactgtaagtgtaatatgaagatamacagcccttttaagcatttcattatattacatctagcttacttctaagtgatttattcagatgtgactgaagaaagtctaaagggaaaaaaagcaatttaatttgataaattaaattatcaattatagccaaattatttggctataacaaattaaacattttaagcagacagaagatgcaaacattttaagttgacagaagatataaaatgttcactatcaaaatgtcgcaactgataaaaatgttctcaaatatttctgtctcaaacttgcattgttcattaaggaagcaaaataggtgggacatacacagcaacaacatccctcaaaa

SEQ ID NO: 598372 - DNA, 630 bp, Homo sapiens
tctctttacctcaactagctgcaggtagaatataatgggtacaacagaaaatcactgtaagtgtaatatgaagataaacagcccttttaagcatttcattatattacatctagcttacttctaagtgatttattcagatgtgactgaagaaagtctaaagggaaaaaaagcaatttaatttgataaattaaattatcaattatagccaaattatttggctataacaaattaaacattttaagcagacagaagatgcaaacattttaagttgacagaagatataaaatgttcactatcaaaaygtcgcaactgataaaaatgttctcaaatatttctgtctcaaacttgcattgttcattaaggaagcaaaataggtgggacatacacagcaacaacatccctcaaaaatcaccttggctcattcctataagccaggcagcaaatacatcatccttacatatgttaattaccttccaatttcaaattctcaactgtgaaataaagggccattttacttggctgcttccagttcaatatgactgtttttattaaaacatctctaacttgaaaaatatttggtgttttctaaaaaactgcaaattgccacaaatggccagataatttggaata

SEQ ID NO: 598373 - DNA, 630 bp, Homo sapiens
tctctttacctcaactagctgcaggtagaatataatgggtacaacagaaaatcactgtaagtgtaatatgaagataaacagcccttttaagcatttcattatattacatctagcttacttctaagtgatttattcagatgtgactgaagaaagtctaaagggaaaaaaagcaatttaatttgataaattaaattatcaattatagccaaattatttggctataacaaattaaacattttaagcagacagaagatgcaaacattttaagttgacagaagatataaaatgttcactatcaaaatgtcgcaactgataaaaatgttctcaaatatttctgtctcaaacttgcattgttcattaaggaagcaaaataggtgggacatacacagcaacaacatccctcaaaaawcaccttggctcattcctataagccaggcagcaaatacatcatccttacatatgttaattaccttccaatttcaaattctcaactgtgaaataaagggccattttacttggctgcttccagttcaatatgactgtttttattaaaacatctctaacttgaaaaatatttggtgttttctaaaaaactgcaaattgccacaaatggccagataatttggaata

SEQ ID NO: 598374 - DNA, 544 bp, Homo sapiens
ggctataacaaattaaacattttaagcagacagaagatgcaaacattttaagttgacagaagatataaaatgttcactatcaaaatgtcgcaactgataaaaatgttctcaaatatttctgtctcaaacttgcattgttcattaaggaagcaaaataggtgggacatacacagcaacaacatccctcaaaaatcaccttggctcattcctataagccaggcagcaaatacatcatccttacatatgttaattaccttccaatttcaaattctcaactgtgaaataaagggccattttayttggctgcttccagttcaatatgactgtttttattaaaacatctctaacttgaaaaatatttggtgttttctaaaaaactgcaaattgccacaaatggccagataatttggaataaacaccctacagaaaaaaatatatattcaagttgcataagtcactttgagcaatcctttgaagatatttcatttatatctaaatgaaccacaggtttagctggcttttccggaaaaccagaagcaaataa

SEQ ID NO: 598375 - DNA, 544 bp, Homo sapiens
ggctataacaaattaaacattttaagcagacagaagatgcaaacattttaagttgacagaagatataaaatgttcactatcaaaatgtcgcaactgataaaaatgttctcaaatatttctgtctcaaacttgcattgttcattaaggaagcaaaataggtgggacatacacagcaacaacatccctcaaaaatcaccttggctcattcctataagccaggcagcaaatacatcatccttacatatgttaattaccttccaatttcaaattctcaactgtgaaataaagggccattttacttggctgcttccagttcaatatgactgtttttattaaaacatctctaacttgaaaaatatttggtgttttctaaaaaactgcaaattgccacaaatggccagataatttggaataaacaccctacagaaaaaaatatatattcaagttgcataagtcactttgagcaatcctttgargatatttcatttatatctaaatgaaccacaggtttagctggcttttccggaaaaccagaagcaaataa

SEQ ID NO: 598376 - DNA, 589 bp, Homo sapiens
gccagataatttggaataaacaccctacagaaaaaaatatatattcaagttgcataagtcactttgagcaatcctttgaagatatttcatttatatctaaatgaaccacaggtttagctggcttttccggaaaaccagaagcaaataatgtatgattataatgaaaaccatctcaagcaattttgaaatgaagtaccacatrtcttatgctgtcccttccatgcacttgacaaaacagcctataacaaattgtttactttgagatttagcaggaaaattccatgaggtttaaatgagatgactactaataagccatctacctttgactctattccaattaaaaatgggttaggaaagtgctttgaaaatcaagtgtgttcatcagggaatcatttacctaagtcttcttaacactgcttagtgaatattaagcctgatatagtaaatacacgctaaccactaaattgaaggggaaagagggagaacaaagagacacgtaaagtacacttactttttctagtaggaaaaagccaattaaaactatcacctattagttttattggaatcagtcttacaggaggtcaaactt

SEQ ID NO: 598377 - DNA, 454 bp, Homo sapiens
tataatgaaaaccatctcaagcaattttgaaatgaagtaccacatatcttatgctgtcccttccatgcacttgacaaaacagcctataacaaattgtttactttgagatttagcaggaaaattccatgaggtttaaatgagatgactamtaataagccatctacctttgactctattccaattaaaaatgggttaggaaagtgctttgaaaatcaagtgtgttcatcagggaatcatttacctaagtcttcttaacactgcttagtgaatattaagcctgatatagtaaatacacgctaaccactaaattgaaggggaaagagggagaacaaagagacacgtaaagtacacttactttttctagtaggaaaaagccaattaaaactatcacctattagttttattggaatcagtcttacaggaggtcaaacttcctactgtcgctacctattct

SEQ ID NO: 598378 - DNA, 589 bp, Homo sapiens
gccagataatttggaataaacaccctacagaaaaaaatatatattcaagttgcataagtcactttgagcaatcctttgaagatatttcatttatatctaaatgaaccacaggtttagctggcttttccggaaaaccagaagcaaataatgtatgattataatgaaaaccatctcaagcaattttgaaatgaagtaccacatatcttatgctgtcccttccatgcacttgacaaaacagcctataacaaattgtttactttgagatttagcaggaaaattccatgaggtttaaatgagatgactactaataagccatctacctttgactctattccaattaaaaatgggttaggaaagtgctttgaaaatcaagtgtgttcatcagggaatcatttacctaagtcttcttaacactgcttagtgaatattaagcctgatatagtaaatacacgctaaccactaaattgaaggggaaagagggagaacaaagagacacgtaaagtacacttactttttctagtaggaaaaagccaattaaaactatcacytattagttttattggaatcagtcttacaggaggtcaaactt

SEQ ID NO: 598379 - DNA, 603 bp, Homo sapiens
ggaggtcaaacttcctactgtcgctacctattctcaatatttttcttatttcttcctaaacttctagagcygtgctgtccaataaatatgtgagccacatatgtaattttaaatgtactactaaaccccattaaaaggtgaaattaattttaaatatacttaactcagtatgtcccaaatagtaatcatagtaataattttaacatgtaatcaatataaaaaattatcaagcagatattctacgctgttcttcccactccaatgacaaaatccagtatatataacacaacacatctcaattaggactagccaggatttcaagtgctcaacagttacaggtggctagtgcctactgaattggacactgcagtttcagtgcattgaatttctatcccacttagcgctaattaaaacttcaccctctcacctgataattatgttaagatctcagaaagtaacccactacaggcagtttcaagccctaatttacctctaattactcttacagcaatgcaatgaatcatgatttaaaattttaaaaaaaattgctgttaaattattagtcaagagcccagggcaatggacagtaaagaaataatgtag

SEQ ID NO: 598380 - DNA, 522 bp, Homo sapiens
tttgaaaatcaagtgtgttcatcagggaatcatttacctaagtcttcttaacactgcttagtgaatattaagcctgatatagtaaatacacgctaaccactaaattgaaggggaaagagggagaacaaagagacacgtaaagtacacttactttttctagtaggaaaaagccaattaaaactatcacctattagttttattggaatcagtcttacaggaggtcaaacttcctactgtcgctacctattctcaatatttttcttatttcttcctaaacttctagagccgtgctgtccaataaatatgtgagccacatatgtaattttaaatgtactastaaaccccattaaaaggtgaaattaattttaaatatacttaactcagtatgtcccaaatagtaatcatagtaataattttaacatgtaatcaatataaaaaattatcaagcagatattctacgctgttcttcccactccaatgacaaaatccagtatatataacacaacacatctcaattaggac

SEQ ID NO: 598381 - DNA, 627 bp, Homo sapiens
ctcaacagttacaggtggctagtgcctactgaattggacactgcagtttcagtgcattgaatttctatcccacttagcgctaattaaaacttcaccctctcacctgataattatgttaagatctcagaaagtaacccactacaggcagtttcaagccctaatttacctctaattactcttacagcaatgcaatgaatcatgatttaaaattttaaaaaaaattgctgttaaattattagtcaagagcccagggcaatggacagtaaagaaataatgtaggccatgggccgagatgacaaaacggtccttttatttaaagctataacaataatctgaagccagccctgtaaaatagacatccattgaaaaaggcatgctagttcttttgcttttttgtgtacttggcctcctgtgtccctaaacagatctcttctcagcagggtttgctcarcaagtcacttgttgagtcttgcggtcaacagagggcgtagggaatggcaggggctggcataggagtgagggggaggaggcaaggtgaggggggccaggtgaggaggggggcacttgaaggggagttcaagaccagcctgggcaacatggtgagaccaccgcccctcaccgctgcca

SEQ ID NO: 598382 - DNA, 362 bp, Homo sapiens
ccattgaaaaaggcatgctagttcttttgcttttttgtgtacttggcctcctgtgtccctaaacagatctcttctcagcagggtttgctcagcaagtcacttgttgagtcttgcggtcaacagagggcgtagggaatggcaggggctggcataggagtgagggggaggagrcaaggtgaggggggccaggtgaggaggggggcacttgaaggggagttcaagaccagcctgggcaacatggtgagaccaccgcccctcaccgctgccatctctggtctcactctggtctctcacacatgcacaaattaaatttaatttaaaaattaaaaaattgttttaaaataagtgaaatatttacatgg

SEQ ID NO: 598383 - DNA, 362 bp, Homo sapiens
ccattgaaaaaggcatgctagttcttttgcttttttgtgtacttggcctcctgtgtccctaaacagatctcttctcagcagggtttgctcagcaagtcacttgttgagtcttgcggtcaacagagggcgtagggaatggcaggggctggcataggagtgagggggaggaggcaaggtgaggggggccaggtgaggaggggggcacttgaargggagttcaagaccagcctgggcaacatggtgagaccaccgcccctcaccgctgccatctctggtctcactctggtctctcacacatgcacaaattaaatttaatttaaaaattaaaaaattgttttaaaataagtgaaatatttacatgg

SEQ ID NO: 598384 - DNA, 449 bp, Homo sapiens
ctcttctaacacaacatttatttagccacaaataaaagaccagtgatgtagcctgtacacaaaaaagtaagaaaacactggttaggctgggacaggggtaggggaaagagatctacaaaattaaaattttattgggaaggatcactaattagaatcagaacaattactgctttaaagtagttaagaacagagcacaaggaacccagagaagaagcagatatgattcagagcagagctyacagagcagatggtatctgagccgagactgatagaataacattaataagggcattcacggccatttattatcacttaactgcaatgcattttgtataagttatttctactcttcatatcaaccatggaaaataatacttattcttctcttttgaagttaaagaagtggtaagtggtctaagaagataaattaacataccaacaccatatag

SEQ ID NO: 598385 - DNA, 449 bp, Homo sapiens
ctcttctaacacaacatttatttagccacaaataaaagaccagtgatgtagcctgtacacaaaaaagtaagaaaacactggttaggctgggacaggggtaggggaaagagatctacaaaattaaaattttattgggaaggatcactaattagaatcagaacaattactgctttaaagtagttaagaacagagcacaaggaacccagagaagaagcagatatgattcagagcagagcttacagagcagatggtatctgagcygagactgatagaataacattaataagggcattcacggccatttattatcacttaactgcaatgcattttgtataagttatttctactcttcatatcaaccatggaaaataatacttattcttctcttttgaagttaaagaagtggtaagtggtctaagaagataaattaacataccaacaccatatag

SEQ ID NO: 598386 - DNA, 449 bp, Homo sapiens
ctcttctaacacaacatttatttagccacaaataaaagaccagtgatgtagcctgtacacaaaaaagtaagaaaacactggttaggctgggacaggggtaggggaaagagatctacaaaattaaaattttattgggaaggatcactaattagaatcagaacaattactgctttaaagtagttaagaacagagcacaaggaacccagagaagaagcagatatgattcagagcagagcttacagagcagatggtatctgagccgagactgatagaataacattaataagggcattcacggccatttattatcacttaactgcaatgcattttgtataagttatttctactcttcatatcaaccatggaaaataatacttattcttctcttttgaagttaargaagtggtaagtggtctaagaagataaattaacataccaacaccatatag

SEQ ID NO: 598387 - DNA, 338 bp, Homo sapiens
tccaatatggcagggggtgtacacgtcctatgcratactgttcctatatccatgggggaaaaggatattgggaacaatattacaaacaatatcacaggggggtgtacatgtcctgagatatgaggagtaatataacactctccccctctagatattacaaactgtatcacagaggggtgtaaaccccctgcgatgtggaaagtaatatcatcctctcccccactggatattacaaataatatcacagacggtgtacatgtgaggtgtttatgatattgggagtaacatcatatcccccagtggatattatgaacaatatcacagaggggtgtatacac

SEQ ID NO: 598388 - DNA, 338 bp, Homo sapiens
tccaatatggcagggggtgtacacgtcctatgcaatactgttcctatatccatgggggaaaaggatattgggaacaatattacaaacaatatcacaggggggtgtacatgtcctgagatatgaggagtaatataacactctccccctctagatattacaaactgtatcacagaggggtgtaaaccccctgcgatgtggaaagtaatatcatcctctcccccactggatattacaaataatatcacagacggtgtacatgtgaggtgtttaygatattgggagtaacatcatatcccccagtggatattatgaacaatatcacagaggggtgtatacac

SEQ ID NO: 598389 - DNA, 572 bp, Homo sapiens
cttaaacttggcgtttgtattagttgggtttcctggtgtctctttagcaagtgaagtttctggttccctccttcactgtgtgacctgcctagtcctcctgggtcgcatttacagaagtttatasgagacctagtttccagggaagaactcactgattccgcgagggagatggcttaatggatggtggtcgtcagccttaaggatacttcagtcttaactgtgtgttacaaagtttgaaagggagggttccctatgaataagaagcacacttgaaagaacagccatctggtctaacctctcactggtgcttcagaggaggaaaaaaggtcacaggtgaagatcccagttttccttgctcaggaaatattaattctactccctagaatgcacaagatttgcaaagactaggtgatagtagaaggtttggacgaactttcagaaggttgaggtgaattcagctaagaagaacaggcaaggacttaggaaatattccttacttgaaggggcctgaaagtgtggtctggggtacagcagtgacctgtcatacttgagaggattaaaatactctccaa

SEQ ID NO: 598390 - DNA, 572 bp, Homo sapiens
cttaaacttggcgtttgtattagttgggtttcctggtgtctctttagcaagtgaagtttctggttccctccttcactgtgtgacctgcctagtcctcctgggtcgcatttacagaagtttatacgagacctagtttccagggaagaactcactgattccgcgagggagatggcttaatggatgrtggtcgtcagccttaaggatacttcagtcttaactgtgtgttacaaagtttgaaagggagggttccctatgaataagaagcacacttgaaagaacagccatctggtctaacctctcactggtgcttcagaggaggaaaaaaggtcacaggtgaagatcccagttttccttgctcaggaaatattaattctactccctagaatgcacaagatttgcaaagactaggtgatagtagaaggtttggacgaactttcagaaggttgaggtgaattcagctaagaagaacaggcaaggacttaggaaatattccttacttgaaggggcctgaaagtgtggtctggggtacagcagtgacctgtcatacttgagaggattaaaatactctccaa

SEQ ID NO: 598391 - DNA, 572 bp, Homo sapiens
cttaaacttggcgtttgtattagttgggtttcctggtgtctctttagcaagtgaagtttctggttccctccttcactgtgtgacctgcctagtcctcctgggtcgcatttacagaagtttatacgagacctagtttccagggaagaactcactgattccgcgagggagatggcttaatggatggtggtcgtcagccttaaggatacttcagtcttaactgtgtgttacaaagtttgaaagggagggttccctatgaataagaagcacacttgaaagaacagccatctggtctaacctctcactggtgcttcagaggaggaaaaaaggtcacaggtgaagatcccagttttccttgctcaggaaatattaattctactccctagaatgcacaagatttgcaaagactaggtgatagtagaaggtttggacgaactttcagaaggttgaggtgaattcagctaagaagaacaggcaaggacttaggaaatattccttayttgaaggggcctgaaagtgtggtctggggtacagcagtgacctgtcatacttgagaggattaaaatactctccaa

SEQ ID NO: 598392 - DNA, 530 bp, Homo sapiens
aatatttccagtgtttatttgcactttagcccactctgtgtagccttatttcttctaaactcaccattaacctgaataatagtcaaatttagggggactgtatttgccttactcgagtcttctaccatagttgaaactgtcgtacccgagtgagttagagagaaatgccacgcattgagacgaattcaggagtcctttactagccagcgactgagacatggctaamgcacgaaattctctcggccccgaagaagggactagattttcttttatactttggtttagagaggggaggggggattctagctgcagcaactttacagaagaaaaaaacagacaaaaaacttagaaagacagatggttacaggaaaacaaactgttcctggtgtagggtctttaaattcaccacaaagtgataggtgagggggctctgggcattatctgccggacaaatgtgggggctttatgatactatctctgagtaaattgctgggaactggggacatctcttgtctcagcactttatcagt

SEQ ID NO: 598393 - DNA, 562 bp, Homo sapiens
gggggattctagctgcagcaactttacagaagaaaaaaacagacaaaaaacttagaaagacagatggttacaggaaaacaaactgttcctggtgtagggtctttaaattcaccacaaagtgataggtgagggggctctgggcattatctgccggacaaatgtgggggctttatgatactatctctgagtaaattgctgggaactggggacatctcttgtctcagcactttatcagttaattgcacgctttgatatgttgaaaatcagcttgcacaagttaaagtccttgaggaaagggggtgggtaaggagtccttgatgtcttgttaatgaaggagccaaatggagtttgtctggttttctcagctaagggagagtctattcatattaaaaacaaggttagctgtctaaggaagagtctattcatgttaatacaacrttgggtattacaaaacgtctgttcatgatctggaaattcttctgtgttagttctgttaaaagaaaaactttaaaggagtttaatttagcaataaacgattcatgaatcggacagtccccagaat

SEQ ID NO: 598394 - DNA, 553 bp, Homo sapiens
gcaataaacgattcatgaatcggacagtccccagaatcacagcagattcacagagactccagtgcagtcatgtggyagaagaagatttatagacaaaagggaagtggcataccgaaatcggaagtgaggtacagaaacaactcagcgtttgccttgtttgaacacattttgaacatttggcagtgcctgagtggttgaagtttggccattgggattggccaagatgtagctgttgttccaggtgcatactcttaagttagtttttcattcttgtatacctattaaggtaggttgcagttcacccacaaggactcatatatagaattatggagtccttctcaggccatacttagttcactttaacaatgccttccctttggttattttctcaattttgagagattggccgaaacttcagtcactggtgtcactattaccattgcaaatgtacttacttggtttggaaacccactgggaaatagaccagtgagatttgaaaaggtggaacaaggacttgagtagaaggtatcttcttatgctggaacatcctgtt

SEQ ID NO: 598395 - DNA, 553 bp, Homo sapiens
gcaataaacgattcatgaatcggacagtccccagaatcacagcagattcacagagactccagtgcagtcatgtggcrgaagaagatttatagacaaaagggaagtggcataccgaaatcggaagtgaggtacagaaacaactcagcgtttgccttgtttgaacacattttgaacatttggcagtgcctgagtggttgaagtttggccattgggattggccaagatgtagctgttgttccaggtgcatactcttaagttagtttttcattcttgtatacctattaaggtaggttgcagttcacccacaaggactcatatatagaattatggagtccttctcaggccatacttagttcactttaacaatgccttccctttggttattttctcaattttgagagattggccgaaacttcagtcactggtgtcactattaccattgcaaatgtacttacttggtttggaaacccactgggaaatagaccagtgagatttgaaaaggtggaacaaggacttgagtagaaggtatcttcttatgctggaacatcctgtt

SEQ ID NO: 598396 - DNA, 573 bp, Homo sapiens
gcgtttgccttgtttgaacacattttgaacatttggcagtgcctgagtggttgaagtttggccattgggattggccaagatgtagctgttgttccaggtgcatactcttaagttagtttttcattcttgtatacctattaargtaggttgcagttcacccacaaggactcatatatagaattatggagtccttctcaggccatacttagttcactttaacaatgccttccctttggttattttctcaattttgagagattggccgaaacttcagtcactggtgtcactattaccattgcaaatgtacttacttggtttggaaacccactgggaaatagaccagtgagatttgaaaaggtggaacaaggacttgagtagaaggtatcttcttatgctggaacatcctgtttacaggagaaaaacaaaacctggtttgttctaggatttatgtgtttccctaaagtcttagtttgattatgttacatttagcatgagtgactccattttggtttggtttggtttggtctgttgggacctattgcatgagcttagttcaaaacaatggcctcccat

SEQ ID NO: 598397 - DNA, 573 bp, Homo sapiens
gcgtttgccttgtttgaacacattttgaacatttggcagtgcctgagtggttgaagtttggccattgggattggccaagatgtagctgttgttccaggtgcatactcttaagttagtttttcattcttgtatacctattaaggtaggttgcagttcacccacaaggactcatatatagaattatggagtccttctcaggccatacttagttcactttaacaatgccttccctttggttattttctcaattttgagagattggccgaaacttcagtcactggtgtcactattaccattgcaaatgtacttacttggtttrgaaacccactgggaaatagaccagtgagatttgaaaaggtggaacaaggacttgagtagaaggtatcttcttatgctggaacatcctgtttacaggagaaaaacaaaacctggtttgttctaggatttatgtgtttccctaaagtcttagtttgattatgttacatttagcatgagtgactccattttggtttggtttggtttggtctgttgggacctattgcatgagcttagttcaaaacaatggcctcccat

SEQ ID NO: 598398 - DNA, 582 bp, Homo sapiens
gaaacttcagtcactggtgtcactattaccattgcaaatgtacttacttggtttggaaacccactgggaaatagaccagtgagatttgaaaaggtggaacaaggacttgagtagaaggtatcttcttatgctggaacatcctgtttacaggagaaaaacaaaacctggtttgttctaggatttatgtgtttccctaaagtcttagtttgattatgttacatttagcatgagtgactccattttggtttggtttggtttggtctgttgggacctattgcatgagcttagttcaaaacaatggcctcccataattttgctttaaaaattcctcctttttgctgggtgtggtggctcacacctgtaatcccagcactttgggagcctgaggtgggcagatcacgaggtcaggagattgagaccatccttgctaatatggtgaaaccccatctctactaaaaatacaaaaaattagccaagtgtggtggygggtgcctgtattcccagctactcaggaggctgaggcaggagaatggcctgaacccgggaggcagagcttgcagtgagccgagatcatgccactgc

SEQ ID NO: 598399 - DNA, 517 bp, Homo sapiens
agccaggttctgctgggccaagcacaggggctgatggaagacacgttcttcctcggagaccaaggctctgcttctctgtggcgtttttttttttttttccttttccccaggtgcctctctttcccgtcatgggctttctgcycgccttgatgtacccctagccggcccgaggcgcacccttgttttgagccagggatgctagggtatccggggcccagtgcagggcttatgggtagggacgttcgtccatgggggacccaggccccacttctgggcggcgcagttttttattttcttctctgccccaggtgtctcacctttccctcatgggccttctgtctgtcttggggtacccctagcaggccgaggcgcatgctgggctcgagccagggataccagtgtccccggggcgcagtgcaagtgctgatgggaagacagtttcttctgtgggggacccaggccccgcttatccgcggcacggttgttgtttttttttctctctgccccaggtgtgtca

SEQ ID NO: 598400 - DNA, 621 bp, Homo sapiens
tttgggtttctggttttgcaggtcactcccattgttttgggttccagtttaagcacatcactcccattgttttcgtttccggttttagcacgtcactcycattgttttgggttccagttttagcaagtcactcccattgttttgggtttctggtttagcatgtcactcccattgttttgggtttccagtttagcatgtcactcataggttatggtggccttatggttgcacattttttttaatctcttgtcattccagttgaagagataccatttgacattttagagatggctgcatgcaaactcttgaaacatttgagtaagtacagtacaccagggagactcttatgactattgggataacaccaagatgtggtatatgctccttactcagggtccccataaatcaaaccaccaaaaatcaaatagattaaagaatgaattagataaagggtttacttgcttaactaagtggtttttttttgttaattccctacaaccaaatctttataataccccatgttttctccacatgctgtaagtgttagcagctgcacagatacttaagataagagtctcatgatagtagagaagtcttgatctgtgatcttgggaaaagctg

SEQ ID NO: 598401 - DNA, 533 bp, Homo sapiens
tgctgtaagtgttagcagctgcacagatacttaagataagagtctcatgatagtagagaagtcttgatctgtgatcttgggaaaagctgttcacattaaggatgccatcttcttctggggggaactgtccgtgttagctttaccttaagggttccaataggcatatggttcygagtgtggagggacccttctgagttgtgagactatgaacccaaagtttaaggttttaaagtttgttgtcatgtggatggcgagggcagtccttctctgatgttctcagaagatccagtcatcagattctagattttgaagggtttgactgtcctcagtgaaccataaaaggctttccttacctggtgaaaatacacttcagggtaataatctactgttttaatatcaactctctcgcatggaagagcttttatacaatcagaaaacatgcactgaaaatgacaactgaatgaaatccctttataaaatgtttaaatggcccatcagataaccaaatgtacctgaagttttgattgttttcc

SEQ ID NO: 598402 - DNA, 584 bp, Homo sapiens
aaaagctgttcacattaaggatgccatcttcttctggggggaactgtccgtgttagctttaccttaagggttccaataggcatatggttccgagtgtggagggacccttctgagttgtgagactatgaacccaaagtttaaggttttaaagtttgttgtcatgtggatggcgagggcagtccttctctgatgttctcagaagatccagtcatcagattctagattttgaagggtttgactgtcctcagtgaaccataaaaggctttcyttacctggtgaaaatacacttcagggtaataatctactgttttaatatcaactctctcgcatggaagagcttttatacaatcagaaaacatgcactgaaaatgacaactgaatgaaatccctttataaaatgtttaaatggcccatcagataaccaaatgtacctgaagttttgattgttttcctaggaatataggtttcacaaaccaaacattggttataaactattttagcagtttagaaatcaccacaccaatatatttaatttggatcgttttctctttctgtgatgagttatggaatgcagaacttttaat

SEQ ID NO: 598403 - DNA, 490 bp, Homo sapiens
ctttccttacctggtgaaaatacacttcagggtaataatctactgttttaayatcaactctctcgcatggaagagcttttatacaatcagaaaacatgcactgaaaatgacaactgaatgaaatccctttataaaatgtttaaatggcccatcagataaccaaatgtacctgaagttttgattgttttcctaggaatataggtttcacaaaccaaacattggttataaactattttagcagtttagaaatcaccacaccaatatatttaatttggatcgttttctctttctgtgatgagttatggaatgcagaacttttaataacaaaagtttttaggacttaagaaggataaggtggccatcctggttcttcataggtctgtgcttaattaacatcagacttacatcctcttgaataccagctgtttctccaaattaggtgcatggcactggtaactgatgagtagttataggtaatttgatttagacc

SEQ ID NO: 598404 - DNA, 584 bp, Homo sapiens
aaaagctgttcacattaaggatgccatcttcttctggggggaactgtccgtgttagctttaccttaagggttccaataggcatatggttccgagtgtggagggacccttctgagttgtgagactatgaacccaaagtttaaggttttaaagtttgttgtcatgtggatggcgagggcagtccttctctgatgttctcagaagatccagtcatcagattctagattttgaagggtttgactgtcctcagtgaaccataaaaggctttccttacctggtgaaaatacacttcagggtaataatctactgttttaatatcaactctctygcatggaagagcttttatacaatcagaaaacatgcactgaaaatgacaactgaatgaaatccctttataaaatgtttaaatggcccatcagataaccaaatgtacctgaagttttgattgttttcctaggaatataggtttcacaaaccaaacattggttataaactattttagcagtttagaaatcaccacaccaatatatttaatttggatcgttttctctttctgtgatgagttatggaatgcagaacttttaat

SEQ ID NO: 598405 - DNA, 584 bp, Homo sapiens
aaaagctgttcacattaaggatgccatcttcttctggggggaactgtccgtgttagctttaccttaagggttccaataggcatatggttccgagtgtggagggacccttctgagttgtgagactatgaacccaaagtttaaggttttaaagtttgttgtcatgtggatggcgagggcagtccttctctgatgttctcagaagatccagtcatcagattctagattttgaagggtttgactgtcctcagtgaaccataaaaggctttccttacctggtgaaaatacacttcagggtaataatctactgttttaatatcaactctctcgcatggaagagcttttatacaatcagaaaacatgcactgaaaatgacaactgaatgaaatccctttataaaatgtttaaatggcccatcagataaccaaatgtacctgaagttttgattgttttcctaggaatataggtttcacaaaccaaacattggttataaactattttagcagtttagaaatcaccacaccaatatatttaatttggatcgttttctctttstgtgatgagttatggaatgcagaacttttaat

SEQ ID NO: 598406 - DNA, 517 bp, Homo sapiens
agccaggttctgctgggccaagcacaggggctgatggaagacacgttcttcctcggagaccaaggctctgcttctctgtggcgtttttttttttttttccttttccccaggtgcctctctttcccgtcatgggctttctgctcgccttgatgtacccctagccggcccgaggcgcacccttgttttgagccagggatgctagggtatccggggcccagtgcagggcttatgggtagggacgttcgtccatgggggacccaggccccacttctgggcggcgcagttttttattttcttctctgccccaggtgtctcacctttccctcatgggccttctgtctgtcttggggtacccctagcaggccgaggmgcatgctgggctcgagccagggataccagtgtccccggggcgcagtgcaagtgctgatgggaagacagtttcttctgtgggggacccaggccccgcttatccgcggcacggttgttgtttttttttctctctgccccaggtgtgtca

SEQ ID NO: 598407 - DNA, 575 bp, Homo sapiens
aggccgaggcaggtgaatcacctgacgtcaggagtttgagaccagcctggccaacatgatgaaacctgtctctagtaaaaatacaaaaattagcaaggcgtgttggcaggcatgtgtaatctcagatactcaggaggctgaggcagragaatcacttgaacccaggagacagaggttgcagtaagccaagatcataccactgcactatagccttggtgatggagactctgtctcaaaacaaaacaaaaaaaaggtttgtgctttctttacataagagtacatcttctgactataaaaatcctggaaaaaacctaggaaatactcttctggatatcatatttgtcaattaatttatggctaagtcctcaaaagcaattgcaagaataacaaaaattgacaagtgtgatctaatttagctaaatagcttctgcacagcatgagaaactatcacgagattaaacagaaagcctaaaagaatggaagaaaatattcacaaagtatggatatagcaaacgcctattatccagaatccataagagacctaaacaaatcaacaagcaaaaaataaataagac

SEQ ID NO: 598408 - DNA, 575 bp, Homo sapiens
aggccgaggcaggtgaatcacctgacgtcaggagtttgagaccagcctggccaacatgatgaaacctgtctctagtaaaaatacaaaaattagcaaggcgtgttggcaggcatgtgtaatctcagatactcaggaggctgaggcagaagaatcacttgaacccaggagacagaggttgcagtaagccaagatcataccactgcactatagccttggtgatggagactctgtctcaaaacaaaacaaaaaaaaggtttgtgctttctttacataagagtacatcttctgactataaaaatcctggaaaaaacctaggaaatactcttctggatatcatatttgtcarttaatttatggctaagtcctcaaaagcaattgcaagaataacaaaaattgacaagtgtgatctaatttagctaaatagcttctgcacagcatgagaaactatcacgagattaaacagaaagcctaaaagaatggaagaaaatattcacaaagtatggatatagcaaacgcctattatccagaatccataagagacctaaacaaatcaacaagcaaaaaataaataagac

SEQ ID NO: 598409 - DNA, 611 bp, Homo sapiens
  misc_feature 232, 258: n = A,T,C or G
tatagcaaacgcctattatccagaatccataagagacctaaacaaatcaacaagcaaaaaataaataagaccattataaatgggcaaaggacatgaacagacagttctcaaaataacacacgtaagtggccaacaaacattaaaaaatgcttaccatwgctaatcatcagaaaaatgccacacaaaacatcaatgagataccatttcacaccagtcacaatgacttttgttnaaaacaaataataatagaactttaancaggatgttggggaggctgtggagaaagggggacacaaaccgtttgtggcaatgtaaattaattcagctactatggagagcagtttggaaattaagaactaagaatgactgttggatgcagcaaccccattactatactaggggtataccgaaaggacaataaatcattgtaacaaaaagatgtatacacatgtatgttcattgcagcactattcacaatagcaaagacgtggagtcaatccaggtacatccaaggtagattgaaaatccaaggtagattggaaaattccatatataccatggaatactatgcagccatgaaaagaacaaaatcacatcatttgcagcaacat

SEQ ID NO: 598410 - DNA, 557 bp, Homo sapiens
  misc_feature 162, 188: n = A,T,C or G
ccattataaatgggcaaaggacatgaacagacagttctcaaaataacacacgtaagtggccaacaaacattaaaaaatgcttaccatagctaatcatcagaaaaatgccacacaaaacatcaatgagataccatttcacaccagtcacaatgacttttgttnaaaacaaataataatagaactttaancaggatgttggggaggctgtggagaaagggggacacaaaccgtttgtggcaatgtaaattaattcagctactatggagagcagtttggaaattaagwactaagaatgactgttggatgcagcaaccccattactatactaggggtataccgaaaggacaataaatcattgtaacaaaaagatgtatacacatgtatgttcattgcagcactattcacaatagcaaagacgtggagtcaatccaggtacatccaaggtagattgaaaatccaaggtagattggaaaattccatatataccatggaatactatgcagccatgaaaagaacaaaatcacatcatttgcagcaacatgaatacagctggaatc

SEQ ID NO: 598411 - DNA, 611 bp, Homo sapiens
  misc_feature 232, 258: n = A,T,C or G
tatagcaaacgcctattatccagaatccataagagacctaaacaaatcaacaagcaaaaaataaataagaccattataaatgggcaaaggacatgaacagacagttctcaaaataacacacgtaagtggccaacaaacattaaaaaatgcttaccatagctaatcatcagaaaaatgccacacaaaacatcaatgagataccatttcacaccagtcacaatgacttttgttnaaaacaaataataatagaactttaancaggatgttggggaggctgtggagaaagggggacacaaaccgtttgtggcaatgtaaattaattcagctactatggagagcagtttggaaattaagaactaagaatgactgttggatgcagcaaccccattactatactaggggtataccgaaaggacaataaatcattgtaacaaaaagatgtatacacrtgtatgttcattgcagcactattcacaatagcaaagacgtggagtcaatccaggtacatccaaggtagattgaaaatccaaggtagattggaaaattccatatataccatggaatactatgcagccatgaaaagaacaaaatcacatcatttgcagcaacat

SEQ ID NO: 598412 - DNA, 611 bp, Homo sapiens
  misc_feature 232, 258: n = A,T,C or G
tatagcaaacgcctattatccagaatccataagagacctaaacaaatcaacaagcaaaaaataaataagaccattataaatgggcaaaggacatgaacagacagttctcaaaataacacacgtaagtggccaacaaacattaaaaaatgcttaccatagctaatcatcagaaaaatgccacacaaaacatcaatgagataccatttcacaccagtcacaatgacttttgttnaaaacaaataataatagaactttaancaggatgttggggaggctgtggagaaagggggacacaaaccgtttgtggcaatgtaaattaattcagctactatggagagcagtttggaaattaagaactaagaatgactgttggatgcagcaaccccattactatactaggggtataccgaaaggacaataaatcattgtaacaaaaagatgtatacacatgtatgttcattgcagcactattcacaatagcaaagaygtggagtcaatccaggtacatccaaggtagattgaaaatccaaggtagattggaaaattccatatataccatggaatactatgcagccatgaaaagaacaaaatcacatcatttgcagcaacat

SEQ ID NO: 598413 - DNA, 631 bp, Homo sapiens
gcaatgtaaattaattcagctactatggagagcagtttggaaattaagaactaagaatgactgttggatgcagcaaccccattactatactaggggtataccgaaaggacaataaatcattgtaacaaaaagatgtatacacatgtatgttcattgcagcactattcacaatagcaaagacgtggagtcaatccaggtacatccaaggtagattgaaaatccaaggtagattggaaaattccatatataccatggaatactatgcagccatgaaaagaacaaaatcacatcatttgcagcaacatgaatacagctggaatccactctcctaagmaaaccaacacagaaacagaaaccaaatatctcatgttttcactcatgtgggagctacatattgggtgcacattgtcataaaggtgggaataatagacactgggaaataagaatggggagggacagagtgggccagggttgaaaaactacttcttgggtcctatgctcacaacctgtgtgatgggtttaattgtactgcaaacctcggtatccctcaatatgcctttggaagaaacttacagaggtaccacgttaatttagaatacaaactagaaaaaaaaaagaaaagtttactata

SEQ ID NO: 598414 - DNA, 599 bp, Homo sapiens
acacatgtatgttcattgcagcactattcacaatagcaaagacgtggagtcaatccaggtacatccaaggtagattgaaaatccaaggtagattggaaaattccatatataccatggaatactatgcagccatgaaaagaacaaaatcacatcatttgcagcaacatgaatacagctggaatccactctcctaagaaaaccaacrcagaaacagaaaccaaatatctcatgttttcactcatgtgggagctacatattgggtgcacattgtcataaaggtgggaataatagacactgggaaataagaatggggagggacagagtgggccagggttgaaaaactacttcttgggtcctatgctcacaacctgtgtgatgggtttaattgtactgcaaacctcggtatccctcaatatgcctttggaagaaacttacagaggtaccacgttaatttagaatacaaactagaaaaaaaaaagaaaagtttactataagtagagaacagaaatttctttttaagataaaatttattgaagtaaaaaatggattaaacttttataaagggcaaagttttctaagaatttcaaagcaatgcattc

SEQ ID NO: 598415 - DNA, 482 bp, Homo sapiens
agaatgactgttggatgcagcaaccccattactatactaggggtataccgaaaggacaataaatcattgtaacaaaaagatgtatacacatgtatgttcattgcagcactattcacaatagcaaagacgtggagtcaatccaggtacatccaaggtagattgaaaatccaaggtagattggaaaattccatatataccatggaatactatgcagccatgaaaagaacaaaatcacatcatttgcagcaacatgaatacagctggaatccactctcctaagaaaaccaacacagaaacagaaaccaaatatctcatgttttcactcatgtgggagctacatattgggtgcacattgtcataaaggtgggaataatagacactgggaaataagaatggggagggacagagtgrgccagggttgaaaaactacttcttgggtcctatgctcacaacctgtgtgatgggtttaattgtactgcaaa

SEQ ID NO: 598416 - DNA, 599 bp, Homo sapiens
acacatgtatgttcattgcagcactattcacaatagcaaagacgtggagtcaatccaggtacatccaaggtagattgaaaatccaaggtagattggaaaattccatatataccatggaatactatgcagccatgaaaagaacaaaatcacatcatttgcagcaacatgaatacagctggaatccactctcctaagaaaaccaacacagaaacagaaaccaaatatctcatgttttcactcatgtgggagctacatattgggtgcacattgtcataaaggtgggaataatagacactgggaaataagaatggggagggacagagtgggccagggttgaaaaactacttcttgggtcctatgctcacaacctgtgtgatgggtttaattgtactgcaaacctcggtatccctcaatatgcctttggaagaaacttacagaggtaccacgttaatttagaatacaaactagaaaaaaaaaagaaaagtttactataagtagagaacagaaatttctttttaagataaaatttattgaagtaaaaaatggattaaacttttataaagggcaragttttctaagaatttcaaagcaatgcattc

SEQ ID NO: 598417 - DNA, 609 bp, Homo sapiens
aaaaaaaaaagaaaagtttactataagtagagaacagaaatttctttttaagataaaatttattgaagtaaaaaatggattaaacttttataaagggcaaagttttctaagaatttcaaagcaatgcattcattgcaaaagatggctttaattacttaatctttttttgtgtgtgtgtgtgtgagacagggtctcactctctcaccaggctggagtgcagtggtgcagtcttggctcactgcaacctccacctcctggcttcaagcaattctcctgccttagtatcccaagtagctgggactacwggtgcacatcaccacgcccagctaatttttgtatttttagtagagatggggtttccccatgttggccaggatggtcacgatctcctgaccttgtgatctgcttgctttggcctccccaagtgctggggttacaggtatgagccaccatgcctggccattgtttaacctttgtactaataaaacactacctttctaaaatcatgtatatgcaatagatcaatattaactgcatttttgtcagattactctaaacagcattacacatatacatcctctgttatctaaacttaaaataagtagaaat

SEQ ID NO: 598418 - DNA, 609 bp, Homo sapiens
aaaaaaaaaagaaaagtttactataagtagagaacagaaatttctttttaagataaaatttattgaagtaaaaaatggattaaacttttataaagggcaaagttttctaagaatttcaaagcaatgcattcattgcaaaagatggctttaattacttaatctttttttgtgtgtgtgtgtgtgagacagggtctcactctctcaccaggctggagtgcagtggtgcagtcttggctcactgcaacctccacctcctggcttcaagcaattctcctgccttagtatcccaagtagctgggactactggtgcacatcaccacgcccagctaatttttgtatttttagtagagatggggtttccccatgttggccaggatggtcacgatctcctgaccttgtgatctgcttgctttggcctccccaagtgctggggttacaggtatgagccaccatgcctggccattgtttaacctttgtactaataaaacactacctttctaaaatcatgyatatgcaatagatcaatattaactgcatttttgtcagattactctaaacagcattacacatatacatcctctgttatctaaacttaaaataagtagaaat

SEQ ID NO: 598419 - DNA, 609 bp, Homo sapiens
aaaaaaaaaagaaaagtttactataagtagagaacagaaatttctttttaagataaaatttattgaagtaaaaaatggattaaacttttataaagggcaaagttttctaagaatttcaaagcaatgcattcattgcaaaagatggctttaattacttaatctttttttgtgtgtgtgtgtgtgagacagggtctcactctctcaccaggctggagtgcagtggtgcagtcttggctcactgcaacctccacctcctggcttcaagcaattctcctgccttagtatcccaagtagctgggactactggtgcacatcaccacgcccagctaatttttgtatttttagtagagatggggtttccccatgttggccaggatggtcacgatctcctgaccttgtgatctgcttgctttggcctccccaagtgctggggttacaggtatgagccaccatgcctggccattgtttaacctttgtactaataaaacactacctttctaaaatcatgtatatgcaatagatcaatattaactgcatttttgtcagattactctaaasagcattacacatatacatcctctgttatctaaacttaaaataagtagaaat

SEQ ID NO: 598420 - DNA, 635 bp, Homo sapiens
aacctttgtactaataaaacactacctttctaaaatcatgtatatgcaatagatcaatattaactgcatttttgtcagattactctaaacagcattacacatatacatcctctgttatctaaacttaaaataagtagaaattttattttatttatgtgattatttttctatttaagcaaacttcaagttatgtctagtcactaaaaatactraaggccacattttgtaagtgatacatgattttcatgataatgtttcttgtttaatttagacattattattatttttacttattttagatggggctggactgtgtagaataaataattagagaaacaaagagaagtacgttgacaaaatttattaattaaatttaggtttattttagaaataaagtgtaaatagcaaatggcattccttttcattcttgggttagtagatactacatcaatatttttttcttacacacatctaatgaaagatgtgaaaacaaaaactttcacagagaagactgtacttatgcaccataaattcatcatgttcctaagcttaaacagttcccaagaagtctgtgcatctctttttcactggctctacagtttcttaagttttgccatcctcatggaactgtcagc

SEQ ID NO: 598421 - DNA, 633 bp, Homo sapiens
taagcaaacttcaagttatgtctagtcactaaaaatactaaaggccacattttgtaagtgatacatgattttcatkataatgtttcttgtttaatttagacattattattatttttacttattttagatggggctggactgtgtagaataaataattagagaaacaaagagaagtacgttgacaaaatttattaattaaatttaggtttattttagaaataaagtgtaaatagcaaatggcattccttttcattcttgggttagtagatactacatcaatatttttttcttacacacatctaatgaaagatgtgaaaacaaaaactttcacagagaagactgtacttatgcaccataaattcatcatgttcctaagcttaaacagttcccaagaagtctgtgcatctctttttcactggctctacagtttcttaagttttgccatcctcatggaactgtcagccagcacactgaaacgattctcagaaaacaaaagcatcatcaagttctcagggtttcggtagagattgaaggccaacagactaagactcattcagaaatacttagctgagcaataacccttcataagcagtcacttgacaggtgacattttaaatctcctctaatttactg

SEQ ID NO: 598422 - DNA, 633 bp, Homo sapiens
taagcaaacttcaagttatgtctagtcactaaaaatactaaaggccacattttgtaagtgatacatgattttcatgataatgtttcttgtttaatttagacattattattatttttacttaytttagatggggctggactgtgtagaataaataattagagaaacaaagagaagtacgttgacaaaatttattaattaaatttaggtttattttagaaataaagtgtaaatagcaaatggcattccttttcattcttgggttagtagatactacatcaatatttttttcttacacacatctaatgaaagatgtgaaaacaaaaactttcacagagaagactgtacttatgcaccataaattcatcatgttcctaagcttaaacagttcccaagaagtctgtgcatctctttttcactggctctacagtttcttaagttttgccatcctcatggaactgtcagccagcacactgaaacgattctcagaaaacaaaagcatcatcaagttctcagggtttcggtagagattgaaggccaacagactaagactcattcagaaatacttagctgagcaataacccttcataagcagtcacttgacaggtgacattttaaatctcctctaatttactg

SEQ ID NO: 598423 - DNA, 635 bp, Homo sapiens
aacctttgtactaataaaacactacctttctaaaatcatgtatatgcaatagatcaatattaactgcatttttgtcagattactctaaacagcattacacatatacatcctctgttatctaaacttaaaataagtagaaattttattttatttatgtgattatttttctatttaagcaaacttcaagttatgtctagtcactaaaaatactaaaggccacattttgtaagtgatacatgattttcatgataatgtttcttgtttaatttagacattattattatttttacttattttagatggggctggamtgtgtagaataaataattagagaaacaaagagaagtacgttgacaaaatttattaattaaatttaggtttattttagaaataaagtgtaaatagcaaatggcattccttttcattcttgggttagtagatactacatcaatatttttttcttacacacatctaatgaaagatgtgaaaacaaaaactttcacagagaagactgtacttatgcaccataaattcatcatgttcctaagcttaaacagttcccaagaagtctgtgcatctctttttcactggctctacagtttcttaagttttgccatcctcatggaactgtcagc

SEQ ID NO: 598424 - DNA, 621 bp, Homo sapiens
tattattatttttacttattttagatggggctggactgtgtagaataaataattagagaaacaaagagaagtacgttgacaaaatttattaattaaatttakgtttattttagaaataaagtgtaaatagcaaatggcattccttttcattcttgggttagtagatactacatcaatatttttttcttacacacatctaatgaaagatgtgaaaacaaaaactttcacagagaagactgtacttatgcaccataaattcatcatgttcctaagcttaaacagttcccaagaagtctgtgcatctctttttcactggctctacagtttcttaagttttgccatcctcatggaactgtcagccagcacactgaaacgattctcagaaaacaaaagcatcatcaagttctcagggtttcggtagagattgaaggccaacagactaagactcattcagaaatacttagctgagcaataacccttcataagcagtcacttgacaggtgacattttaaatctcctctaatttactgtgtcattggcttacacttgttctcaggaaaagttccaaatttttcaccatgaaataaaaacacccatgtcaatgtaattcttgccaagtta

SEQ ID NO: 598425 - DNA, 633 bp, Homo sapiens
taagcaaacttcaagttatgtctagtcactaaaaatactaaaggccacattttgtaagtgatacatgattttcatgataatgtttcttgtttaatttagacattattattatttttacttattttagatggggctggactgtgtagaataaataattagagaaacaaagagaagtacgttgacaaaatttattaattaaatttaggtttattttagaaataaagtgtaaatagcaaatggcattccttttcattcttgggttagtagatactacatcaatatttttttcttacacacatctaatgaaagatgtgaaaacaaaaactttcacagagaagactgtacttatgcaccataaattcatcatgttccwaagcttaaacagttcccaagaagtctgtgcatctctttttcactggctctacagtttcttaagttttgccatcctcatggaactgtcagccagcacactgaaacgattctcagaaaacaaaagcatcatcaagttctcagggtttcggtagagattgaaggccaacagactaagactcattcagaaatacttagctgagcaataacccttcataagcagtcacttgacaggtgacattttaaatctcctctaatttactg

SEQ ID NO: 598426 - DNA, 633 bp, Homo sapiens
taagcaaacttcaagttatgtctagtcactaaaaatactaaaggccacattttgtaagtgatacatgattttcatgataatgtttcttgtttaatttagacattattattatttttacttattttagatggggctggactgtgtagaataaataattagagaaacaaagagaagtacgttgacaaaatttattaattaaatttaggtttattttagaaataaagtgtaaatagcaaatggcattccttttcattcttgggttagtagatactacatcaatatttttttcttacacacatctaatgaaagatgtgaaaacaaaaactttcacagagaagactgtacttatgcaccataaattcatcatgttcctaagcttaaacagttcccaagaagtctgtgcatctctttttcactggctctacastttcttaagttttgccatcctcatggaactgtcagccagcacactgaaacgattctcagaaaacaaaagcatcatcaagttctcagggtttcggtagagattgaaggccaacagactaagactcattcagaaatacttagctgagcaataacccttcataagcagtcacttgacaggtgacattttaaatctcctctaatttactg

SEQ ID NO: 598427 - DNA, 387 bp, Homo sapiens
tttttcttacacacatctaatgaaagatgtgaaaacaaaaactttcacagagaagactgtacttatgcaccataaattcatcatgttcctaagcttaaacagttcccaagaagtctgtgcatctctttttcactggctctacagtttcttaagttttgccatcctcatggaactgtcagccagcacactgaaacgattctcagaaaacaaaagcatcatcaagttctcagggtttcggtagagattgaaggccaacagactaagactcattcagaaatacttagctgagcaataacccttcataagcagtcacttgacaggtgacattttaaatctcctstaatttactgtgtcattggcttacacttgttctcaggaaaagttcca

SEQ ID NO: 598428 - DNA, 552 bp, Homo sapiens
cataaattcatcatgttcctaagcttaaacagttcccaagaagtctgtgcatctctttttcactggctctacagtttcttaagttttgccatcctcatggaactgtcagccagcacactgaaacgattctcagaaaacaaaagcatcatcaagttctcagggtttcggtagagattgaaggccaacagactaagactcattcagaaatacttagctgagcaataacccttcataagcagtcacttgacaggtgacattttaaatctcctctaatttactgtgtcattrgcttacacttgttctcaggaaaagttccaaatttttcaccatgaaataaaaacacccatgtcaatgtaattcttgccaagttactcagccttgtttctcaccacttactgcactctgccctttgctctagcaccaaactggatggagtggaactctgcagggctcttcctcacctcaggctctttgcctttgcctctttcctctatctgggaagcttttccttgtccttcaggtatcaacctatgttatctcctccaccagaaa

SEQ ID NO: 598429 - DNA, 365 bp, Homo sapiens
agcccatgatattgacataaaagtgggtagatgtcccttctctgtgttccagtagtgccctgctgtatacctgtcayggtatctatgactctatatggacattgcctgcctgtctgttttttaggttatagcttatgactgttgagaggtggaccatgccatcttcatcttgtaattccagtgctggttctagtaccttagcatgtggctgttgattacatgaatgaagactgaaaaagttctgatatttaaacacaattagaattaatgccatgtgtaaattattaaatagtaattttgtattgtaaatgtacatacatatttctcattcttattaactctgataaagttctcaatctttagtt

SEQ ID NO: 598430 - DNA, 598 bp, Homo sapiens
gccaagttactcagccttgtttctcaccacttactgcactctgccctttgctctagcaccaaactggatggagtggaactctgcagggctcttcctcacctcaggctctttgcctttgcctctttcctctatctgggaagcttttccttgtccttcaggtatcaacctatgttatctcctccaccagaaagcccatgatattgacataaaagtgggtagatgtcccttctctgtgttccagtagtgccctgctgtatacctgtcacggtatctatgactctatatggacattgcctgcctgtctgttttttaggttakagcttatgactgttgagaggtggaccatgccatcttcatcttgtaattccagtgctggttctagtaccttagcatgtggctgttgattacatgaatgaagactgaaaaagttctgatatttaaacacaattagaattaatgccatgtgtaaattattaaatagtaattttgtattgtaaatgtacatacatatttctcattcttattaactctgataaagttctcaatctttagtttttaaactcacacttagttaactgaagtgttttaggtaaagaac

SEQ ID NO: 598431 - DNA, 510 bp, Homo sapiens
tgggtagatgtcccttctctgtgttccagtagtgccctgctgtatacctgtcacggtatctatgactctatatggacattgcctgcctgtctgttttttaggttatagcttatgactgttgagaggtggaccatgccatcttcatcttgtaattccagtgctggttctagtaccttagcatgtggctgttgattacatgaatgaagactgaaaaagytctgatatttaaacacaattagaattaatgccatgtgtaaattattaaatagtaattttgtattgtaaatgtacatacatatttctcattcttattaactctgataaagttctcaatctttagtttttaaactcacacttagttaactgaagtgttttaggtaaagaacaaaattctttatttttctttccagctgttgctgtattggacacttgctcccatctactttcttctctagaatccacgggtaagccacatctaatgaagagaatatttaaccataaagtcttaag

SEQ ID NO: 598432 - DNA, 595 bp, Homo sapiens
aggtatcaacctatgttatctcctccaccagaaagcccatgatattgacataaaagtgggtagatgtcccttctctgtgttccagtagtgccctgctgtatacctgtcacggtatctatgactctatatggacattgcctgcctgtctgttttttaggttatagcttatgactgttgagaggtggaccatgccatcttcatcttgtaattccagtgctggttctagtaccttagcatgtggctgttgattacatgaatgaagactgaaaaagttctgatatttaaacacaattagaattaatgccatgtgtaaattattaaatrgtaattttgtattgtaaatgtacatacatatttctcattcttattaactctgataaagttctcaatctttagtttttaaactcacacttagttaactgaagtgttttaggtaaagaacaaaattctttatttttctttccagctgttgctgtattggacacttgctcccatctactttcttctctagaatccacgggtaagccacatctaatgaagagaatatttaaccataaagtcttaaggaaaaattctatgatgatttaaaagatta

SEQ ID NO: 598433 - DNA, 577 bp, Homo sapiens
tgccatgtgtaaattattaaatagtaattttgtattgtaaatgtacatacatatttctcattcttattaactctgataaagttctcaatctttagtttttaaactcacwcttagttaactgaagtgttttaggtaaagaacaaaattctttatttttctttccagctgttgctgtattggacacttgctcccatctactttcttctctagaatccacgggtaagccacatctaatgaagagaatatttaaccataaagtcttaaggaaaaattctatgatgatttaaaagattataaaactttattactgggctatttacacattttaattgtttctcataaaatatataacattccaatatttactgaagtaggatatttttgtatcatatgtatgattataatttatagggtattttaaatgatgttttttggcctccttaagttttaagtggatcttgcaaatgaaaaccagtattattgagtttgacatactcaaattgcccaaatgtcagctgtttaaacaaccaagtcatcactgatactttagtaaaggttagtaaaggtcatcgaaggc

SEQ ID NO: 598434 - DNA, 595 bp, Homo sapiens
aggtatcaacctatgttatctcctccaccagaaagcccatgatattgacataaaagtgggtagatgtcccttctctgtgttccagtagtgccctgctgtatacctgtcacggtatctatgactctatatggacattgcctgcctgtctgttttttaggttatagcttatgactgttgagaggtggaccatgccatcttcatcttgtaattccagtgctggttctagtaccttagcatgtggctgttgattacatgaatgaagactgaaaaagttctgatatttaaacacaattagaattaatgccatgtgtaaattattaaatagtaattttgtattgtaaatgtacatacatatttctcattcttattaactctgataaagttctcaatctttagtttttaaactcacacttagttaactgaagtgttttaggtaaagaacaaaattctttatttttctttccagctgttgctgtattggacacttgctcccatctactttcttctctagaatccacgggtaagccacatctaatgaagagaatatttaaccataaagtcttaagraaaaattctatgatgatttaaaagatta

SEQ ID NO: 598435 - DNA, 570 bp, Homo sapiens
tttaggtaaagaacaaaattctttatttttctttccagctgttgctgtattggacacttgctcccatctactttcttctctagaatccacgggtaagccacatctaatgaagagaatatttaaccataaagtcttaaggaaaaattctatgatgatttaaaagattataaaactttattactgggctatttacacattttaattgtttctcataaaatatataacattccaatatttactgaagtaggatatttttgtatcatatgtatgattataatttataggrtattttaaatgatgttttttggcctccttaagttttaagtggatcttgcaaatgaaaaccagtattattgagtttgacatactcaaattgcccaaatgtcagctgtttaaacaaccaagtcatcactgatactttagtaaaggttagtaaaggtcatcgaaggcttatttgcattttacagtttttattacttaggagagttaaggagtacctgccaggtttgtccatgctaatgttacaattttctttttgtagttcaaccgtattttgtatggagatacttt

SEQ ID NO: 598436 - DNA, 570 bp, Homo sapiens
tttaggtaaagaacaaaattctttatttttctttccagctgttgctgtattggacacttgctcccatctactttcttctctagaatccacgggtaagccacatctaatgaagagaatatttaaccataaagtcttaaggaaaaattctatgatgatttaaaagattataaaactttattactgggctatttacacattttaattgtttctcataaaatatataacattccaatatttactgaagtaggatatttttgtatcatatgtatgattataatttatagggtattttaaatgatgttttttggcctccttaagttttaagtggatcttgcaaatgaaaaccagtattattgagtttgacatactcaaattgcccaaatktcagctgtttaaacaaccaagtcatcactgatactttagtaaaggttagtaaaggtcatcgaaggcttatttgcattttacagtttttattacttaggagagttaaggagtacctgccaggtttgtccatgctaatgttacaattttctttttgtagttcaaccgtattttgtatggagatacttt

SEQ ID NO: 598437 - DNA, 570 bp, Homo sapiens
tttaggtaaagaacaaaattctttatttttctttccagctgttgctgtattggacacttgctcccatctactttcttctctagaatccacgggtaagccacatctaatgaagagaatatttaaccataaagtcttaaggaaaaattctatgatgatttaaaagattataaaactttattactgggctatttacacattttaattgtttctcataaaatatataacattccaatatttactgaagtaggatatttttgtatcatatgtatgattataatttatagggtattttaaatgatgttttttggcctccttaagttttaagtggatcttgcaaatgaaaaccagtattattgagtttgacatactcaaattgcccaaatgtcagctgtttaaacaaccaagtcatcaytgatactttagtaaaggttagtaaaggtcatcgaaggcttatttgcattttacagtttttattacttaggagagttaaggagtacctgccaggtttgtccatgctaatgttacaattttctttttgtagttcaaccgtattttgtatggagatacttt

SEQ ID NO: 598438 - DNA, 570 bp, Homo sapiens
tttaggtaaagaacaaaattctttatttttctttccagctgttgctgtattggacacttgctcccatctactttcttctctagaatccacgggtaagccacatctaatgaagagaatatttaaccataaagtcttaaggaaaaattctatgatgatttaaaagattataaaactttattactgggctatttacacattttaattgtttctcataaaatatataacattccaatatttactgaagtaggatatttttgtatcatatgtatgattataatttatagggtattttaaatgatgttttttggcctccttaagttttaagtggatcttgcaaatgaaaaccagtattattgagtttgacatactcaaattgcccaaatgtcagctgtttaaacaaccaagtcatcactgatactttagtaaaggttagtaaakgtcatcgaaggcttatttgcattttacagtttttattacttaggagagttaaggagtacctgccaggtttgtccatgctaatgttacaattttctttttgtagttcaaccgtattttgtatggagatacttt

SEQ ID NO: 598439 - DNA, 500 bp, Homo sapiens
ctggttactcctcagaacccactagatttagcatttcatggatgacttgtgtttgaacaattattactatgatggttaccagatgattattttcttattmtcttctttgttctacatggagaaataaaaccaataaataagggagaaggaaagctcatgattctgatgctccaattccccaagattaggccagtagtagacatcccaagctgactttatgtctctttgatttgtctccattactctgtcggcacttttttactttctggcagaagatgttctaagctcagcttgtattttctctgcgccagctctggaatgagtcattttttttagaagcagaggtggagccactgaggaagcacaggtgagccctccccagtgtgtactcactggtccccaacagaagaaccactgccacatccactgaagtaccaagaaactagcaaagggccttctggctgtctggggagagtcctcatgtggtccctggctgtctc

SEQ ID NO: 598440 - DNA, 577 bp, Homo sapiens
catttcatggatgacttgtgtttgaacaattattactatgatggttaccagatgattattttcttattctcttctttgttctacatggagaaataaaaccaataaataagggagaaggaaagctcatgattctgatgctccaattccccaagattaggccagtagtagacatyccaagctgactttatgtctctttgatttgtctccattactctgtcggcacttttttactttctggcagaagatgttctaagctcagcttgtattttctctgcgccagctctggaatgagtcattttttttagaagcagaggtggagccactgaggaagcacaggtgagccctccccagtgtgtactcactggtccccaacagaagaaccactgccacatccactgaagtaccaagaaactagcaaagggccttctggctgtctggggagagtcctcatgtggtccctggctgtctcagaggttctggattagtcttcctgtagcctctgtgttctgtctttagatcggggctctgtgggaagggccctgagagacccaacagcacagcgtgccttatctaccaa

SEQ ID NO: 598441 - DNA, 500 bp, Homo sapiens
ctggttactcctcagaacccactagatttagcatttcatggatgacttgtgtttgaacaattattactatgatggttaccagatgattattttcttattctcttctttgttctacatggagaaataaaaccaataaataagggagaaggaaagctcatgattctgatgctccaattccccaagattaggccagtagtagacatcccaagctgactttatgtctctttgatttgtctccattactctgtcggcacttttttactttstggcagaagatgttctaagctcagcttgtattttctctgcgccagctctggaatgagtcattttttttagaagcagaggtggagccactgaggaagcacaggtgagccctccccagtgtgtactcactggtccccaacagaagaaccactgccacatccactgaagtaccaagaaactagcaaagggccttctggctgtctggggagagtcctcatgtggtccctggctgtctc

SEQ ID NO: 598442 - DNA, 500 bp, Homo sapiens
ctggttactcctcagaacccactagatttagcatttcatggatgacttgtgtttgaacaattattactatgatggttaccagatgattattttcttattctcttctttgttctacatggagaaataaaaccaataaataagggagaaggaaagctcatgattctgatgctccaattccccaagattaggccagtagtagacatcccaagctgactttatgtctctttgatttgtctccattactctgtcggcacttttttactttctggcagaagatgttctaagctcagcttgtattttctctgcgccagctctggaatgagtmattttttttagaagcagaggtggagccactgaggaagcacaggtgagccctccccagtgtgtactcactggtccccaacagaagaaccactgccacatccactgaagtaccaagaaactagcaaagggccttctggctgtctggggagagtcctcatgtggtccctggctgtctc

SEQ ID NO: 598443 - DNA, 634 bp, Homo sapiens
caattttctttttgtagttcaaccgtattttgtatggagatactttgaggctctgtaaatatctggttactcctcagaacccactagatttagcatttcatggatgacttgtgtttgaacaattattactatgatggttaccagatgattattttcttattctcttctttgttctacatggagaaataaaaccaataaataagggagaaggaaagctcatgattctgatgctccaattccccaagattaggccagtagtagacatcccaagctgactttatgtctctttgatttgtctccattactctgtcggcacttttttactttctggcagaagatgttctaagctcagcttgtattttctctgcgccagctctggaatgagtcattttttttagaagcagaggtggagccactgaggaagcacaggtgagccctccccaktgtgtactcactggtccccaacagaagaaccactgccacatccactgaagtaccaagaaactagcaaagggccttctggctgtctggggagagtcctcatgtggtccctggctgtctcagaggttctggattagtcttcctgtagcctctgtgttctgtctttagatcggggctctgtgggaagggccct

SEQ ID NO: 598444 - DNA, 459 bp, Homo sapiens
tttactttctggcagaagatgttctaagctcagcttgtattttctctgcgccagctctggaatgagtcattttttttagaagcagaggtggagccactgaggaagcacaggtgagccctccccagtgtgtactcactggtccccaacagaagaaccactgccacatccactgaagtaccaagaaactagcaaagggccttctggctgtctggggagagtcctcatgtggtccctggctgtctcagaggttctggattagtcttcctgtagcctctgtgttstgtctttagatcggggctctgtgggaagggccctgagagacccaacagcacagcgtgccttatctaccaaatgtccctcccttcctcacaccctgacactcaggaatagggtagatggtgtgtccaggcagtgtcaggccacctcactttctcctttgagacgggcccagagggcctt

SEQ ID NO: 598445 - DNA, 510 bp, Homo sapiens
agtagacatcccaagctgactttatgtctctttgatttgtctccattactctgtcggcacttttttactttctggcagaagatgttctaagctcagcttgtattttctctgcgccagctctggaatgagtcattttttttagaagcagaggtggagccactgaggaagcacaggtgagccctccccagtgtgtactcactggtccccaacagaagaaccactgccacatccactgaagtaccaagaaactagcaaagggccttctggctgtctggggagagtcctcatgtggtccctggctgtctcagaggttctggattagtcttcctgtagcctctgtgttctgtctttagatcggggctctgtgggaagggccctgagagacccaacagcacagcgtgccttatctrccaaatgtccctcccttcctcacaccctgacactcaggaatagggtagatggtgtgtccaggcagtgtcaggccacctcactttctcctttgagacgggc

SEQ ID NO: 598446 - DNA, 459 bp, Homo sapiens
tttactttctggcagaagatgttctaagctcagcttgtattttctctgcgccagctctggaatgagtcattttttttagaagcagaggtggagccactgaggaagcacaggtgagccctccccagtgtgtactcactggtccccaacagaagaaccactgccacatccactgaagtaccaagaaactagcaaagggccttctggctgtctggggagagtcctcatgtggtccctggctgtctcagaggttctggattagtcttcctgtagcctctgtgttctgtctttagatcggggctctgtgggaagggccctgagagacccaacagcacagcgtgccttatctaccaaatgtccctcccttcctcacacyctgacactcaggaatagggtagatggtgtgtccaggcagtgtcaggccacctcactttctcctttgagacgggcccagagggcctt

SEQ ID NO: 598447 - DNA, 537 bp, Homo sapiens
cactttctcctttgagacgggcccagagggcctttggggtgagtgtggagctgggaacctggagcctgaggccaactgtctctccctgtgtcttggaggaaaggycacgtcccaaaaaaaaaccccagggcctgacttctgggcacacatgcagggagggagggtctatgagctgagggggacattgtaatgagactttgaaccccgttgctccggggcctggtcagtggaccatggtcagagatgacctggtcatcaggacctggtcatttgggacctgatcagcaggggcctggttagtggcggcctcctcagtaaaggcctcatcagtggggacctggtgacctagtcactggaagcctggtcagtggggggacctagtcagtggtggctttattagtggggcctgatctgttggaacataaacaatgaaaaactggttggtggggcatacacaatatatcacgggcctggtcagtgtggggccttagtggcttggagcctggtcagtgagggcctggtcagagggggctcagt

SEQ ID NO: 598448 - DNA, 537 bp, Homo sapiens
cactttctcctttgagacgggcccagagggcctttggggtgagtgtggagctgggaacctggagcctgaggccaactgtctctccctgtgtcttggaggaaaggccaygtcccaaaaaaaaaccccagggcctgacttctgggcacacatgcagggagggagggtctatgagctgagggggacattgtaatgagactttgaaccccgttgctccggggcctggtcagtggaccatggtcagagatgacctggtcatcaggacctggtcatttgggacctgatcagcaggggcctggttagtggcggcctcctcagtaaaggcctcatcagtggggacctggtgacctagtcactggaagcctggtcagtggggggacctagtcagtggtggctttattagtggggcctgatctgttggaacataaacaatgaaaaactggttggtggggcatacacaatatatcacgggcctggtcagtgtggggccttagtggcttggagcctggtcagtgagggcctggtcagagggggctcagt

SEQ ID NO: 598449 - DNA, 606 bp, Homo sapiens
ggcctttggggtgagtgtggagctgggaacctggagcctgaggccaactgtctctccctgtgtcttggaggaaaggccacgtcccaaaaaaaaaccccagggcctgacytctgggcacacatgcagggagggagggtctatgagctgagggggacattgtaatgagactttgaaccccgttgctccggggcctggtcagtggaccatggtcagagatgacctggtcatcaggacctggtcatttgggacctgatcagcaggggcctggttagtggcggcctcctcagtaaaggcctcatcagtggggacctggtgacctagtcactggaagcctggtcagtggggggacctagtcagtggtggctttattagtggggcctgatctgttggaacataaacaatgaaaaactggttggtggggcatacacaatatatcacgggcctggtcagtgtggggccttagtggcttggagcctggtcagtgagggcctggtcagagggggctcagtcagctgggtactcgttcatggagaattgttcagtggggggtcggttgagcagcaacctggtaaattgtggtcttgtcagtgggaaccctgtcttgtc

SEQ ID NO: 598450 - DNA, 537 bp, Homo sapiens
cactttctcctttgagacgggcccagagggcctttggggtgagtgtggagctgggaacctggagcctgaggccaactgtctctccctgtgtcttggaggaaaggccacgtcccaaaaaaaaaccccagggcctgacttctgggcacacatgcagggagggagggtctatgagctgagggggacattgtaatgagactttgarccccgttgctccggggcctggtcagtggaccatggtcagagatgacctggtcatcaggacctggtcatttgggacctgatcagcaggggcctggttagtggcggcctcctcagtaaaggcctcatcagtggggacctggtgacctagtcactggaagcctggtcagtggggggacctagtcagtggtggctttattagtggggcctgatctgttggaacataaacaatgaaaaactggttggtggggcatacacaatatatcacgggcctggtcagtgtggggccttagtggcttggagcctggtcagtgagggcctggtcagagggggctcagt

SEQ ID NO: 598451 - DNA, 606 bp, Homo sapiens
ggcctttggggtgagtgtggagctgggaacctggagcctgaggccaactgtctctccctgtgtcttggaggaaaggccacgtcccaaaaaaaaaccccagggcctgacttctgggcacacatgcagggagggagggtctatgagctgagggggacattgtaatgagactttgaaccccgttgctccggggcctggtcagtggaccatggtcagagatgacctggtcatcaggacctggtcatttgggacctgatcagcaggggcctggttagtggcrgcctcctcagtaaaggcctcatcagtggggacctggtgacctagtcactggaagcctggtcagtggggggacctagtcagtggtggctttattagtggggcctgatctgttggaacataaacaatgaaaaactggttggtggggcatacacaatatatcacgggcctggtcagtgtggggccttagtggcttggagcctggtcagtgagggcctggtcagagggggctcagtcagctgggtactcgttcatggagaattgttcagtggggggtcggttgagcagcaacctggtaaattgtggtcttgtcagtgggaaccctgtcttgtc

SEQ ID NO: 598452 - DNA, 606 bp, Homo sapiens
ggcctttggggtgagtgtggagctgggaacctggagcctgaggccaactgtctctccctgtgtcttggaggaaaggccacgtcccaaaaaaaaaccccagggcctgacttctgggcacacatgcagggagggagggtctatgagctgagggggacattgtaatgagactttgaaccccgttgctccggggcctggtcagtggaccatggtcagagatgacctggtcatcaggacctggtcatttgggacctgatcagcaggggcctggttagtggcggcctcctcagtaaaggcctcatcagtggggacctggtgacctagtcaytggaagcctggtcagtggggggacctagtcagtggtggctttattagtggggcctgatctgttggaacataaacaatgaaaaactggttggtggggcatacacaatatatcacgggcctggtcagtgtggggccttagtggcttggagcctggtcagtgagggcctggtcagagggggctcagtcagctgggtactcgttcatggagaattgttcagtggggggtcggttgagcagcaacctggtaaattgtggtcttgtcagtgggaaccctgtcttgtc

SEQ ID NO: 598453 - DNA, 484 bp, Homo sapiens
cagctgggtactcgttcatggagaattgttcagtggggggtcggttgagcagcaacctggtaaattgtggtyttgtcagtgggaaccctgtcttgtcaatggggaccaggtcagtggaaaattggtcagtggggtctggcccatgaggcctattaagtgtgggcctggttaggaagacatggtcagtggggacttgatcagtgggacctggtcaatggaggagtggtcattaggggtctcatcactcatcactgggaacctggtcaggggcagtttgtcagtacctggcctgctggccactatgtgacctcaggcaggggggttgtctgtggagcctccttgcctccatctgcagggaaagtgagtcggggcaccctggagggtggctggaaagagaaggtgagaagatgtgttgaatccaatactgcttggcagacctacaactttacaaatgacctgtgttccacctagagagggtgccagc

SEQ ID NO: 598454 - DNA, 438 bp, Homo sapiens
gtactcgttcatggagaattgttcagtggggggtcggttgagcagcaacctggtaaattgtggtcttgtcagtgggaaccctgtcttgtcaatggggaccaggtcagtggaaaattggtcagtggggtctggccyatgaggcctattaagtgtgggcctggttaggaagacatggtcagtggggacttgatcagtgggacctggtcaatggaggagtggtcattaggggtctcatcactcatcactgggaacctggtcaggggcagtttgtcagtacctggcctgctggccactatgtgacctcaggcaggggggttgtctgtggagcctccttgcctccatctgcagggaaagtgagtcggggcaccctggagggtggctggaaagagaaggtgagaagatgtgttgaatccaatactgcttggcagacctacaact

SEQ ID NO: 598455 - DNA, 484 bp, Homo sapiens
cagctgggtactcgttcatggagaattgttcagtggggggtcggttgagcagcaacctggtaaattgtggtcttgtcagtgggaaccctgtcttgtcaatggggaccaggtcagtggaaaattggtcagtggggtctggcccatgaggcctattaagtgtgggcctggttaggaagacatggtcagtggggacttgatcagtgggacctggtcaatggaggagtggtcattaggggtctcatcaytcatcactgggaacctggtcaggggcagtttgtcagtacctggcctgctggccactatgtgacctcaggcaggggggttgtctgtggagcctccttgcctccatctgcagggaaagtgagtcggggcaccctggagggtggctggaaagagaaggtgagaagatgtgttgaatccaatactgcttggcagacctacaactttacaaatgacctgtgttccacctagagagggtgccagc

SEQ ID NO: 598456 - DNA, 438 bp, Homo sapiens
gtactcgttcatggagaattgttcagtggggggtcggttgagcagcaacctggtaaattgtggtcttgtcagtgggaaccctgtcttgtcaatggggaccaggtcagtggaaaattggtcagtggggtctggcccatgaggcctattaagtgtgggcctggttaggaagacatggtcagtggggacttgatcagtgggacctggtcaatggaggagtggtcattaggggtctcatcactcatcactgggaacctggtcaggggcagtttgtcagtacctgrcctgctggccactatgtgacctcaggcaggggggttgtctgtggagcctccttgcctccatctgcagggaaagtgagtcggggcaccctggagggtggctggaaagagaaggtgagaagatgtgttgaatccaatactgcttggcagacctacaact

SEQ ID NO: 598457 - DNA, 438 bp, Homo sapiens
gtactcgttcatggagaattgttcagtggggggtcggttgagcagcaacctggtaaattgtggtcttgtcagtgggaaccctgtcttgtcaatggggaccaggtcagtggaaaattggtcagtggggtctggcccatgaggcctattaagtgtgggcctggttaggaagacatggtcagtggggacttgatcagtgggacctggtcaatggaggagtggtcattaggggtctcatcactcatcactgggaacctggtcaggggcagtttgtcagtacctggcctgctggccactatgtgacctcaggcaggrgggttgtctgtggagcctccttgcctccatctgcagggaaagtgagtcggggcaccctggagggtggctggaaagagaaggtgagaagatgtgttgaatccaatactgcttggcagacctacaact

SEQ ID NO: 598458 - DNA, 530 bp, Homo sapiens
ggtcagtggggacttgatcagtgggacctggtcaatggaggagtggtcattaggggtctcatcactcatcactgggaacctggtcaggggcagtttgtcagtacctggcctgctggccactatgtgacctcaggcaggggggttgtctgtggagcctccttgcctccatctgcagggaaagtgagtcrgggcaccctggagggtggctggaaagagaaggtgagaagatgtgttgaatccaatactgcttggcagacctacaactttacaaatgacctgtgttccacctagagagggtgccagccctctcagcattatgcagtgcccctcctctgtctgcatccccaggaccaccatgggtggggagggcagagattggggagcacctatagaggctctaatgctctaaggtgacagtgatgaggacctgggtgcacccatgagtggagaagctaggcctgtccagagaagcaagacaaacacacacatacacactcacacacacacaggcacatatgcatacacaaata

SEQ ID NO: 598459 - DNA, 626 bp, Homo sapiens
attaggggtctcatcactcatcactgggaacctggtcaggggcagtttgtcagtacctggcctgctggccactatgtgacctcaggcaggggggttgtctgtggagcctccttgcctccatctgcagggaaagtgagtcggggcaccctggagggtsgctggaaagagaaggtgagaagatgtgttgaatccaatactgcttggcagacctacaactttacaaatgacctgtgttccacctagagagggtgccagccctctcagcattatgcagtgcccctcctctgtctgcatccccaggaccaccatgggtggggagggcagagattggggagcacctatagaggctctaatgctctaaggtgacagtgatgaggacctgggtgcacccatgagtggagaagctaggcctgtccagagaagcaagacaaacacacacatacacactcacacacacacaggcacatatgcatacacaaatacattgcatacacacatgtcagttcaggggatagaggacatggactctgggccctgttgacccaagcagactcccatggtggtgggttgtgtcaccccagaatgtcactgttgctgagtccccatcgcctctgtgttgtggagca

SEQ ID NO: 598460 - DNA, 530 bp, Homo sapiens
ggtcagtggggacttgatcagtgggacctggtcaatggaggagtggtcattaggggtctcatcactcatcactgggaacctggtcaggggcagtttgtcagtacctggcctgctggccactatgtgacctcaggcaggggggttgtctgtggagcctccttgcctccatctgcagggaaagtgagtcggggcaccctggagggtggctggaaagagaaggtgagaagatgtgttgaatccaatactgcttggcagacctasaactttacaaatgacctgtgttccacctagagagggtgccagccctctcagcattatgcagtgcccctcctctgtctgcatccccaggaccaccatgggtggggagggcagagattggggagcacctatagaggctctaatgctctaaggtgacagtgatgaggacctgggtgcacccatgagtggagaagctaggcctgtccagagaagcaagacaaacacacacatacacactcacacacacacaggcacatatgcatacacaaata

SEQ ID NO: 598461 - DNA, 474 bp, Homo sapiens
gacctggtcaatggaggagtggtcattaggggtctcatcactcatcactgggaacctggtcaggggcagtttgtcagtacctggcctgctggccactatgtgacctcaggcaggggggttgtctgtggagcctccttgcctccatctgcagggaaagtgagtcggggcaccctggagggtggctggaaagagaaggtgagaagatgtgttgaatccaatactgcttggcagacctacaactttacaaatgacctgtgttccacctagagagggtgccagccctctcagcattatgcagtgcccctcctctgtcygcatccccaggaccaccatgggtggggagggcagagattggggagcacctatagaggctctaatgctctaaggtgacagtgatgaggacctgggtgcacccatgagtggagaagctaggcctgtccagagaagcaagacaaacacacacatacacactca

SEQ ID NO: 598462 - DNA, 626 bp, Homo sapiens
attaggggtctcatcactcatcactgggaacctggtcaggggcagtttgtcagtacctggcctgctggccactatgtgacctcaggcaggggggttgtctgtggagcctccttgcctccatctgcagggaaagtgagtcggggcaccctggagggtggctggaaagagaaggtgagaagatgtgttgaatccaatactgcttggcagacctacaactttacaaatgacctgtgttccacctagagagggtgccagccctctcagcattatgcagtgcccctcctctgtctgcatccccagkaccaccatgggtggggagggcagagattggggagcacctatagaggctctaatgctctaaggtgacagtgatgaggacctgggtgcacccatgagtggagaagctaggcctgtccagagaagcaagacaaacacacacatacacactcacacacacacaggcacatatgcatacacaaatacattgcatacacacatgtcagttcaggggatagaggacatggactctgggccctgttgacccaagcagactcccatggtggtgggttgtgtcaccccagaatgtcactgttgctgagtccccatcgcctctgtgttgtggagca

SEQ ID NO: 598463 - DNA, 547 bp, Homo sapiens
acctggcctgctggccactatgtgacctcaggcaggggggttgtctgtggagcctccttgcctccatctgcagggaaagtgagtcggggcaccctggagggtggctggaaagagaaggtgagaagatgtgttgaatccaatactgcttggcagacctacaactttacaaatgacctgtgttccacctagagagggtgccagccctctcagcattatgcagtgcccctcctctgtctgcatccccaggaccaccatgggtggrgagggcagagattggggagcacctatagaggctctaatgctctaaggtgacagtgatgaggacctgggtgcacccatgagtggagaagctaggcctgtccagagaagcaagacaaacacacacatacacactcacacacacacaggcacatatgcatacacaaatacattgcatacacacatgtcagttcaggggatagaggacatggactctgggccctgttgacccaagcagactcccatggtggtgggttgtgtcaccccagaatgtcactgttgctgagtc

SEQ ID NO: 598464 - DNA, 626 bp, Homo sapiens
attaggggtctcatcactcatcactgggaacctggtcaggggcagtttgtcagtacctggcctgctggccactatgtgacctcaggcaggggggttgtctgtggagcctccttgcctccatctgcagggaaagtgagtcggggcaccctggagggtggctggaaagagaaggtgagaagatgtgttgaatccaatactgcttggcagacctacaactttacaaatgacctgtgttccacctagagagggtgccagccctctcagcattatgcagtgcccctcctctgtctgcatccccaggaccaccatgggtggggagggcagagattggggagcacctatagaggctctaatgctctaaggtgacagtgatgaggacctgggtgcacccatgagtggagaagctaggcctgtccagagaagcaagacaaacacacacatacacactcacacacacacaggcacayatgcatacacaaatacattgcatacacacatgtcagttcaggggatagaggacatggactctgggccctgttgacccaagcagactcccatggtggtgggttgtgtcaccccagaatgtcactgttgctgagtccccatcgcctctgtgttgtggagca

SEQ ID NO: 598465 - DNA, 568 bp, Homo sapiens
gacctgtgttccacctagagagggtgccagccctctcagcattatgcagtgcccctcctctgtctgcatccccaggaccaccatgggtggggagggcagagattggggagcacctatagaggctctaatgctctaaggtgacagtgatgaggacctgggtgcacccatgagtggagaagctaggcctgtccagagaagcaagacaaacacacacatacacactcacacacacacaggcacatatgcatacacaaatacattgcatacacacatgtcagttcaggggatagaggacayggactctgggccctgttgacccaagcagactcccatggtggtgggttgtgtcaccccagaatgtcactgttgctgagtccccatcgcctctgtgttgtggagcagttagagacacacagcagtgtctgtgagtagctctgcgtgaaggaccattttctagatgagaggcacatctcaacacagctcactgatcagattcaggtgagtgggacctgctcttttctcttccttctggcttgggaaaagtcactatcaggtggatggttttggt

SEQ ID NO: 598466 - DNA, 568 bp, Homo sapiens
gacctgtgttccacctagagagggtgccagccctctcagcattatgcagtgcccctcctctgtctgcatccccaggaccaccatgggtggggagggcagagattggggagcacctatagaggctctaatgctctaaggtgacagtgatgaggacctgggtgcacccatgagtggagaagctaggcctgtccagagaagcaagacaaacacacacatacacactcacacacacacaggcacatatgcatacacaaatacattgcatacacacatgtcagttcaggggatagaggacatkgactctgggccctgttgacccaagcagactcccatggtggtgggttgtgtcaccccagaatgtcactgttgctgagtccccatcgcctctgtgttgtggagcagttagagacacacagcagtgtctgtgagtagctctgcgtgaaggaccattttctagatgagaggcacatctcaacacagctcactgatcagattcaggtgagtgggacctgctcttttctcttccttctggcttgggaaaagtcactatcaggtggatggttttggt

SEQ ID NO: 598467 - DNA, 592 bp, Homo sapiens
tacattgcatacacacatgtcagttcaggggatagaggacatggactctgggccctgttgacccaagcagactcccatggtggtgggttgtgtcaccccagaatgtcactgttgctgagtccccatcgcctctgtgttgtggagcagttagagacacacagcagtgtctgtgagtagctctgcgtgaaggaccattttctagatgagaggcacatctcaacacagctcactgatcagattcaggtgagtgggacctgctcttttctcttccttctggcttgggaaaagtcactatcaggtggrtggttttggtctctgggcagctactgagggtaatccctgaacactcaccagctgcctgttatgtgctgacagtcatctcattcatcctcgcagcaattccattctgcatcttttctgatcacctccgtgaccacacaggacaaccccatcagggccctgtcaccaggcccagtctagctccatgataaccaagacacaggcccagagacaatcgtcctacattgtgcctgcatctgacaccccttggtaggtagtgaccagcacaacatggaagaagccagggcagcat

SEQ ID NO: 598468 - DNA, 592 bp, Homo sapiens
tacattgcatacacacatgtcagttcaggggatagaggacatggactctgggccctgttgacccaagcagactcccatggtggtgggttgtgtcaccccagaatgtcactgttgctgagtccccatcgcctctgtgttgtggagcagttagagacacacagcagtgtctgtgagtagctctgcgtgaaggaccattttctagatgagaggcacatctcaacacagctcactgatcagattcaggtgagtgggacctgctcttttctcttccttctggcttgggaaaagtcactatcaggtggatggttttggtctctgggcagctactgagggtaatccctgaacactcaccagctgcctgttatgtgctgacagtcatctcattcatcctcgcagcaattccattctgcatcttttctgatcacctccgtgaccacacaggacaaccccatcagggccctgtcaccaggcccagtctagctccatgataaccaagacacaggyccagagacaatcgtcctacattgtgcctgcatctgacaccccttggtaggtagtgaccagcacaacatggaagaagccagggcagcat

SEQ ID NO: 598469 - DNA, 434 bp, Homo sapiens
cgtcctacattgtgcctgcatctgacaccccttggtaggtagtgaccagcacaacatggaagaagccagkgcagcatgcagccagctgctctgcagccccaaatggctcctgggccttgggaagtcactcataaaggggaagctggtcactttgaggtccctgaagggaagggtgaacgtgcatcccaacagccctggcagccagcagcatgccatacatattctcacccaacgtgtgtgacagaggtcccctcctggggcacaagtcccatacataaagcatcctgtcccagtcggacctcatcctgagccctgggaggggagggggaccatgggcccccctgcagcagccaggattaccacccaggggactcggccttctgtggccctggccagacttagaatttggcccaccacacacttactcggagcag

SEQ ID NO: 598470 - DNA, 434 bp, Homo sapiens
cgtcctacattgtgcctgcatctgacaccccttggtaggtagtgaccagcacaacatggaagaagccagggcagcatgcagccagctgctctgcagccccaaatggctcctgggccttgggaagtcactcataaaggggaagctggtcactttgaggtccctgaagggaagggtgaacgtgcatcccaacagccctggcagccagcagcatgccatacatattctcacccaacgtgtgtgacagaggtcccctcctggggcacaagtcccatacmtaaagcatcctgtcccagtcggacctcatcctgagccctgggaggggagggggaccatgggcccccctgcagcagccaggattaccacccaggggactcggccttctgtggccctggccagacttagaatttggcccaccacacacttactcggagcag

SEQ ID NO: 598471 - DNA, 586 bp, Homo sapiens
ggcccagtctagctccatgataaccaagacacaggcccagagacaatcgtcctacattgtgcctgcatctgacaccccttggtaggtagtgaccagcacaacatggaagaagccagggcagcatgcagccagctgctctgcagccccaaatggctcctgggccttgggaagtcactcataaaggggaagctggtcactttgaggtccctgaagggaagggtgaacgtgcatcccaacagccctggcagccagcagcatgccatacatattctcacccaacgtgtgtgacagaggtcccctcctggggcacaagtcccatacataaagcatyctgtcccagtcggacctcatcctgagccctgggaggggagggggaccatgggcccccctgcagcagccaggattaccacccaggggactcggccttctgtggccctggccagacttagaatttggcccaccacacacttactcggagcagcttctcagtacctggggcctgtgcataccaggcaaggccaagctggctcaaagagcaaccagccacctctgcaagggtatgccagtagcaggtggagcagtcacc

SEQ ID NO: 598472 - DNA, 558 bp, Homo sapiens
tgacataaataataaaccaaagattgaggatgggtagtattttattacagtaagattccattaaatgtaggaggcatccaatataggaatcatccctttgcaaatatcatagtaataattgttgcaagaaagaaccttggagggatgctaagattagtggtgaatatatgttgggaaagaacatatttgcataatatgaaagtatcttcccacaagataattatagaatagtaacttcaaagtggagatgtcaacttasccaagtgatcaaagttaacattactaataataagataaatgaacttcatgtaacttcttatatgatgcactgagtaggacaaaacatcaattctatggtattcttagacaaaatgtataactttagtcctaaccgtgagaaaacatcagactaactgaaattgaggagggacattctacaaaataactgccagtattcatcaaaagcattttagaaagactgaggaattctccagagacatggaggcatattatctaagtgcaatggagaacatgcattgtatcatgaaccagagatgg

SEQ ID NO: 598473 - DNA, 558 bp, Homo sapiens
tgacataaataataaaccaaagattgaggatgggtagtattttattacagtaagattccattaaatgtaggaggcatccaatataggaatcatccctttgcaaatatcatagtaataattgttgcaagaaagaaccttggagggatgctaagattagtggtgaatatatgttgggaaagaacatatttgcataatatgaaagtatcttcccacaagataattatagaatagtaacttcaaagtggagatgtcaacttacccaagtgatcaaagttaacrttactaataataagataaatgaacttcatgtaacttcttatatgatgcactgagtaggacaaaacatcaattctatggtattcttagacaaaatgtataactttagtcctaaccgtgagaaaacatcagactaactgaaattgaggagggacattctacaaaataactgccagtattcatcaaaagcattttagaaagactgaggaattctccagagacatggaggcatattatctaagtgcaatggagaacatgcattgtatcatgaaccagagatgg

SEQ ID NO: 598474 - DNA, 558 bp, Homo sapiens
tgacataaataataaaccaaagattgaggatgggtagtattttattacagtaagattccattaaatgtaggaggcatccaatataggaatcatccctttgcaaatatcatagtaataattgttgcaagaaagaaccttggagggatgctaagattagtggtgaatatatgttgggaaagaacatatttgcataatatgaaagtatcttcccacaagataattatagaatagtaacttcaaagtggagatgtcaacttacccaagtgatcaaagttaacattactaataataagataaatgaacttcatgtaacttcttatatgatgcactgagtaggacaaaacatcaattctatgrtattcttagacaaaatgtataactttagtcctaaccgtgagaaaacatcagactaactgaaattgaggagggacattctacaaaataactgccagtattcatcaaaagcattttagaaagactgaggaattctccagagacatggaggcatattatctaagtgcaatggagaacatgcattgtatcatgaaccagagatgg

SEQ ID NO: 598475 - DNA, 520 bp, Homo sapiens
ataactgccagtattcatcaaaagcattttagaaagactgaggaattctccagagacatggaggcatrttatctaagtgcaatggagaacatgcattgtatcatgaaccagagatggacaacagtaggatatgtacaataacaccccaacatttggacattaaacaaaatacttcagaaaaacccattggccaagaaaagtttcacacacaaaaaaacagtttaaactgaaagaaaattttttaaaaacttaataaaatgtgggatgcagataaatcgtttcttaaaggtacatttatagatgtaatatattgaaaataaaaggcttcaatcaatgacctttaggttcttttttaagaggctaaaaaatgagcaaagtatatccaaattaagaagaaggaagatgataaagataaaaatgtaaaccaacaacatagcaaataacaaaaggtggagctaattaatatacccacaaattggttctttgaaaaaaatttttttaataaacaatggctagcaag

SEQ ID NO: 598476 - DNA, 608 bp, Homo sapiens
gtatcatgaaccagagatggacaacagtaggatatgtacaataacaccccaacatttgracattaaacaaaatacttcagaaaaacccattggccaagaaaagtttcacacacaaaaaaacagtttaaactgaaagaaaattttttaaaaacttaataaaatgtgggatgcagataaatcgtttcttaaaggtacatttatagatgtaatatattgaaaataaaaggcttcaatcaatgacctttaggttcttttttaagaggctaaaaaatgagcaaagtatatccaaattaagaagaaggaagatgataaagataaaaatgtaaaccaacaacatagcaaataacaaaaggtggagctaattaatatacccacaaattggttctttgaaaaaaatttttttaataaacaatggctagcaagatttatctcgaaaaaaattagagaagctacataatgtagataatgggaattaaatagaggatgtaactacagaacctacagacatcaatataattatgaaaactttaggccaatacatttgacaattaaaataacatgggaaattatttgtaaaactaattcctaaaacggatgcaaaatgaaat

SEQ ID NO: 598477 - DNA, 563 bp, Homo sapiens
atattatctaagtgcaatggagaacatgcattgtatcatgaaccagagatggacaacagtaggatatgtacaataacaccccaacatttggacattaaacaaaatacttcagaaaaacccattggccaagaaaagtttcacacacaaaaaaayagtttaaactgaaagaaaattttttaaaaacttaataaaatgtgggatgcagataaatcgtttcttaaaggtacatttatagatgtaatatattgaaaataaaaggcttcaatcaatgacctttaggttcttttttaagaggctaaaaaatgagcaaagtatatccaaattaagaagaaggaagatgataaagataaaaatgtaaaccaacaacatagcaaataacaaaaggtggagctaattaatatacccacaaattggttctttgaaaaaaatttttttaataaacaatggctagcaagatttatctcgaaaaaaattagagaagctacataatgtagataatgggaattaaatagaggatgtaactacagaacctacagacatcaatataattatgaaaactttag

SEQ ID NO: 598478 - DNA, 577 bp, Homo sapiens
ttttctatttcattttgcattagttttaagaattagttttacaaataatttcccatgttattttaattgtcaaatgtattggcctaaagttttcataattatattgatgtctgtaggttctgtagttacatcctctatttaattcccattatctacattatgtagcttctctaatttttttcgagataaatcttgctagccattgtttattaaaaaaatttttttcaaagaaccaatttgtgggtatattaattagctccaccttttgttatttgctatgttgttggtttacatttttatctttatcatcttccttcttcttaatttggatatactttgcttattttttagcctcttaaaaaagaacctaaaggtcattgattgaagccttttattttcartatattacatctataaatgtacctttaagaaacgatttatctgcatcccacattttattaagtttttaaaaaattttatttcagtttaaactattttttttgtgtgtgaaacttttcttggccaatgggtttttctgaagtattttgtttaatgttcaaatgttggggtgttattg

SEQ ID NO: 598479 - DNA, 608 bp, Homo sapiens
gtatcatgaaccagagatggacaacagtaggatatgtacaataacaccccaacatttggacattaaacaaaatacttcagaaaaacccattggccaagaaaagtttcacacacaaaaaaacagtttaaactgaaagaaaattttttaaaaacttaataaaatgtgggatgcagataaatcgtttcttaaaggtacatttatagatgtaatatattgaaaataaaaggcttcaatcaatgacctttaggttcttttttaagaggctaaaaaatragcaaagtatatccaaattaagaagaaggaagatgataaagataaaaatgtaaaccaacaacatagcaaataacaaaaggtggagctaattaatatacccacaaattggttctttgaaaaaaatttttttaataaacaatggctagcaagatttatctcgaaaaaaattagagaagctacataatgtagataatgggaattaaatagaggatgtaactacagaacctacagacatcaatataattatgaaaactttaggccaatacatttgacaattaaaataacatgggaaattatttgtaaaactaattcctaaaacggatgcaaaatgaaat

SEQ ID NO: 598480 - DNA, 547 bp, Homo sapiens
ataaagataaaaatgtaaaccaacaacatagcaaataacaaaagktggagctaattaatatacccacaaattggttctttgaaaaaaatttttttaataaacaatggctagcaagatttatctcgaaaaaaattagagaagctacataatgtagataatgggaattaaatagaggatgtaactacagaacctacagacatcaatataattatgaaaactttaggccaatacatttgacaattaaaataacatgggaaattatttgtaaaactaattcctaaaacggatgcaaaatgaaatagaaaaagtaatagcttctctatgtattgaagaatttttttaatttaaaaagttttctataattataggctacatgctttcttaggtgaattctatcaaacatttaagaaagtacagagaatcctcaacttacagtggtttgacttgtgctcttctgacttgataatggtgctttcatctgtgtacattaatgatgagcatcaatatgaccagtttttcactatcagtatagttttcaataaatttc

SEQ ID NO: 598481 - DNA, 577 bp, Homo sapiens
ttttctatttcattttgcattagttttaagaattagttttacaaataatttcccatgttattttaattgtcaaatgtattggcctaaagttttcataattatattgatgtctgtaggttctgtagttacatcctctatttaattcccattatctacattatgtagcttctctaawttttttcgagataaatcttgctagccattgtttattaaaaaaatttttttcaaagaaccaatttgtgggtatattaattagctccaccttttgttatttgctatgttgttggtttacatttttatctttatcatcttccttcttcttaatttggatatactttgcttattttttagcctcttaaaaaagaacctaaaggtcattgattgaagccttttattttcaatatattacatctataaatgtacctttaagaaacgatttatctgcatcccacattttattaagtttttaaaaaattttatttcagtttaaactattttttttgtgtgtgaaacttttcttggccaatgggtttttctgaagtattttgtttaatgttcaaatgttggggtgttattg

SEQ ID NO: 598482 - DNA, 547 bp, Homo sapiens
ataaagataaaaatgtaaaccaacaacatagcaaataacaaaaggtggagctaattaatatacccacaaattggttctttgaaaaaaatttttttaataaacaatggctagcaagatttatctcgaaaaaaattagagaagctacataatgtagataatgggaattaaatagaggatgtaactacagaacctacagayatcaatataattatgaaaactttaggccaatacatttgacaattaaaataacatgggaaattatttgtaaaactaattcctaaaacggatgcaaaatgaaatagaaaaagtaatagcttctctatgtattgaagaatttttttaatttaaaaagttttctataattataggctacatgctttcttaggtgaattctatcaaacatttaagaaagtacagagaatcctcaacttacagtggtttgacttgtgctcttctgacttgataatggtgctttcatctgtgtacattaatgatgagcatcaatatgaccagtttttcactatcagtatagttttcaataaatttc

SEQ ID NO: 598483 - DNA, 578 bp, Homo sapiens
acaataacaccccaacatttggacattaaacaaaatacttcagaaaaacccattggccaagaaaagtttcacacacaaaaaaacagtttaaactgaaagaaaattttttaaaaacttaataaaatgtgggatgcagataaatcgtttcttaaaggtacatttatagatgtaatatattgaaaataaaaggcttcaatcaatgacctttaggttcttttttaagaggctaaaaaatgagcaaagtatatccaaattaagaagaaggaagatgataaagataaaaatgtaaaccaacaacatagcaaataacaaaaggtggagctaattaatatacccacaaattggttctttgaaaaaaatttttttaataaacaatggctagcaagatttatctcgaaaaaaattagagaagctacataatgtagataatgggaattaaatagaggatgtaactacagaacctacagacatcaatataattatgaaaactttaggccaatacatttgacaattaaaataacatgggaaattatttgtaaaactaattcytaaaacggatgcaaaatgaaatagaaaaa

SEQ ID NO: 598484 - DNA, 578 bp, Homo sapiens
acaataacaccccaacatttggacattaaacaaaatacttcagaaaaacccattggccaagaaaagtttcacacacaaaaaaacagtttaaactgaaagaaaattttttaaaaacttaataaaatgtgggatgcagataaatcgtttcttaaaggtacatttatagatgtaatatattgaaaataaaaggcttcaatcaatgacctttaggttcttttttaagaggctaaaaaatgagcaaagtatatccaaattaagaagaaggaagatgataaagataaaaatgtaaaccaacaacatagcaaataacaaaaggtggagctaattaatatacccacaaattggttctttgaaaaaaatttttttaataaacaatggctagcaagatttatctcgaaaaaaattagagaagctacataatgtagataatgggaattaaatagaggatgtaactacagaacctacagacatcaatataattatgaaaactttaggccaatacatttgacaattaaaataacatgggaaattatttgtaaaactaattcctaaaackgatgcaaaatgaaatagaaaaa

SEQ ID NO: 598485 - DNA, 547 bp, Homo sapiens
ataaagataaaaatgtaaaccaacaacatagcaaataacaaaaggtggagctaattaatatacccacaaattggttctttgaaaaaaatttttttaataaacaatggctagcaagatttatctcgaaaaaaattagagaagctacataatgtagataatgggaattaaatagaggatgtaactacagaacctacagacatcaatataattatgaaaactttaggccaatacatttgacaattaaaataacatgggaaattatttgtaaaactaattcctaaaacggatgcaaaatgaaatagaaaaagtaatagcttctctatgtattgaagaatttttttaatttaaaaagwtttctataattataggctacatgctttcttaggtgaattctatcaaacatttaagaaagtacagagaatcctcaacttacagtggtttgacttgtgctcttctgacttgataatggtgctttcatctgtgtacattaatgatgagcatcaatatgaccagtttttcactatcagtatagttttcaataaatttc

SEQ ID NO: 598486 - DNA, 619 bp, Homo sapiens
atcctcaacttacagtggtttgacttgtgctcttctgacttgataatggtgctttcatctgtgtacattaatgatgagcatcaatatgaccagtttttcactatcagtatagttttcaataaatttcatgagatactgaatattttaaaatgggccttgtggtagatgattttgcccaattgtaggataaygtaagtgttctgagcaagtttaaggtaggtgaggctaagtcatgatattcagtaggttaaatatattaaatgcgttttagacttacaatattttcaatttaggatgagttcattaagacataagacaattgtaagttgaggagtatctataatatcaatcttgaacggactctttttaagaaatagaatttaagggccgggcacagtggctcacacatgtaatcccagcactttgggaggccaagatgggcagatcacctggggtcaggagtttgagaccaacctgaccagcatggagaaacccccgtctctactaaaagtacataattagcagggcatggtggcgcttacctgtaatcccagctcctcgggagacagaggcaggagaatagcttgaatctgggagacagagattgtggatagccgaa

SEQ ID NO: 598487 - DNA, 576 bp, Homo sapiens
taacgtaagtgttctgagcaagtttaaggtaggtgaggctaagtcatgatattcagtaggttaaatatattaaatgcgttttagacttacaatattttcaatttaggatgagttcattaagacataagacaattgtaagttgaggagtatctataatatcaatcttgaacggactctttttaagaaatagaatttaagggccgggcacagtggctcacacatgtaatcccagcactttgggaggccaagatggkcagatcacctggggtcaggagtttgagaccaacctgaccagcatggagaaacccccgtctctactaaaagtacataattagcagggcatggtggcgcttacctgtaatcccagctcctcgggagacagaggcaggagaatagcttgaatctgggagacagagattgtggatagccgaaattgtgccattgcactccagcctgggcaacaagagtgaatctccgtctcaaaaaaaaaaaaaaaaaaagaaaagaaaatttaaagggacacttcctgtcttattttatgaacccagtattgccgattccaaatcgagacaaagg

SEQ ID NO: 598488 - DNA, 576 bp, Homo sapiens
taacgtaagtgttctgagcaagtttaaggtaggtgaggctaagtcatgatattcagtaggttaaatatattaaatgcgttttagacttacaatattttcaatttaggatgagttcattaagacataagacaattgtaagttgaggagtatctataatatcaatcttgaacggactctttttaagaaatagaatttaagggccgggcacagtggctcacacatgtaatcccagcactttgggaggccaagatgggcagatcacctggggtcaggagtttgagaccaacctgaccagcatggagaaacccccgtctctactaaaagtacataattagcagggcatggtggcgcttacctgtaatcccagctcctcgggagacagaggcaggagaatagcttgaatctgggagacagagattgtggatagccgaaattrtgccattgcactccagcctgggcaacaagagtgaatctccgtctcaaaaaaaaaaaaaaaaaaagaaaagaaaatttaaagggacacttcctgtcttattttatgaacccagtattgccgattccaaatcgagacaaagg

SEQ ID NO: 598489 - DNA, 619 bp, Homo sapiens
tggttacatctggcaaaactcagcaaactgtgcactttaaaatagtatttattttatgtaaattatgtttcaatacaattgattttttaaaaaaaaacgtttcccagagtgatcaaagtggagggcagggaacagtaaacatcagtgcttatgttatagctactagaagcctcccaattccaacgacatgctttcaagyaggtctgatccttcccctggaggatacctctgacccaggggtgctacaaatgcattgcccctagttgcttctgtcaccttagtgatggaagtgacaacagggtactggagaaagaaaaggtgtacaaggttccaaatgtacattctatttccaaaggacatttgtgaagccagtggaaagcgaaaaaacaagctgctaaataagtcacaagtgtgttctcatacagttttgcgattaactaaataggacattcaacagataaaatttgttttacatagttactcctctaataggatgaacttgtggattgtgagatagggctgatataacctgttttctctctgcctcttttttttcccccaagttttgtgtgcaatacattaggaaaaatataattgggctacaaagctacaaaaatgg

SEQ ID NO: 598490 - DNA, 619 bp, Homo sapiens
tggttacatctggcaaaactcagcaaactgtgcactttaaaatagtatttattttatgtaaattatgtttcaatacaattgattttttaaaaaaaaacgtttcccagagtgatcaaagtggagggcagggaacagtaaacatcagtgcttatgttatagctactagaagcctcccaattccaacgacatgctttcaagcaggtctgatccttcccctggaggatacctctgacccaggggtgctacaaatgcattgcccctagttgcttctgtcaccttagtgatggaagtgacaacagggtactggagaaagaaaaggtgtacaagsttccaaatgtacattctatttccaaaggacatttgtgaagccagtggaaagcgaaaaaacaagctgctaaataagtcacaagtgtgttctcatacagttttgcgattaactaaataggacattcaacagataaaatttgttttacatagttactcctctaataggatgaacttgtggattgtgagatagggctgatataacctgttttctctctgcctcttttttttcccccaagttttgtgtgcaatacattaggaaaaatataattgggctacaaagctacaaaaatgg

SEQ ID NO: 598491 - DNA, 539 bp, Homo sapiens
ataacctgttttctctctgcctcttttttttcccccaagttttgtgtgcaatacattaggaaaaatataattgggctacaaagctacaaaaatggcttcctggcagttccatgcttgtttccatgtggtgcctatrtttggcactgtgttctcatttgcagtttcctacttgattagttaatgtatgaaggacaagcctgatctctactgtgaatttttaccaaggtattctagtagaaaaatgagtatgtaatggtgctgtggaatgctaaagtgtgtaaacattaagaatctaaaaatatgctcatttccaagttttatccagagcaactgtgcactctgattatatcgctactgctgtttaaagttatccatttgcatgtctaaaaagtagattcatactgattgtcccatttttgatctctaaaaactcctgaatatgagagtcatgatcaagggacgcttcatgaaatgtccaaaattaaagtgtgcaatgaaaccagatttatcatagccttatttaaaataattatttctaa

SEQ ID NO: 598492 - DNA, 584 bp, Homo sapiens
acctgttttctctctgcctcttttttttcccccaagttttgtgtgcaatacattaggaaaaatataattgggctacaaagctacaaaaatggcttcctggcagttccatgcttgtttccatgtggtgcctatgtttggcactgtgttctcatttgcastttcctacttgattagttaatgtatgaaggacaagcctgatctctactgtgaatttttaccaaggtattctagtagaaaaatgagtatgtaatggtgctgtggaatgctaaagtgtgtaaacattaagaatctaaaaatatgctcatttccaagttttatccagagcaactgtgcactctgattatatcgctactgctgtttaaagttatccatttgcatgtctaaaaagtagattcatactgattgtcccatttttgatctctaaaaactcctgaatatgagagtcatgatcaagggacgcttcatgaaatgtccaaaattaaagtgtgcaatgaaaccagatttatcatagccttatttaaaataattatttctaaaattgttattgtttaattataaacggtatcctttcaggatacttggaa

SEQ ID NO: 598493 - DNA, 539 bp, Homo sapiens
ataacctgttttctctctgcctcttttttttcccccaagttttgtgtgcaatacattaggaaaaatataattgggctacaaagctacaaaaatggcttcctggcagttccatgcttgtttccatgtggtgcctatgtttggcactgtgttctcatttgcagtttcctrcttgattagttaatgtatgaaggacaagcctgatctctactgtgaatttttaccaaggtattctagtagaaaaatgagtatgtaatggtgctgtggaatgctaaagtgtgtaaacattaagaatctaaaaatatgctcatttccaagttttatccagagcaactgtgcactctgattatatcgctactgctgtttaaagttatccatttgcatgtctaaaaagtagattcatactgattgtcccatttttgatctctaaaaactcctgaatatgagagtcatgatcaagggacgcttcatgaaatgtccaaaattaaagtgtgcaatgaaaccagatttatcatagccttatttaaaataattatttctaa

SEQ ID NO: 598494 - DNA, 539 bp, Homo sapiens
ataacctgttttctctctgcctcttttttttcccccaagttttgtgtgcaatacattaggaaaaatataattgggctacaaagctacaaaaatggcttcctggcagttccatgcttgtttccatgtggtgcctatgtttggcactgtgttctcatttgcagtttcctacttgattagttaatgtatgaaggacaagcctgatctctactgtgaatttttaccaaggtattctagtagaaaaatgagtatgtaatggtgctgtggaatgctaaagtgtgtaaacattaagaatctaaaaatatgctsatttccaagttttatccagagcaactgtgcactctgattatatcgctactgctgtttaaagttatccatttgcatgtctaaaaagtagattcatactgattgtcccatttttgatctctaaaaactcctgaatatgagagtcatgatcaagggacgcttcatgaaatgtccaaaattaaagtgtgcaatgaaaccagatttatcatagccttatttaaaataattatttctaa

SEQ ID NO: 598495 - DNA, 372 bp, Homo sapiens
ccgtgtctttgctattgtgaatagtgttataatgaaaatatgcgtgcatatgtctatgacagaatgatttatattcctttgggtrtatacccaataatgggattgctgggttgaatggtagttctgttttaagttatttcagaaatctccaaactgctttccacaatggctgaacaaatttacattcctgatgaaactggagacttccctgactccccttggcaggatgtgcaacaggggtgtggcttgtctggccaccgtgtttgctgtcaaaccccttactgggcaggggagcatgcagacaggcagttgcaataggcagggcaagtggccatggtactgtcttaggggtgggttcctgcgactcccaca

SEQ ID NO: 598496 - DNA, 372 bp, Homo sapiens
ccgtgtctttgctattgtgaatagtgttataatgaaaatatgcgtgcatatgtctatgacagaatgatttatattcctttgggtatatacccaataatgggattgctgggttgaatggtagttctgttttaagttatttcagaaatctccaaactgctttccacaatggctgaacaaatttacattcctgatgaaactggagasttccctgactccccttggcaggatgtgcaacaggggtgtggcttgtctggccaccgtgtttgctgtcaaaccccttactgggcaggggagcatgcagacaggcagttgcaataggcagggcaagtggccatggtactgtcttaggggtgggttcctgcgactcccaca

SEQ ID NO: 598497 - DNA, 560 bp, Homo sapiens
gcgtgcatatgtctatgacagaatgatttatattcctttgggtatatacccaataatgggattgctgggttgaatggtagttctgttttaagttatttcagaaatctccaaactgctttccacaatggctgaacaaatttacattcctgatgaaactggagacttccctgactccccttggcaggatgtgcaacaggggtgtggcttgtctggccaccgtgtttgctgtcaaaccccttactgggcaggggagcatgcagacaggcagttgcaataggcagggcaagtggccatggtactgtcttaggggtgggttcctgcgactcccacagcccaagtgggcatgtgttacagtgcactcttttagctttgccatccacagacggtttaagtgttaacctgttcagtgccctcttggtacccagttccttgtccagcatccagaaagaattaagttgcacacagacttgaggatggtgaatgtgggggytttattgagtggtggaggtggcagtcaatgggatggatggggagctggaaaggggatggaatgggaagat

SEQ ID NO: 598498 - DNA, 276 bp, Homo sapiens
caagtggccatggtactgtcttaggggtgggttcctgcgactcccacagcccaagtgggcatgtgttacagtgcactcttttagctttgccatccacagacggtttaagtgttaacctgttcagtgccctcttggtacccagttccttgtccagcatccagaaagaattaagttgcacacagacttgaggatggtgaatgtgggggttttattgagtggtggaggtggcastcaatgggatggatggggagctggaaaggggatggaatgggaaga

SEQ ID NO: 598499 - DNA, 556 bp, Homo sapiens
atgggattgctgggttgaatggtagttctgttttaagttatttcagaaatctccaaactgctttccacaatggctgaacaaatttacattcctgatgaaactggagacttccctgactccccttggcaggatgtgcaacaggggtgtggcttgtctggccaccgtgtttgctgtcaaaccccttactgggcaggggagcatgcagacaggcagttgcaataggcagggcaagtggccatggtactgtcttaggggtgggttcctgcgactcccacagcccaagtgggcatgtgttacagtgcactcttttagctttgccatccacagacggtttaagtgttaacctgttcagtgccctcttggtacccagttccttgtccagcatccagaaagaattaagttgcacacagacttgaggatggtgaatgtgggggttttattgagtggtggaggtggcagtcaatgggatggatggggagctggaaagrggatggaatgggaagatgatcttccctgggagctttgccatccagaggctgatctctccaaccactgc

SEQ ID NO: 598500 - DNA, 394 bp, Homo sapiens
ttgcacatggacttgaggatggtgaatgtgggggctcatgttctttgcctatttgtagtgggtttgttttwtgcttattgattctttatacatgctaagtattagacctttttcagatatgtaatttgaaaatattttcttctgttctatagggtgttctctgttgatagtttcttttgctgtgctgaagctctttagtttcattaggtcccactcgtcaattcttcttgttgcaattgctttggaatcttcatcatgaaatatttgcctgcgtctatgtccagaatgatatttcctaagttttcttctagggtttatatagttttgggtcttacataagtccttcatccatcttgagttgatttttgtatatggtgaaaggaaggaagtgtac

SEQ ID NO: 598501 - DNA, 394 bp, Homo sapiens
ttgcacatggacttgaggatggtgaatgtgggggctcatgttctttgcctatttgtagtgggtttgttttatgcttattgattctttatacatgctaagtattagacctttttcagatatgtaatttgaaaatattttcttctgttctrtagggtgttctctgttgatagtttcttttgctgtgctgaagctctttagtttcattaggtcccactcgtcaattcttcttgttgcaattgctttggaatcttcatcatgaaatatttgcctgcgtctatgtccagaatgatatttcctaagttttcttctagggtttatatagttttgggtcttacataagtccttcatccatcttgagttgatttttgtatatggtgaaaggaaggaagtgtac

SEQ ID NO: 598502 - DNA, 417 bp, Homo sapiens
tctccccccacaccctgcatagtacaarcaatatcaaagggggtctgtgcaacacgtgcaatattgggagtaatatcctcccccaacatggatattagaaacagtatcacaaggggttgtacaccacctgtgatattgtggagtactatcattttctttccccatggatatgtagaacaatatcacaaaggtggtgtacaacccctgctatattgggagtatactgtactttcctcacctagatattaggacaatatcacggggggttatacaccactgcaacattgggagtaatatcatcctttccctccctggatattaggaacaatacctcatgggtgtgtacaccctgttccatattgggattaatattttctcccttgctggacataaggaacaatataacggggggtatac

SEQ ID NO: 598503 - DNA, 417 bp, Homo sapiens
tctccccccacaccctgcatagtacaagcaatatcaaagggggtctgtgcaacacgtgcaatattgggagtaatatcctcccccaacatggatattagaaacagtatcacaaggggttgtacaccacctgygatattgtggagtactatcattttctttccccatggatatgtagaacaatatcacaaaggtggtgtacaacccctgctatattgggagtatactgtactttcctcacctagatattaggacaatatcacggggggttatacaccactgcaacattgggagtaatatcatcctttccctccctggatattaggaacaatacctcatgggtgtgtacaccctgttccatattgggattaatattttctcccttgctggacataaggaacaatataacggggggtatac

SEQ ID NO: 598504 - DNA, 589 bp, Homo sapiens
aattcccagggggtggtacaccatctgcaatatggacagctatatcattgtctctcccccgaatataaggaacaatatcacaagggggttgtacaacccctgtgatattgggagtaactttataccctttccacatggatattgggaacaatatcacagggtgggtgtacacccactgygatattgggagtaatatcatcctctaccccctgggtattatgaacaatatcatggggagggggtgtatgccctctctgatattgggagtaatatcatcctgtcccctctggatattaggaatgatatcacagcgtgggctgtaccttttctgcactattgggagtggtatcaccctctccgcctatggatattaggaacaatatcacaaagggggtgtacacatcctgcgatattgagagtaatattgtccactcttccctgggatattaggaacaatatcacaggcagagtgtacaccccctgctattttacctgtaatattattctctcccaacctaggatattaggaataatataaaaggaggggtgtacaccacctgtgatattgggagtaatatcattctctccc

SEQ ID NO: 598505 - DNA, 589 bp, Homo sapiens
aattcccagggggtggtacaccatctgcaatatggacagctatatcattgtctctcccccgaatataaggaacaatatcacaagggggttgtacaacccctgtgatattgggagtaactttataccctttccacatggatattgggaacaatatcacagggtgggtgtacacccactgtgatattgggagtaatatcatcctctaccccctgggtattatgaacaatatcatggggagggggtgtatgccctctctgatattgggagtaatatcatcctgtcccctctggatattaggaatgatatcacagcgtgggctgtaccttttctgcactattgggagtggtatcaccctctccgcctatggatattaggaacaatatcacaaagggggtgtacacatcctgygatattgagagtaatattgtccactcttccctgggatattaggaacaatatcacaggcagagtgtacaccccctgctattttacctgtaatattattctctcccaacctaggatattaggaataatataaaaggaggggtgtacaccacctgtgatattgggagtaatatcattctctccc

SEQ ID NO: 598506 - DNA, 554 bp, Homo sapiens
atcacagtgctggtgtgcaccctttacactatttggagcaatatcaccctctccccaacttgatattagagacaatatcatgggggktggcgtgtaacaccctgcactgttgggagtactatcatctagtcttcccctggatataagaaacagtatcacagaaggggtctacacctcctgagattttgggagtaatatcatcctctccaaatctggatattaagaacagtataatggggtgtggggagtaatatggtgggagtaatacaatcctcctccccacttgatattaggaacaatatcgcaaaacgtgtgtacgcccactgtgacatttggagtaatatcaacatttccccacctggtatcacggggagagtgtacactccttacgatattggaagtatcattgtctctcactctcgatattaggaaaaatagcacagggtgtgtatacacttcctgtgattttgggaagaacatcatacccttctgtctttgatattaggaacaatatcacagagggggtttacaacttctgtgatattataatattc

SEQ ID NO: 598507 - DNA, 554 bp, Homo sapiens
atcacagtgctggtgtgcaccctttacactatttggagcaatatcaccctctccccaacttgatattagagacaatatcatgggggttggcgtgtaacaccctgcactgttgggagtactatcatctagtcttcccctggatataagaaacagtatcacagaaggggtctacacctcctgagattttgggagtaatatcatcctctccaaatctggatattaagaacagtataatggggtgtggggagtaatatggtgggagtaatacaatcctcctccccacttgatattaggaacaatatcgcaaaacgtgtgtacrcccactgtgacatttggagtaatatcaacatttccccacctggtatcacggggagagtgtacactccttacgatattggaagtatcattgtctctcactctcgatattaggaaaaatagcacagggtgtgtatacacttcctgtgattttgggaagaacatcatacccttctgtctttgatattaggaacaatatcacagagggggtttacaacttctgtgatattataatattc

SEQ ID NO: 598508 - DNA, 520 bp, Homo sapiens
ttggaagtatcattgtctctcactctcgatattaggaaaaatagcacagggtgtgtatacacttcctgtgattttgggaagaacatcatacccttctgtctttgatattaggaacaatatcacagagggggtktacaacttctgtgatattataatattctttcttcccatggatattaggaatgatatcccggggggcttgttgtacaccccctgtgatacggacagtaatatcattgtccttccccctacatattagaaacaatatcacaagggtggtatacatcccctggatattagaaactatcacaggggggctgtacaacctctttgatactgtgagtaataccattgtctcccctcctgggtattaataacaatatcatagggtgggtgtacaccccctgcaatattgggaataatatcatcctctcttccccgggatattaggaacggtatcacaggtggggtttacaccccctgcaattttgtcagtaatattacttctggatgttattga

SEQ ID NO: 598509 - DNA, 520 bp, Homo sapiens
ttggaagtatcattgtctctcactctcgatattaggaaaaatagcacagggtgtgtatacacttcctgtgattttgggaagaacatcatacccttctgtctttgatattaggaacaatatcacagagggggtttacaacttctgtgatattataatattctttcttcccatggatattaggaatgatatcccggggggcttgttgtacaccccctgtgatacggacagtaatatcattgtccttccccctacatattagaaacaatatcacaagggtggtatacaycccctggatattagaaactatcacaggggggctgtacaacctctttgatactgtgagtaataccattgtctcccctcctgggtattaataacaatatcatagggtgggtgtacaccccctgcaatattgggaataatatcatcctctcttccccgggatattaggaacggtatcacaggtggggtttacaccccctgcaattttgtcagtaatattacttctggatgttattga

SEQ ID NO: 598510 - DNA, 520 bp, Homo sapiens
ttggaagtatcattgtctctcactctcgatattaggaaaaatagcacagggtgtgtatacacttcctgtgattttgggaagaacatcatacccttctgtctttgatattaggaacaatatcacagagggggtttacaacttctgtgatattataatattctttcttcccatggatattaggaatgatatcccggggggcttgttgtacaccccctgtgatacggacagtaatatcattgtccttccccctacatattagaaacaatatcacaagggtggtatacatcccctggatattagaaactatcacaggggggctgtacaacctctttgatactgtgagtaataccattgtctcccctcctgggtattaataacaatatcatagggtgggtgtacamcccctgcaatattgggaataatatcatcctctcttccccgggatattaggaacggtatcacaggtggggtttacaccccctgcaattttgtcagtaatattacttctggatgttattga

SEQ ID NO: 598511 - DNA, 594 bp, Homo sapiens
gggcttgttgtacaccccctgtgatacggacagtaatatcattgtccttccccctacatattagaaacaatatcacaagggtggtatacatcccctggatattagaaactatcacaggggggctgtacaacctctttgatactgtgagtaataccattgtctcccctcctgggtattaataacaatatcatagggtgggtgtacaccccctgcaatattgggaataatatcatcctctcttccccgggatattaggaacggtatcacaggtggggtttacaccccctgcaattttgtcagtaatattacttctggatgttattgaatatatcacagtgggggtgtacaccccctgtgatatggggagtaatagcatgctctttcccactggatactacaaacaatatcgcagattrtgtacaacctcctgtgatattgttcacaatatttaggaaaggagaggatgatattactccacatatcgcagggagtgttacatcccctgtaatattgttcataatatttagaagacgacaggatgatattactcccaatatagtaggaagtatacactcccctgatgatactgttcat

SEQ ID NO: 598512 - DNA, 594 bp, Homo sapiens
gggcttgttgtacaccccctgtgatacggacagtaatatcattgtccttccccctacatattagaaacaatatcacaagggtggtatacatcccctggatattagaaactatcacaggggggctgtacaacctctttgatactgtgagtaataccattgtctcccctcctgggtattaataacaatatcatagggtgggtgtacaccccctgcaatattgggaataatatcatcctctcttccccgggatattaggaacggtatcacaggtggggtttacaccccctgcaattttgtcagtaatattacttctggatgttattgaatatatcacagtgggggtgtacaccccctgtgatatggggagtaatagcatgctctttcccactggatactacaaacaatatcgcagattatgtacaacctcctgtgatattgttcacaatatttaggraaggagaggatgatattactccacatatcgcagggagtgttacatcccctgtaatattgttcataatatttagaagacgacaggatgatattactcccaatatagtaggaagtatacactcccctgatgatactgttcat

SEQ ID NO: 598513 - DNA, 369 bp, Homo sapiens
tttgtggtattgtcacttacatccgggggggagaggatgatattactctgcatatcatagagggtgcacacggctgtaatgttgtccataataacatccagaggggaagagaatattattcccatgtttcagaaggtgtacacacccctgtgatagtctctgtaacatttagggaagraggggatgatactactccagatattgcagggggtgtacacccccctgtgatactgttcgtaacttttagggggaagaggatgatattactccccatatcgaagggattgtacatctccctatatattgtccataacatccagggcaggagaggatattactactccccatatcacagggggtggacaaccc

SEQ ID NO: 598514 - DNA, 369 bp, Homo sapiens
tttgtggtattgtcacttacatccgggggggagaggatgatattactctgcatatcatagagggtgcacacggctgtaatgttgtccataataacatccagaggggaagagaatattattcccatgtttcagaaggtgtacacacccctgtgatagtctctgtaacatttagggaaggaggggatgatactactccagatattgcagggggtgtacayccccctgtgatactgttcgtaacttttagggggaagaggatgatattactccccatatcgaagggattgtacatctccctatatattgtccataacatccagggcaggagaggatattactactccccatatcacagggggtggacaaccc

SEQ ID NO: 598515 - DNA, 528 bp, Homo sapiens
actcttgctgttgtctgaaagtttgtccctcacttaggattccagaacattgctacgagggtctgaatgtttgtccttcacataggattccagaactctgctgctgtgatctgaatgtttgtccctaacaaaggattccagaacactcttgctgtggtctgattgtttgttcctcacataggattccagaacaccactacgaggctctgagtgtttgtgcctcacataggattccagaacaytgctgccattgtctgaatgtttgtcccccatctgggattccagaacactgctgcaagggtctgaatgtatgtccctcacataggattctagaacattgatgctagggtctgtatgtttgcccttaacatatgatttcaaaacactgctcctgggttctaaatgtttgtccttcacataggaatacagagcactgctgctggagtctgaatgtttgtcactcacatagtattccagaacactgctgcgaggatctgaatgtttgtccctcacatgggattccagaac

SEQ ID NO: 598516 - DNA, 528 bp, Homo sapiens
actcttgctgttgtctgaaagtttgtccctcacttaggattccagaacattgctacgagggtctgaatgtttgtccttcacataggattccagaactctgctgctgtgatctgaatgtttgtccctaacaaaggattccagaacactcttgctgtggtctgattgtttgttcctcacataggattccagaacaccactacgaggctctgagtgtttgtgcctcacataggattccagaacattgctgccattgtctgaatgtttgtcccccatctgggattccagaacactgctgcaagggtctgaatgtatgtccctcacataggattctagaacattgatgctagggtctgtatgtttgcccttaacatatgatttcaaaacactgctcctgggttctraatgtttgtccttcacataggaatacagagcactgctgctggagtctgaatgtttgtcactcacatagtattccagaacactgctgcgaggatctgaatgtttgtccctcacatgggattccagaac

SEQ ID NO: 598517 - DNA, 613 bp, Homo sapiens
taaagaaaagaaacactgaaaagaacagaagatgatatccaagactgtgggacaactacaaaaggtgaaacagagtagtgagaataccaggaggagaagaaatagaagaaagttctgcaactaccatgtctgagaacttccagtattaatgtcagacaccaaaccaaaaatccaggaagctccgagaacaccatgcagaataaatgccaacaacctacacttggacatataattttcaaactatatgaartaaaagataaaggaaaactctgaaagaaaccagaggtggggcagaaaacaccttacctacagagacacaaagataagaacggcattcaacattgcagaaattgtgaaagcaagaagacagtgaaatgaaaaattgaaaatattgacagaaaaaaccccaccaacctaagtttctgtacacactgaaaccacccttcaaaagtgaaggagaattaaggccttcctcagaaaaataaaaattcaagaaacttgttgccaggagacctgtcttgcaagaaatgttaaatgaaattctttagagggaaacaaaagatatttaactgaaacttggatcaacaattttttaaaaagatcattaaagaaa

SEQ ID NO: 598518 - DNA, 445 bp, Homo sapiens
taatcttttggcttttggaaataattttttataggctgggcatgttggcttatgctcrtaatctcagctctgtgggagtccaagggaggtggattgcttgaacccaggagtttgagaccagcctgggcaacatggcaaaaccctctctacaaaaaaccaaaccaaaatttagcctgacatcttggtgtgcacctgtagtcctaactatttgggaggctgaggtgggagggttgcttgagcctgggaggttgaggctgcaatgagctgtgatcatgccattccactcctgccagggcaacagagtaagaccgtgtgtcaaaaaagatcattttttataaataatttataatttcgaattttggtaacaaacacataccttaaaatttaccatcataaccagttgtaagtatagagttttgtagagttaagaatatttacattgttg

SEQ ID NO: 598519 - DNA, 300 bp, Homo sapiens
cctgtagtcctaactatttgggaggctgaggtgggagggttgcttgagcctgggaggttgaggctgcaatgagctgtgatcatgccattccactcctgccagsgcaacagagtaagaccgtgtgtcaaaaaagatcattttttataaataatttataatttcgaattttggtaacaaacacataccttaaaatttaccatcataaccagttgtaagtatagagttttgtagagttaagaatatttacattgttgtgtagcagatttctagatttttttttatcttagaaaactctatacc

SEQ ID NO: 598520 - DNA, 562 bp, Homo sapiens
gctgcaatgagctgtgatcatgccattccactcctgccagggcaacagagtaagaccgtgtgtcaaaaaagatcattttttataaataatttataatttcgaattttggtaacaaacacataccttaaaatttaccatcataaccakttgtaagtatagagttttgtagagttaagaatatttacattgttgtgtagcagatttctagatttttttttatcttagaaaactctatacccattcaacaactattaatttccccttccttccacctcctggcaagtactattctactttgtgtttctaaaaatttggcttatatacctagggttatataatatttgttttttaagtaggttccatgttatgtgcagatgtgtcaggattttcttcctttctatggctgaataatatttcttcatatatatatattttctctctatatatatatgtatattcttttgtttatccatctattcctggatggaagttttggtttcttccacctcgtggctatgtaatgctcctgtgaacataggtgtgcacatatctgtttgaggtc

SEQ ID NO: 598521 - DNA, 535 bp, Homo sapiens
agaccagcctgggcaacatggcaaaaccctctctacaaaaaaccaaaccaaaatttagcctgacatcttggtgtgcacctgtagtcctaactatttgggaggctgaggtgggagggttgcttgagcctgggaggttgaggctgcaatgagctgtgatcatgccattccactcctgccagggcaacagagtaagaccgtgtgtcaaaaaagatcattttttataaataatttataatttcgaattttggtaacaaacacataccttaaaatttaccatcataaccagttgtaagtatasagttttgtagagttaagaatatttacattgttgtgtagcagatttctagatttttttttatcttagaaaactctatacccattcaacaactattaatttccccttccttccacctcctggcaagtactattctactttgtgtttctaaaaatttggcttatatacctagggttatataatatttgttttttaagtaggttccatgttatgtgcagatgtgtcaggattttcttcctt

SEQ ID NO: 598522 - DNA, 300 bp, Homo sapiens
cctgtagtcctaactatttgggaggctgaggtgggagggttgcttgagcctgggaggttgaggctgcaatgagctgtgatcatgccattccactcctgccagggcaacagagtaagaccgtgtgtcaaaaaagatcattttttataaataatttataatttcgaattttggtaacaaacacataccttaaaatttaccatcataaccagttgtaagtatagagttttgtagagttaagaatatttacattgttgtgyagcagatttctagatttttttttatcttagaaaactctatacc

SEQ ID NO: 598523 - DNA, 562 bp, Homo sapiens
gctgcaatgagctgtgatcatgccattccactcctgccagggcaacagagtaagaccgtgtgtcaaaaaagatcattttttataaataatttataatttcgaattttggtaacaaacacataccttaaaatttaccatcataaccagttgtaagtatagagttttgtagagttaagaatatttacattgttgtgtagcagatttctagatttttttttatcttagaaaactctatacccattcaacaactattaatttccccttccttccacctcctggcaagtactattctactttgtgtttctaaaaatttggcttatatacctagggttwtataatatttgttttttaagtaggttccatgttatgtgcagatgtgtcaggattttcttcctttctatggctgaataatatttcttcatatatatatattttctctctatatatatatgtatattcttttgtttatccatctattcctggatggaagttttggtttcttccacctcgtggctatgtaatgctcctgtgaacataggtgtgcacatatctgtttgaggtc

SEQ ID NO: 598524 - DNA, 616 bp, Homo sapiens
aagtatagagttttgtagagttaagaatatttacattgttgtgtagcagatttctagatttttttttatcttagaaaactctatacccattcaacaactattaatttccccttccttccacctcctggcaagtactattctactttgtgtttctaaaaatttggcttatatacctagggttatataatatttgttttttaagtaggttccatgttatgtgcagatgtgtcaggattttcttcctttctatggctgaataatatttcttcatatatatatattttctctctatatatatatgtatattcttttgtttatccatctattcctggatggamgttttggtttcttccacctcgtggctatgtaatgctcctgtgaacataggtgtgcacatatctgtttgaggtcctgctactagttattctgtctctgtagaagttggatggctggatcatatggtcattttattttatttttttgaggagccagttaatatttccaccaacagtgttcaagtgtttcagtttcacctgcacttgttactttctgttgggtttgaagtgatgtcccattgtggtttctatttgcatttctctaatgattagtgatgtta

SEQ ID NO: 598525 - DNA, 586 bp, Homo sapiens
ctcctgccagggcaacagagtaagaccgtgtgtcaaaaaagatcattttttataaataatttataatttcgaattttggtaacaaacacataccttaaaatttaccatcataaccagttgtaagtatagagttttgtagagttaagaatatttacattgttgtgtagcagatttctagatttttttttatcttagaaaactctatacccattcaacaactattaatttccccttccttccacctcctggcaagtactattctactttgtgtttctaaaaatttggcttatatacctagggttatataatatttgttttttaagtaggttccatgttatgtgcagatgtgtcaggattttcttcctttctatggctgaataatatttcttcatatatatatattttctctctatatatatatgtatattcttttgtttatccatctattcctggatggaagttttggtttcttccacctmgtggctatgtaatgctcctgtgaacataggtgtgcacatatctgtttgaggtcctgctactagttattctgtctctgtagaagttggatggctggatcatatggtca

SEQ ID NO: 598526 - DNA, 586 bp, Homo sapiens
ctcctgccagggcaacagagtaagaccgtgtgtcaaaaaagatcattttttataaataatttataatttcgaattttggtaacaaacacataccttaaaatttaccatcataaccagttgtaagtatagagttttgtagagttaagaatatttacattgttgtgtagcagatttctagatttttttttatcttagaaaactctatacccattcaacaactattaatttccccttccttccacctcctggcaagtactattctactttgtgtttctaaaaatttggcttatatacctagggttatataatatttgttttttaagtaggttccatgttatgtgcagatgtgtcaggattttcttcctttctatggctgaataatatttcttcatatatatatattttctctctatatatatatgtatattcttttgtttatccatctattcctggatggaagttttggtttcttccacctcgtggctrtgtaatgctcctgtgaacataggtgtgcacatatctgtttgaggtcctgctactagttattctgtctctgtagaagttggatggctggatcatatggtca

SEQ ID NO: 598527 - DNA, 562 bp, Homo sapiens
taagaccgtgtgtcaaaaaagatcattttttataaataatttataatttcgaattttggtaacaaacacataccttaaaatttaccatcataaccagttgtaagtatagagttttgtagagttaagaatatttacattgttgtgtagcagatttctagatttttttttatcttagaaaactctatacccattcaacaactattaatttccccttccttccacctcctggcaagtactattctactttgtgtttctaaaaatttggcttatatacctagggttatataatatttgttttttaagtaggttccatgttatgtgcagatgtgtcaggattttcttcctttctatggctgaataatatttcttcatatatatatattttctctctatatatatatgtatattcttttgtttatccatctattcctggatggaagttttggtttcttccacctcgtggctatgtaatgctcctgtgaacayaggtgtgcacatatctgtttgaggtcctgctactagttattctgtctctgtagaagttggatggctggatcatatg

SEQ ID NO: 598528 - DNA, 562 bp, Homo sapiens
taagaccgtgtgtcaaaaaagatcattttttataaataatttataatttcgaattttggtaacaaacacataccttaaaatttaccatcataaccagttgtaagtatagagttttgtagagttaagaatatttacattgttgtgtagcagatttctagatttttttttatcttagaaaactctatacccattcaacaactattaatttccccttccttccacctcctggcaagtactattctactttgtgtttctaaaaatttggcttatatacctagggttatataatatttgttttttaagtaggttccatgttatgtgcagatgtgtcaggattttcttcctttctatggctgaataatatttcttcatatatatatattttctctctatatatatatgtatattcttttgtttatccatctattcctggatggaagttttggtttcttccacctcgtggctatgtaatgctcctgtgaacataggtgtrcacatatctgtttgaggtcctgctactagttattctgtctctgtagaagttggatggctggatcatatg

SEQ ID NO: 598529 - DNA, 584 bp, Homo sapiens
ccacctcctggcaagtactattctactttgtgtttctaaaaatttggcttatatacctagggttatataatatttgttttttaagtaggttccatgttatgtgcagatgtgtcaggattttcttcctttctatggctgaataatatttcttcatatatatatattttctctctatatatatatgtatattcttttgtttatccatctattcctggatggaagttttggtttcttccacctcgtggctatgtaatgctcctgtgaacataggtgtgcacatatctgtttgaggtcctgctactagttattctgtctctgtagaagttggatggctggatcatatggtcattttattttatttttttgaggagccagttaatatttccaccaacagtgttcaagtgtttcagtttcacctgcacttgttactttctgttgggtttgaagtgatgtcccattgtggtttctatttgcatttctctaatgattagtgatgttacacatcttctcatatatctcatgtatctgttggctatttgtatatcatctttgyatctttggatgaatgttctttgtccattttt

SEQ ID NO: 598530 - DNA, 590 bp, Homo sapiens
ccactactgctgaggcctggggattgctgggaaaaaggcaggaaacagatactgacctgaccatggagggtttatgtttcacggctcccatctgggtacccaaggaacctacatgtagctcgtgwgtggagagcctacattgcccactcaaagcaattgaggatggaacagtcttggggctggagctcattatttggaatgataaccacatctgcacagagaggacctgataagatgttgtccttccatgtatatctgggaatcctgtgtagggtctctctgtaaggacaggggcagtgttggctccttggcctctagttagcttcacaagtagtctagtaaaggctttgcaaacttgtcaccatctgtggacattctggccagctcttgttttcaccctactgacttcttcagacactaggcttttgctttagaccattcatggttttcttcctcttcaaatcagtaatcaataaatcgccttcaagtcaataaatttccactcctttaggaaaccctgatcttctggtcacaccaaggtttaattaactggtttgattgtttttctgttttcttggattttttttcct

SEQ ID NO: 598531 - DNA, 590 bp, Homo sapiens
ccactactgctgaggcctggggattgctgggaaaaaggcaggaaacagatactgacctgaccatggagggtttatgtttcacggctcccatctgggtacccaaggaacctacatgtagctcgtgtgtggagagcctacattgcccactcaaagcaattgaggatggaacagtcttggggctggagctcattatttggaatgataaccacatctgcacagagaggacctgataagatgttgtccttccatgtatatctgggaatcctgtgtagggtctctctgtaaggacaggrgcagtgttggctccttggcctctagttagcttcacaagtagtctagtaaaggctttgcaaacttgtcaccatctgtggacattctggccagctcttgttttcaccctactgacttcttcagacactaggcttttgctttagaccattcatggttttcttcctcttcaaatcagtaatcaataaatcgccttcaagtcaataaatttccactcctttaggaaaccctgatcttctggtcacaccaaggtttaattaactggtttgattgtttttctgttttcttggattttttttcct

SEQ ID NO: 598532 - DNA, 563 bp, Homo sapiens
tgaatgagaatcagcagaggtagaccactactgctgaggcctggggattgctgggaaaaaggcaggaaacagatactgacctgaccatggagggtttatgtttcacggctcccatctgggtacccaaggaacctacatgtagctcgtgtgtggagagcctacattgcccactcaaagcaattgaggatggaacagtcttggggctggagctcattatttggaatgataaccacatctgcacagagaggacctgataagatgttgtccttccatgtatatctgggaatcctgtgtagggtctctctgtaaggacaggggcagtgttggctccttggcctctagttagcytcacaagtagtctagtaaaggctttgcaaacttgtcaccatctgtggacattctggccagctcttgttttcaccctactgacttcttcagacactaggcttttgctttagaccattcatggttttcttcctcttcaaatcagtaatcaataaatcgccttcaagtcaataaatttccactcctttaggaaaccctgatcttctggtcacaccaag

SEQ ID NO: 598533 - DNA, 338 bp, Homo sapiens
tacatgatgtgcaactataggttgaatgtctctgatccaaaaatctgaaatccmaaatgctccaaagtctgaaactttttgaatgccaacatgacactcaaaggaaatgcttattggagcatctcagactcaggtgtttgaatttgagatcctcaaccagtaagaataatgcaaatattacaaaatctgaaacacatcccaagcatttcaaataagggacactcaactggtattttttttaattttacagtttgccttttaccctgttggttgtgacctttgaggtacagaagtttttaggtttgatatatttttgcttttactgcctgagcttttaa

SEQ ID NO: 598534 - DNA, 593 bp, Homo sapiens
gtttttctgttttcttggattttttttccttcttcctgggggtttctagtaattctagtttgatgtctcactttctccattttttatttcttagttttcttctgtgattattttcactgcagctgcagggcctaatcctgggttggcagagaactagcacttactctgccctaattggaatccaggagagatagcaggttccctagtgtgaaaatgtgtttgctcctctctgcttctggtagtctctctgtaggagttctttacgcattctgaatgttcacttcttatgagatacatgatgtgcaactataggttgaatgtctctgatccaaaaatctgaaatcccaaatgctccaaagtctgaaactttttgartgccaacatgacactcaaaggaaatgcttattggagcatctcagactcaggtgtttgaatttgagatcctcaaccagtaagaataatgcaaatattacaaaatctgaaacacatcccaagcatttcaaataagggacactcaactggtattttttttaattttacagtttgccttttaccctgttggttgtgacctttgaggtacagaagtttttagg

SEQ ID NO: 598535 - DNA, 439 bp, Homo sapiens
ggttccctagtgtgaaaatgtgtttgctcctctctgcttctggtagtctctctgtaggagttctttacgcattctgaatgttcacttcttatgagatacatgatgtgcaactataggttgaatgtctctgatccaaaaatctgaaatcccaaatgctccaaagtctgaaactttttgaatgccaacatgacactcaaaggaaatgcttattggagcatctcagactcaggtgtttgaattygagatcctcaaccagtaagaataatgcaaatattacaaaatctgaaacacatcccaagcatttcaaataagggacactcaactggtattttttttaattttacagtttgccttttaccctgttggttgtgacctttgaggtacagaagtttttaggtttgatatatttttgcttttactgcctgagcttttaatgtca

SEQ ID NO: 598536 - DNA, 439 bp, Homo sapiens
ggttccctagtgtgaaaatgtgtttgctcctctctgcttctggtagtctctctgtaggagttctttacgcattctgaatgttcacttcttatgagatacatgatgtgcaactataggttgaatgtctctgatccaaaaatctgaaatcccaaatgctccaaagtctgaaactttttgaatgccaacatgacactcaaaggaaatgcttattggagcatctcagactcaggtgtttgaatttgagatsctcaaccagtaagaataatgcaaatattacaaaatctgaaacacatcccaagcatttcaaataagggacactcaactggtattttttttaattttacagtttgccttttaccctgttggttgtgacctttgaggtacagaagtttttaggtttgatatatttttgcttttactgcctgagcttttaatgtca

SEQ ID NO: 598537 - DNA, 573 bp, Homo sapiens
tctctgtaggagttctttacgcattctgaatgttcacttcttatgagatacatgatgtgcaactataggttgaatgtctctgatccaaaaatctgaaatcccaaatgctccaaagtctgaaactttttgaatgccaacatgacactcaaaggaaatgcttattggagcatctcagactcaggtgtttgaatttgagatcctcaaccagtaagaataatgcaaatattacaaaatctgaaacacatcccaagcatttcaaataagggacactmaactggtattttttttaattttacagtttgccttttaccctgttggttgtgacctttgaggtacagaagtttttaggtttgatatatttttgcttttactgcctgagcttttaatgtcatatcctaaaaattattgacaaattcatcgtcataaagcattttccaaatttgttttccctaggagtttgatagttctagttttacatttaggtttataattcactttgaattgattttaacgtggtgtaaggtaagagtccaacttcattgttttgcatgtagttatacaattttcccatca

SEQ ID NO: 598538 - DNA, 439 bp, Homo sapiens
ggttccctagtgtgaaaatgtgtttgctcctctctgcttctggtagtctctctgtaggagttctttacgcattctgaatgttcacttcttatgagatacatgatgtgcaactataggttgaatgtctctgatccaaaaatctgaaatcccaaatgctccaaagtctgaaactttttgaatgccaacatgacactcaaaggaaatgcttattggagcatctcagactcaggtgtttgaatttgagatcctcaaccagtaagaataatgcaaatattacaaaatctgaaacacatcccaagcatttcaaataagggacactcaactggtattttttttwattttacagtttgccttttaccctgttggttgtgacctttgaggtacagaagtttttaggtttgatatatttttgcttttactgcctgagcttttaatgtca

SEQ ID NO: 598539 - DNA, 607 bp, Homo sapiens
ttcactttgaattgattttaacgtggtgtaaggtaagagtccaacttcattgttttgcatgtagttatacaattttcccatcaycatttgttgaagaaactgtgctttgccattgagtggtcttggcatccttctggaagatcatcggaccatatatgccagggttggtttctgaggtctctgttgtgttggtccataagtgtgtcaagagtgtctttatgccatgaccacattttttttttttggcttattgcagttttgtaattgctttgagacctttaattttgttctgtttcaagattgatttgcctattcatgggccctggatattccatgagttttaggataggtttttctgtttatcaaaaatgtcattggaatctttataaggattgtattgaatctaggtcacttcgagtagtgttgacatcattccaagatgaaatcatctaatttgcaaacccagcttttcttttcatttatttgtgtttaatttcttttaacagtgttttgtagttttctgtgttcaaatcttttgccctcttggttaagcttatttctaatttttataatgctgttgtaaatataattttttttttttttgaga

SEQ ID NO: 598540 - DNA, 607 bp, Homo sapiens
ttcactttgaattgattttaacgtggtgtaaggtaagagtccaacttcattgttttgcatgtagttatacaattttcccatcaccatttgttgaagaaactgtgctttkccattgagtggtcttggcatccttctggaagatcatcggaccatatatgccagggttggtttctgaggtctctgttgtgttggtccataagtgtgtcaagagtgtctttatgccatgaccacattttttttttttggcttattgcagttttgtaattgctttgagacctttaattttgttctgtttcaagattgatttgcctattcatgggccctggatattccatgagttttaggataggtttttctgtttatcaaaaatgtcattggaatctttataaggattgtattgaatctaggtcacttcgagtagtgttgacatcattccaagatgaaatcatctaatttgcaaacccagcttttcttttcatttatttgtgtttaatttcttttaacagtgttttgtagttttctgtgttcaaatcttttgccctcttggttaagcttatttctaatttttataatgctgttgtaaatataattttttttttttttgaga

SEQ ID NO: 598541 - DNA, 607 bp, Homo sapiens
ttcactttgaattgattttaacgtggtgtaaggtaagagtccaacttcattgttttgcatgtagttatacaattttcccatcaccatttgttgaagaaactgtgctttgccattgagtggtcttggcatccttctggaagatcatcggaccatatatgccagggttggtttctgaggtctctgttgtgttggtccataagtgtgtcaagagtgtctttatgccatgaccacattttttytttttggcttattgcagttttgtaattgctttgagacctttaattttgttctgtttcaagattgatttgcctattcatgggccctggatattccatgagttttaggataggtttttctgtttatcaaaaatgtcattggaatctttataaggattgtattgaatctaggtcacttcgagtagtgttgacatcattccaagatgaaatcatctaatttgcaaacccagcttttcttttcatttatttgtgtttaatttcttttaacagtgttttgtagttttctgtgttcaaatcttttgccctcttggttaagcttatttctaatttttataatgctgttgtaaatataattttttttttttttgaga

SEQ ID NO: 598542 - DNA, 607 bp, Homo sapiens
ttcactttgaattgattttaacgtggtgtaaggtaagagtccaacttcattgttttgcatgtagttatacaattttcccatcaccatttgttgaagaaactgtgctttgccattgagtggtcttggcatccttctggaagatcatcggaccatatatgccagggttggtttctgaggtctctgttgtgttggtccataagtgtgtcaagagtgtctttatgccatgaccacattttttttttttggcttattgcagttttgtaattgctttgagacstttaattttgttctgtttcaagattgatttgcctattcatgggccctggatattccatgagttttaggataggtttttctgtttatcaaaaatgtcattggaatctttataaggattgtattgaatctaggtcacttcgagtagtgttgacatcattccaagatgaaatcatctaatttgcaaacccagcttttcttttcatttatttgtgtttaatttcttttaacagtgttttgtagttttctgtgttcaaatcttttgccctcttggttaagcttatttctaatttttataatgctgttgtaaatataattttttttttttttgaga

SEQ ID NO: 598543 - DNA, 570 bp, Homo sapiens
tggtggtttgtgtttctaggaatttataaatttattctaggttgcccagttctgtggcatatggttgctcacattagtctcttgtaatctttttcatttctgtggcatctgttgtactgtcacctcttttatttatgattttagtatttgagatttctctttttttyttaatatagctgtgagttttagaatttttattgatctttaaaaaaacaaactcagtggtttttttttcctttttttctgatcttattctgcttatctctgttctaatctgttattttcttccttttgcttggtttgtcattagttttttttttttttttcccctttaggtgtaatgttaggttattgatttgagatctttcttctttttaatttaatcacctgcagctataagcttccctttagcatggctttgagatctttcttctttttaatttaagcatctgcggctgtaagcttccctttagcactgcctttgttgcctcctcctgagtttgggtatgtcatggttttgttttcatttgcttaaacatttttttttgtcctattgtaatataattgtgt

SEQ ID NO: 598544 - DNA, 481 bp, Homo sapiens
cctggaattttcttttttggggggtttttgattactggttgaatgttcttactagttacaggtctctttggattttttatttctccatgatgcagtatggtggtttgtgtttctaggaatttataaatttattctaggttgcccagttctgtggcatatggttgctcacattagtctcttgtaatctttttcatttctgtggcatctgttgtactgtcacctcttttatttatgattttagtatttgagatttctctttttttcttaatatagctgtgagttttaraatttttattgatctttaaaaaaacaaactcagtggtttttttttcctttttttctgatcttattctgcttatctctgttctaatctgttattttcttccttttgcttggtttgtcattagttttttttttttttttcccctttaggtgtaatgttaggttattgatttgagatctttcttctttttaatttaat

SEQ ID NO: 598545 - DNA, 570 bp, Homo sapiens
tggtggtttgtgtttctaggaatttataaatttattctaggttgcccagttctgtggcatatggttgctcacattagtctcttgtaatctttttcatttctgtggcatctgttgtactgtcacctcttttatttatgattttagtatttgagatttctctttttttcttaatatagctgtgagttttagaatttttattratctttaaaaaaacaaactcagtggtttttttttcctttttttctgatcttattctgcttatctctgttctaatctgttattttcttccttttgcttggtttgtcattagttttttttttttttttcccctttaggtgtaatgttaggttattgatttgagatctttcttctttttaatttaatcacctgcagctataagcttccctttagcatggctttgagatctttcttctttttaatttaagcatctgcggctgtaagcttccctttagcactgcctttgttgcctcctcctgagtttgggtatgtcatggttttgttttcatttgcttaaacatttttttttgtcctattgtaatataattgtgt

SEQ ID NO: 598546 - DNA, 481 bp, Homo sapiens
cctggaattttcttttttggggggtttttgattactggttgaatgttcttactagttacaggtctctttggattttttatttctccatgatgcagtatggtggtttgtgtttctaggaatttataaatttattctaggttgcccagttctgtggcatatggttgctcacattagtctcttgtaatctttttcatttctgtggcatctgttgtactgtcacctcttttatttatgattttagtatttgagatttctctttttttcttaatatagctgtgagttttagaatttttattgatctttaaaaaaacaaactcagtggtttttttttcctttttttctgrtcttattctgcttatctctgttctaatctgttattttcttccttttgcttggtttgtcattagttttttttttttttttcccctttaggtgtaatgttaggttattgatttgagatctttcttctttttaatttaat

SEQ ID NO: 598547 - DNA, 509 bp, Homo sapiens
tgagttttagaatttttattgatctttaaaaaaacaaactcagtggtttttttttcctttttttctgatcttattctgcttatctctgttctaatctgttattttcttccttttgcttggtttgtcattagttttttttttttttttcccctttaggtgtaatgttaggttattgatttgagatctttcttctttttaatttratcacctgcagctataagcttccctttagcatggctttgagatctttcttctttttaatttaagcatctgcggctgtaagcttccctttagcactgcctttgttgcctcctcctgagtttgggtatgtcatggttttgttttcatttgcttaaacatttttttttgtcctattgtaatataattgtgttgtttttaatagaggtaattaatgaaacacataatgaattgtgcttctgtttttataatattttaagcattcttaactcagaaatgtaaattttagaaaaaaattccaggccaggcac

SEQ ID NO: 598548 - DNA, 570 bp, Homo sapiens
tggtggtttgtgtttctaggaatttataaatttattctaggttgcccagttctgtggcatatggttgctcacattagtctcttgtaatctttttcatttctgtggcatctgttgtactgtcacctcttttatttatgattttagtatttgagatttctctttttttcttaatatagctgtgagttttagaatttttattgatctttaaaaaaacaaactcagtggtttttttttcctttttttctgatcttattctgcttatctctgttctaatctgttattttcttccttttgcttggtttgtcattagttttttttttttttttcccctttaggtgtaatgttaggttattgatttgagatctttcttctttttaatttaakcacctgcagctataagcttccctttagcatggctttgagatctttcttctttttaatttaagcatctgcggctgtaagcttccctttagcactgcctttgttgcctcctcctgagtttgggtatgtcatggttttgttttcatttgcttaaacatttttttttgtcctattgtaatataattgtgt

SEQ ID NO: 598549 - DNA, 509 bp, Homo sapiens
tgagttttagaatttttattgatctttaaaaaaacaaactcagtggtttttttttcctttttttctgatcttattctgcttatctctgttctaatctgttattttcttccttttgcttggtttgtcattagttttttttttttttttcccctttaggtgtaatgttaggttattgatttgagatctttcttctttttaatttaatcacctgcagctataagcttccctttagcatggctttgagatctttcttctttttaatttaagcatctgyggctgtaagcttccctttagcactgcctttgttgcctcctcctgagtttgggtatgtcatggttttgttttcatttgcttaaacatttttttttgtcctattgtaatataattgtgttgtttttaatagaggtaattaatgaaacacataatgaattgtgcttctgtttttataatattttaagcattcttaactcagaaatgtaaattttagaaaaaaattccaggccaggcac

SEQ ID NO: 598550 - DNA, 570 bp, Homo sapiens
ttttgttttcatttgcttaaacatttttttttgtcctattgtaatataattgtgttgtttttaatagaggtaattaatgaaacacataatgaattgtgcttctgtttttataatattttaagcattcttaactcagaaatgtaaattttagaaaaaaattccakgccaggcacactggctcacacctgtagtcccagcacttgaggaggccgaggtgggaggatcatctgaggtcaggagttggagaccagcctggccaacatggtgaaaccctgtctttactaaaaatagaaaaaaaatatataaaagctagctgggtgtcatggcgggtgcctgtaatcccagctactctggaggctgaggcaggagaatcacttgaatctgggaggcggaggttgcagtgagctgagattgcaccactgcactccagcctgggtgacagaatgagtccatctcaaaaaaaaaagaaaaaagaaaaaacttgagacatatttatttgtatttcaatttagaaactatgatctcctaagtgtattgacacagcaacctgacataaagataaagaataat

SEQ ID NO: 598551 - DNA, 507 bp, Homo sapiens
attgtgttgtttttaatagaggtaattaatgaaacacataatgaattgtgcttctgtttttataatattttaagcattcttaactcagaaatgtaaattttagaaaaaaattccaggccaggcacastggctcacacctgtagtcccagcacttgaggaggccgaggtgggaggatcatctgaggtcaggagttggagaccagcctggccaacatggtgaaaccctgtctttactaaaaatagaaaaaaaatatataaaagctagctgggtgtcatggcgggtgcctgtaatcccagctactctggaggctgaggcaggagaatcacttgaatctgggaggcggaggttgcagtgagctgagattgcaccactgcactccagcctgggtgacagaatgagtccatctcaaaaaaaaaagaaaaaagaaaaaacttgagacatatttatttgtatttcaatttagaaactatgatctcctaagtgtattgacacagcaacctgacata

SEQ ID NO: 598552 - DNA, 570 bp, Homo sapiens
ttttgttttcatttgcttaaacatttttttttgtcctattgtaatataattgtgttgtttttaatagaggtaattaatgaaacacataatgaattgtgcttctgtttttataatattttaagcattcttaactcagaaatgtaaattttagaaaaaaattccaggccaggcacactggctcacacctgtagtcccagcacttgaggaggccgaggtgggaggatcatctgaggtcaggagttggagaccagcctggccaacatggtgaaaccctgtctttactaaaaatagaaaaaaaatatataaaagctagctgrgtgtcatggcgggtgcctgtaatcccagctactctggaggctgaggcaggagaatcacttgaatctgggaggcggaggttgcagtgagctgagattgcaccactgcactccagcctgggtgacagaatgagtccatctcaaaaaaaaaagaaaaaagaaaaaacttgagacatatttatttgtatttcaatttagaaactatgatctcctaagtgtattgacacagcaacctgacataaagataaagaataat

SEQ ID NO: 598553 - DNA, 507 bp, Homo sapiens
attgtgttgtttttaatagaggtaattaatgaaacacataatgaattgtgcttctgtttttataatattttaagcattcttaactcagaaatgtaaattttagaaaaaaattccaggccaggcacactggctcacacctgtagtcccagcacttgaggaggccgaggtgggaggatcatctgaggtcaggagttggagaccagcctggccaacatggtgaaaccctgtctttactaaaaatagaaaaaaaatatataaaagctagctgggtrtcatggcgggtgcctgtaatcccagctactctggaggctgaggcaggagaatcacttgaatctgggaggcggaggttgcagtgagctgagattgcaccactgcactccagcctgggtgacagaatgagtccatctcaaaaaaaaaagaaaaaagaaaaaacttgagacatatttatttgtatttcaatttagaaactatgatctcctaagtgtattgacacagcaacctgacata

SEQ ID NO: 598554 - DNA, 570 bp, Homo sapiens
ttttgttttcatttgcttaaacatttttttttgtcctattgtaatataattgtgttgtttttaatagaggtaattaatgaaacacataatgaattgtgcttctgtttttataatattttaagcattcttaactcagaaatgtaaattttagaaaaaaattccaggccaggcacactggctcacacctgtagtcccagcacttgaggaggccgaggtgggaggatcatctgaggtcaggagttggagaccagcctggccaacatggtgaaaccctgtctttactaaaaatagaaaaaaaatatataaaagctagctgggtgtcatggcgggtgcctgtaatcccagctactctggaggctgaggcaggagaatcacttgaatctgggaggcggaggttgcagtgagctgagattgcaccactgcactccagcctgggtgacagaatgagtccatctcaaaaaaaaaagaaaaaagaaaaaayttgagacatatttatttgtatttcaatttagaaactatgatctcctaagtgtattgacacagcaacctgacataaagataaagaataat

SEQ ID NO: 598555 - DNA, 560 bp, Homo sapiens
aaattaaagctccatggcagttgaatgtagtcatttaagatgttctttgtccttttgtttttcttttgcttctttatcattgtaaagaatgatgtattctgttgagatatgatttacatacttagaaaacatgatttgtatagatatgtggcacataatagaaagggttgaggaaaaggacaccacaccgtactacacagcacaacctgragcatcttgctctgtgaggtgggtccagatagactttttagcaatggaaggggacaagtgcaaagggttgtgctttataaaactggaatcacaaagtctttcatacttaccttcggttggaaataagaccaggcagtgaatgctattaggtaaatacataagttcctcactgatcctcttcctttgagggatgaggttgacaacagcctgtattatgatgacatgactcacctacaactagattctgtcatgagagatgacaagggagttttgctttatgcgaggtgcaaaaatttttttctcctactagggagatgggcaagcattagaacattctggtagtaaaaggg

SEQ ID NO: 598556 - DNA, 397 bp, Homo sapiens
aatggaaggggacaagtgcaaagggttgtgmtttataaaactggaatcacaaagtctttcatacttaccttcggttggaaataagaccaggcagtgaatgctattaggtaaatacataagttcctcactgatcctcttcctttgagggatgaggttgacaacagcctgtattatgatgacatgactcacctacaactagattctgtcatgagagatgacaagggagttttgctttatgcgaggtgcaaaaatttttttctcctactagggagatgggcaagcattagaacattctggtagtaaaagggcattgatagttttctttctatatattttttcacatcagataatattgcccggcagcctgccatacctccccagtgtttattcagcttct

SEQ ID NO: 598557 - DNA, 397 bp, Homo sapiens
aatggaaggggacaagtgcaaagggttgtgctttataaaactggaatcacaaagtctttcatacttaccttcggttggaaataagaccaggcagtgaatgctattaggtaaatacataagttcctcactgatcctcttcctttgagggatgaggttgacaacagcctgtattatgatgacatgactcacctacaactagattctgtcatgagagatgacaagggagttttgctttatgcgaggtgmaaaaatttttttctcctactagggagatgggcaagcattagaacattctggtagtaaaagggcattgatagttttctttctatatattttttcacatcagataatattgcccggcagcctgccatacctccccagtgtttattcagcttct

SEQ ID NO: 598558 - DNA, 397 bp, Homo sapiens
aatggaaggggacaagtgcaaagggttgtgctttataaaactggaatcacaaagtctttcatacttaccttcggttggaaataagaccaggcagtgaatgctattaggtaaatacataagttcctcactgatcctcttcctttgagggatgaggttgacaacagcctgtattatgatgacatgactcacctacaactagattctgtcatgagagatgacaagggagttttgctttatgcgaggtgcaaaaatttttttctcctactagggagatgggcaagcattagaacattctggtagtaaaagggcattgatagttttctttctatatattttttcacatcagataatattgcccgrcagcctgccatacctccccagtgtttattcagcttct

SEQ ID NO: 598559 - DNA, 706 bp, Homo sapiens
tatgatgacatgactcacctacaactagattctgtcatgagagatgacaagggagttttgctttatgcgaggtgcaaaaatttttttctcctactagggagatgggcaagcattagaacattctggtagtaaaagggcattgatagttttctttctatatattttttcacatcagataatattgcccggcagcctgccatacctccccagtgtttattcagcttctytctgaatgtggataagctcttaacggagtgatctttccagtggttctttcgtgggaggtaaaatggcaggtgaatttgggccttgttatacgtaggccagagcaaatagctacaactaaggaaaccacccagcaccttacccagaagagtattagccagagtaacacactgatctctcttgagatcttctccactggtggctggaaagtctttgcaaggattcctgtttctggtctgattcctatgttttgttggtttctggcgatagcatgttttattctaaactaaacagtttgaactgaagagctagagaggctgtgttgtgttataacaaaataagtgcagtaactacatcttaactgtgggagatacattccaagacccccagtgcatgcatgaaaccatgaatagtactgaatcacaagctgtttttccctatacatacatatctatgagaaagtttaatttataaattaaat

SEQ ID NO: 598560 - DNA, 706 bp, Homo sapiens
tatgatgacatgactcacctacaactagattctgtcatgagagatgacaagggagttttgctttatgcgaggtgcaaaaatttttttctcctactagggagatgggcaagcattagaacattctggtagtaaaagggcattgatagttttctttctatatattttttcacatcagataatattgcccggcagcctgccatacctccccagtgtttattcagcttctctctgaatgtggataagctcttaayggagtgatctttccagtggttctttcgtgggaggtaaaatggcaggtgaatttgggccttgttatacgtaggccagagcaaatagctacaactaaggaaaccacccagcaccttacccagaagagtattagccagagtaacacactgatctctcttgagatcttctccactggtggctggaaagtctttgcaaggattcctgtttctggtctgattcctatgttttgttggtttctggcgatagcatgttttattctaaactaaacagtttgaactgaagagctagagaggctgtgttgtgttataacaaaataagtgcagtaactacatcttaactgtgggagatacattccaagacccccagtgcatgcatgaaaccatgaatagtactgaatcacaagctgtttttccctatacatacatatctatgagaaagtttaatttataaattaaat

SEQ ID NO: 598561 - DNA, 516 bp, Homo sapiens
ttgtgctttataaaactggaatcacaaagtctttcatacttaccttcggttggaaataagaccaggcagtgaatgctattaggtaaatacataagttcctcactgatcctcttcctttgagggatgaggttgacaacagcctgtattatgatgacatgactcacctacaactagattctgtcatgagagatgacaagggagttttgctttatgcgaggtgcaaaaatttttttctcctactagggagatgggcaagcattagaacattctggtagtaaaagggcattgatagttttctttctatatattttttcacatcagataatattgcccggcagcctgccatacctccccagtgtttattcagcttctctctgaatgtggataagctcttaacggagtgatctttccagtggttctttcgtkggaggtaaaatggcaggtgaatttgggccttgttatacgtaggccagagcaaatagctacaactaaggaaaccacccagcaccttaccca

SEQ ID NO: 598562 - DNA, 464 bp, Homo sapiens
cagcctgtattatgatgacatgactcacctacaactagattctgtcatgagagatgacaagggagttttgctttatgcgaggtgcaaaaatttttttctcctactagggagatgggcaagcattagaacattctggtagtaaaagggcattgatagttttctttctatatattttttcacatcagataatattgcccggcagcctgccatacctccccagtgtttattcagcttctctctgaatgtggataagctcttaacggagtgatctttccagtggttctttcgtgggaggtaaaatgrcaggtgaatttgggccttgttatacgtaggccagagcaaatagctacaactaaggaaaccacccagcaccttacccagaagagtattagccagagtaacacactgatctctcttgagatcttctccactggtggctggaaagtctttgcaaggattcctgt

SEQ ID NO: 598563 - DNA, 706 bp, Homo sapiens
tatgatgacatgactcacctacaactagattctgtcatgagagatgacaagggagttttgctttatgcgaggtgcaaaaatttttttctcctactagggagatgggcaagcattagaacattctggtagtaaaagggcattgatagttttctttctatatattttttcacatcagataatattgcccggcagcctgccatacctccccagtgtttattcagcttctctctgaatgtggataagctcttaacggagtgatctttccagtggttctttcgtgggaggtaaaatggcaggtgaatttgggccttgttatacgtaggccagagcaaatagctacaactaaggaaaccacccagcaccttacccagaagagtattagccagagtaacacactgatctctcttgagatcttctccactggtggctggaaagtctttgcaaggattcctgtttctggtctgattcctatgttttgttggtttctggcgatagcatgttttmttctaaactaaacagtttgaactgaagagctagagaggctgtgttgtgttataacaaaataagtgcagtaactacatcttaactgtgggagatacattccaagacccccagtgcatgcatgaaaccatgaatagtactgaatcacaagctgtttttccctatacatacatatctatgagaaagtttaatttataaattaaat

SEQ ID NO: 598564 - DNA, 566 bp, Homo sapiens
tgttggtggggaaaaactctccacacatttggtcacagaagccttctttgttgatgattgttgctgtggtgtgacagcagagaaaaacgtgtcaagtatgtctttctgcgcatatagtggataaggggtactagtstatactctgttgtaatggcccctcatattttggtccagaaatcgtgctctttgacactgttgactcatcacacctgttctgctaacaataccatttttactcaatctcataggctttggctaggatgacttgtatactgcagttcacttgtagataccaaattttaataaatttattcttctttgcatctaataaacacagagggaagagttcttactgcattaattacctaccaatacgtataatgaatgttaattctaataagatcccagcatgctcccaaaggaatgctttgtaacaaagcgtcagtcttatgctttaaaaaaccaaaccaaaccaaaacaacaacaacaacaacaacaacaacaacaaacaggatgtaaagcatacacacaagtgtgcacaatttttttatgaaggtagagtctta

SEQ ID NO: 598565 - DNA, 566 bp, Homo sapiens
tgttggtggggaaaaactctccacacatttggtcacagaagccttctttgttgatgattgttgctgtggtgtgacagcagagaaaaacgtgtcaagtatgtctttctgcgcatatagtggataaggggtactagtctatactctgttgtaatggcccctcatattttggtccagaaatcrtgctctttgacactgttgactcatcacacctgttctgctaacaataccatttttactcaatctcataggctttggctaggatgacttgtatactgcagttcacttgtagataccaaattttaataaatttattcttctttgcatctaataaacacagagggaagagttcttactgcattaattacctaccaatacgtataatgaatgttaattctaataagatcccagcatgctcccaaaggaatgctttgtaacaaagcgtcagtcttatgctttaaaaaaccaaaccaaaccaaaacaacaacaacaacaacaacaacaacaacaaacaggatgtaaagcatacacacaagtgtgcacaatttttttatgaaggtagagtctta

SEQ ID NO: 598566 - DNA, 566 bp, Homo sapiens
tgttggtggggaaaaactctccacacatttggtcacagaagccttctttgttgatgattgttgctgtggtgtgacagcagagaaaaacgtgtcaagtatgtctttctgcgcatatagtggataaggggtactagtctatactctgttgtaatggcccctcatattttggtccagaaatcgtgctctttgacactgttgactcatcacacctgttctgctaacaataccatttttactcaatctcataggctttggctaggatgacttgtatactgcagttcacttgtagataccaaattttaataaatttattcttctttgcatctaataaayacagagggaagagttcttactgcattaattacctaccaatacgtataatgaatgttaattctaataagatcccagcatgctcccaaaggaatgctttgtaacaaagcgtcagtcttatgctttaaaaaaccaaaccaaaccaaaacaacaacaacaacaacaacaacaacaacaaacaggatgtaaagcatacacacaagtgtgcacaatttttttatgaaggtagagtctta

SEQ ID NO: 598567 - DNA, 580 bp, Homo sapiens
tctcataggctttggctaggatgacttgtatactgcagttcacttgtagataccaaattttaataaatttattcttctttgcatctaataaacacagagggaagagttcttactgcattaattacctaccaatacgtataatgaatgttaattctaataagatcccagcatgctcccaaaggaatgctttgtaacaaagcgtcagtcttatgctttaaaaaaccaaaccaaaccaaaacaacaacaacaacaacaacaacaacaacaaacaggatgtaaagcatacacacaagtgtgcacaatttttttatgaaggtagagtcttactatgtttcccaagctggtctcaaacttctgggctmctaaagtgatcctcctgcctcatcctctcaagtagtttggattagaggcatgcatcactgtgcattcttatgattttaatattctgtacatttattattgatttaaaatgcattttacctttttctttaatagatgttggaattcctgatgaatctgcagtcaggtaagatttcatagatttaaaaaattatgttaactaagaaaatatagatggaag

SEQ ID NO: 598568 - DNA, 580 bp, Homo sapiens
tctcataggctttggctaggatgacttgtatactgcagttcacttgtagataccaaattttaataaatttattcttctttgcatctaataaacacagagggaagagttcttactgcattaattacctaccaatacgtataatgaatgttaattctaataagatcccagcatgctcccaaaggaatgctttgtaacaaagcgtcagtcttatgctttaaaaaaccaaaccaaaccaaaacaacaacaacaacaacaacaacaacaacaaacaggatgtaaagcatacacacaagtgtgcacaatttttttatgaaggtagagtcttactatgtttcccaagctggtctcaaacttctgggctactmaagtgatcctcctgcctcatcctctcaagtagtttggattagaggcatgcatcactgtgcattcttatgattttaatattctgtacatttattattgatttaaaatgcattttacctttttctttaatagatgttggaattcctgatgaatctgcagtcaggtaagatttcatagatttaaaaaattatgttaactaagaaaatatagatggaag

SEQ ID NO: 598569 - DNA, 580 bp, Homo sapiens
tctcataggctttggctaggatgacttgtatactgcagttcacttgtagataccaaattttaataaatttattcttctttgcatctaataaacacagagggaagagttcttactgcattaattacctaccaatacgtataatgaatgttaattctaataagatcccagcatgctcccaaaggaatgctttgtaacaaagcgtcagtcttatgctttaaaaaaccaaaccaaaccaaaacaacaacaacaacaacaacaacaacaacaaacaggatgtaaagcatacacacaagtgtgcacaatttttttatgaaggtagagtcttactatgtttcccaagctggtctcaaacttctgggctactaaagtgatcctcctgcctcatcctcycaagtagtttggattagaggcatgcatcactgtgcattcttatgattttaatattctgtacatttattattgatttaaaatgcattttacctttttctttaatagatgttggaattcctgatgaatctgcagtcaggtaagatttcatagatttaaaaaattatgttaactaagaaaatatagatggaag

SEQ ID NO: 598570 - DNA, 542 bp, Homo sapiens
gtgcattcttatgattttaatattctgtacatttattattgatttaaaatgcattttacctttttctttaatagatgttggaattcctgatgaatctgcagtcaggtaagatttcatagatttaaaaaattatgttaactaagaaaatatagatggaagaaactaatatctgttgagtgttgtattctgggctagacatcctaatatgttctatgcatttatcatctcataaagccatcataacatctgtgttcctataacctactgttaaataaacaactatggattagagctgattaattgcctcatgatcccatagttaacawagtagctggcctacagtttgaccatcagcctacctgccttccaaatcctttctcttgctcctcagcatagattgatagatatctgtgcagtccttggatcaaagtataggtctgaatcagatcaatcggattcattaatttgattaacttctaaattaatgagagtttaaataccttgaactctcatttaagtttattgttagaatgtggttagtc

SEQ ID NO: 598571 - DNA, 542 bp, Homo sapiens
gtgcattcttatgattttaatattctgtacatttattattgatttaaaatgcattttacctttttctttaatagatgttggaattcctgatgaatctgcagtcaggtaagatttcatagatttaaaaaattatgttaactaagaaaatatagatggaagaaactaatatctgttgagtgttgtattctgggctagacatcctaatatgttctatgcatttatcatctcataaagccatcataacatctgtgttcctataacctactgttaaataaacaactatggattagagctgattaattgcctcatgatcccatagttaacatagtagctggcctrcagtttgaccatcagcctacctgccttccaaatcctttctcttgctcctcagcatagattgatagatatctgtgcagtccttggatcaaagtataggtctgaatcagatcaatcggattcattaatttgattaacttctaaattaatgagagtttaaataccttgaactctcatttaagtttattgttagaatgtggttagtc

SEQ ID NO: 598572 - DNA, 618 bp, Homo sapiens
gaatctgcagtcaggtaagatttcatagatttaaaaaattatgttaactaagaaaatatagatggaagaaactaatatctgttgagtgttgtattctgggctagacatcctaatatgttctatgcatttatcatctcataaagccatcataacatctgtgttcctataacctactgttaaataaacaactatggattagagctgattaattgcctcatgatcccatagttaacatagtagctggcctacagtttgaccatcagcctacctgccttccaaatcctttctcttgctcctcagcatagattgatagatatctgtgcagyccttggatcaaagtataggtctgaatcagatcaatcggattcattaatttgattaacttctaaattaatgagagtttaaataccttgaactctcatttaagtttattgttagaatgtggttagtcctaataaatttgacgatttcagtggtaaccagtatcttatttttaccttcaaaggctctagggcagatctgacttagctttggccataggactgtaagttttaccaaagcaagtttaggcaagtcttagagacaaattatttgacttcccagtttggttttccattt

SEQ ID NO: 598573 - DNA, 515 bp, Homo sapiens
atctgtgcagtccttggatcaaagtataggtctgaatcagatcaatcrgattcattaatttgattaacttctaaattaatgagagtttaaataccttgaactctcatttaagtttattgttagaatgtggttagtcctaataaatttgacgatttcagtggtaaccagtatcttatttttaccttcaaaggctctagggcagatctgacttagctttggccataggactgtaagttttaccaaagcaagtttaggcaagtcttagagacaaattatttgacttcccagtttggttttccatttaggcaagtatttctgcttacttccataatacattttttagtcttgttgctttttccatgacttttatataatcttgtcttcattttttaaaactttcttctctgtttttcttggtgtttcttttgttctattatttttttcaaactctgctgcctatgtattccaagtttttctatagacagaatcaagaggacatagaattacagaatttt

SEQ ID NO: 598574 - DNA, 565 bp, Homo sapiens
ttaaataccttgaactctcatttaagtttattgttagaatgtggttagtcctaataaatttgacgatttcagtggtaaccagtatcttatttttaccttcaaaggctctagggcagatctgacttagctttggccataggactgtaagttttaccaaagcaagtttaggcaagtcttagagacaaattatttgacttcccagtttggttttccatttaggcaagtatttctgcttacttccataatacattttttagtcttgttgctttttccatgacttttatataatcttgtcttcattttttaaaactttcttctctgtttttctkggtgtttcttttgttctattatttttttcaaactctgctgcctatgtattccaagtttttctatagacagaatcaagaggacatagaattacagaattttaaggaatcttggaatgaattaaaataccttctagtatttttatctgcattgaacattctggtcaagtgattctctagatagagaatgtgaggctcaaagagattaggaagcttttttttttagacataggaattgg

SEQ ID NO: 598575 - DNA, 502 bp, Homo sapiens
acttttatataatcttgtcttcattttttaaaactttcttctctgtttttcttggtgtttcttttgttctattatttttttcaaactctgctgcctatgtattccaagtttttctatagacagaatcaagaggacatagaattacagaattttaaggaatcttrgaatgaattaaaataccttctagtatttttatctgcattgaacattctggtcaagtgattctctagatagagaatgtgaggctcaaagagattaggaagcttttttttttagacataggaattggcagaaatgagatttgaactcatggtaaagcccagtactcttgcttctttttatgtcctattggcgtgtgttttaataatacaaacgggagtgagcctgtggatagaatgagaatggaattagctggtgaacccaatggaagtagataagaatggaatgagcaggggaagtccaagtttgaagataaacaacactggactggataggagtacgg

SEQ ID NO: 598576 - DNA, 502 bp, Homo sapiens
acttttatataatcttgtcttcattttttaaaactttcttctctgtttttcttggtgtttcttttgttctattatttttttcaaactctgctgcctatgtattccaagtttttctatagacagaatcaagaggacatagaattacagaattttaaggaatcttggaatgaattaaaataccttctagtatttttatctgcrttgaacattctggtcaagtgattctctagatagagaatgtgaggctcaaagagattaggaagcttttttttttagacataggaattggcagaaatgagatttgaactcatggtaaagcccagtactcttgcttctttttatgtcctattggcgtgtgttttaataatacaaacgggagtgagcctgtggatagaatgagaatggaattagctggtgaacccaatggaagtagataagaatggaatgagcaggggaagtccaagtttgaagataaacaacactggactggataggagtacgg

SEQ ID NO: 598577 - DNA, 502 bp, Homo sapiens
acttttatataatcttgtcttcattttttaaaactttcttctctgtttttcttggtgtttcttttgttctattatttttttcaaactctgctgcctatgtattccaagtttttctatagacagaatcaagaggacatagaattacagaattttaaggaatcttggaatgaattaaaataccttctagtatttttatctgcattgaacattctggtcaagtgattctctagatagagaatgtgaggctcaaagagattaggaagcttttttttttagacataggaattggcagaaatgagatttgaactcatggtaaagcccagtactcttgcttctttttatgtcctattggcgtgtgttttaataatacaaacgggagtgagcctgtggatagaatgagaatggaattagctggtgaacccaatrgaagtagataagaatggaatgagcaggggaagtccaagtttgaagataaacaacactggactggataggagtacgg

SEQ ID NO: 598578 - DNA, 461 bp, Homo sapiens
acaagatgttgggaattatctacaaaggcacattaaaatagaaggttcaagggagctctaaaaattttgctgctttttttttttaaatcaaggactgacaaacttgaagatttttactgaaagatgccaaaacattttgagacactgggaagaatgtctacagcagatagaaatgtggtgtcatctacttccatcctgacttacaaaggggtggcttagagcccctggagtactaaggggctggaaattgctgaactacatagatgtgtggcacaggrcaggtgtctcctcacctctgcctcttttcacagttcactgatgtccttcccatgtccatgtgggctgggtcaggggcatgattagctggcaaatcagtcatggagttcagttgggtagttggtagtgtgtatagctggtggcaggtgatggagactccagttagcttgtttttcaggagcagg

SEQ ID NO: 598579 - DNA, 570 bp, Homo sapiens
cttccatcctgacttacaaaggggtggcttagagcccctggagtactaaggggctggaaattgctgaactacatagatgtgtggcacaggacaggtgtctcctcacctctgcctcttttcacagttcactgatgtccttcccatgtccatgtgggctgggtcaggggcatgattagctggcaaatcagtcatggagttcakttgggtagttggtagtgtgtatagctggtggcaggtgatggagactccagttagcttgtttttcaggagcagggatatagagagctcctacttctggtcatttgaggccattctttcaggaatctgtgctttcatacactgaagatttgaagattggagacttctgtggaaccctgcagaagtagaatctggaagtgggtgtccataggaagaaatatacttagatagtacttagggaaatagaggtacaactatcatgactctgtttctttcctcgcagtctctctccttgggtgtctgagtgcctatgaaaatttttaagggcttgctagtttatgtggacctgaataaggtaggacctatagagtg

SEQ ID NO: 598580 - DNA, 570 bp, Homo sapiens
cttccatcctgacttacaaaggggtggcttagagcccctggagtactaaggggctggaaattgctgaactacatagatgtgtggcacaggacaggtgtctcctcacctctgcctcttttcacagttcactgatgtccttcccatgtccatgtgggctgggtcaggggcatgattagctggcaaatcagtcatggagttcagttgggtagttggtagtgtgtatagctggtggcaggtgatggagactccagttagcttgtttttcaggagcagggatatagagagctcctactyctggtcatttgaggccattctttcaggaatctgtgctttcatacactgaagatttgaagattggagacttctgtggaaccctgcagaagtagaatctggaagtgggtgtccataggaagaaatatacttagatagtacttagggaaatagaggtacaactatcatgactctgtttctttcctcgcagtctctctccttgggtgtctgagtgcctatgaaaatttttaagggcttgctagtttatgtggacctgaataaggtaggacctatagagtg

SEQ ID NO: 598581 - DNA, 570 bp, Homo sapiens
cttccatcctgacttacaaaggggtggcttagagcccctggagtactaaggggctggaaattgctgaactacatagatgtgtggcacaggacaggtgtctcctcacctctgcctcttttcacagttcactgatgtccttcccatgtccatgtgggctgggtcaggggcatgattagctggcaaatcagtcatggagttcagttgggtagttggtagtgtgtatagctggtggcaggtgatggagactccagttagcttgtttttcaggagcagggatatagagagctcctacttctggtcatttgaggccattctttcaggaatctgtgctttcatacactgaagatttraagattggagacttctgtggaaccctgcagaagtagaatctggaagtgggtgtccataggaagaaatatacttagatagtacttagggaaatagaggtacaactatcatgactctgtttctttcctcgcagtctctctccttgggtgtctgagtgcctatgaaaatttttaagggcttgctagtttatgtggacctgaataaggtaggacctatagagtg

SEQ ID NO: 598582 - DNA, 603 bp, Homo sapiens
tagtcttttatccagagacagatcacagaaaagagacagtggatctttctaccttgttttaggtcatcagttttattccagtttagggaacaaaatttatgtcatccattaattgaattttaagttcagcttcaggacagataatttgtgagggcacattattgtcaggctctgccaatatattgactgtcactatttgttataaacctcaaggtwagttttcattgaatattttatagatttagacaggtggaggcagaaataggtaactaaaatctatttttagaacagaggacatattttaattatatcaagaatcataatttaatatatagatcactgacctttccccagattatgttttcctttttttgagggggaagctggatataaactggcagttaaaaaaattgtaaagaaatcaacttgctcattttcattgtgtatttttgctctcaagcattttgcatgaactgtgtgtggattcattgcctacattggatgatgaagacttgagtgttgctactaaggtaaagtggtctcttgtaaaattaatcttctcactctgagtgtagttttgcatagtatttacttttcaaattt

SEQ ID NO: 598583 - DNA, 652 bp, Homo sapiens
  misc_feature 630, 631, 632, 633, 634, 635, 636, 637, 638, 639, 640, 641,642, 643, 644, 645, 646, 647, 648, 649, 650, 651, 652: n = A,T,C or G
acctatcattgttttatggtggtaatggaaagctggtcagagaaaaacatacacatggctagttgattcaaaaaatgtgtttaactttggtaactaataaagattggtaagtactgtgacagggtgggagctgaaaaataaatgaactggaaaacaagtagtcacaggaaaatcacattaggaaatgctttctccaatagaggaaatatgaaatttggttaaagtttatttggataaatactactactttgacttttaaatcataygagtgtgactttcttaatatttattcctgtataaatcttcagtggatcaaattgtttgcagtaatcatggaatcctcctggtaatttttagtggcagaaatgttcagcacatagcatatagcttttgttcttggaaacttatcattttggtgtcatatagtttttaggagagattgtttctctacttatattattggttctgtagtgagactaataaaagtattaaataattgtagaaaatagctgagtttggtggtgtacacctgtagtccctgctacttgggagtttgagacagtaagattgcttgaacacaggagtttgagacagcctgggcaacattgtatctgatttaaaaatatgatnnnnnnnnnnnnnnnnnnnnnnn

SEQ ID NO: 598584 - DNA, 494 bp, Homo sapiens
tataagaaccacttcactagaaataattatatcaaaacatcatgttgtactccttaatgtaggttaagaaaactaaaatgaacgaaaaaaaatctaggaacacttgtgtttagtaaaccagttttagatttcactcttgtacatttcacccattatctaggaccaattaaacatttggcactgaggaataattcagagcaacaactcctaggggagaactagattgtctggttggtgatcaaaaagaaytaaagcatctctgaaggcaattagtccccaacactgtgaccaaggccctggaggtggggcatgttctttctgccttccacacaccgcttcaggctgaacaaggtgttattttttaaccgctttgtgaattacacttctttaaattcctgtgataattattccctatttcacaagggtgcctttctgtaacatcttgaatatgttacacaaatagtctttcttgaggcaccctctggtgataatac

SEQ ID NO: 598585 - DNA, 573 bp, Homo sapiens
gcaattagtccccaacactgtgaccaaggccctggaggtggggcatgttctttctgccttccacacaccgcttcaggctgaacaaggtgttattttttaaccgctttgtgaattacacttctttaaattcctgtgataattattccctatttcacaagggtgcctttctgtaacatcttgaatatgttacacaaatagtctttcttgaggcaccctctggtgataatactaaagatcacaatcaaaaacaattgtgcccagagtagmagtaccactttgcatttaggttgtgatccactgaaaagtaaattaaacacattaatatttctatttagggaaattctgacaagtaattttataacaaggtcacttcattgattataaagcttcaaaaatacttagtgaaaaaaactaacagatcaggttaattacatgagacttttcaggaaaaaaagccatacaaaagcaaaaaaaaaaaaaaatgagaggagagacaaaaactatctttgactaacattttaaaggtaaaattatttactaacattatttttcaaaattacattgtcaaattag

SEQ ID NO: 598586 - DNA, 502 bp, Homo sapiens
gtgataattattccctatttcacaagggtgcctttctgtaacatcttgaatatgttacacaaatagtctttcttgaggcaccctctggtgataatactaaagatcacaatcaaaaacaattgtgcccagagtagaagtaccactttgcatttaggttgtgatccactgaaaagtaaattaaacacattaatatttctatttagggaaattctgacaagtaattttataacaagrtcacttcattgattataaagcttcaaaaatacttagtgaaaaaaactaacagatcaggttaattacatgagacttttcaggaaaaaaagccatacaaaagcaaaaaaaaaaaaaaatgagaggagagacaaaaactatctttgactaacattttaaaggtaaaattatttactaacattatttttcaaaattacattgtcaaattagcattcacttccttctaatctgaagccatctcactaaaaattatgcttttgaaacaaattaa

SEQ ID NO: 598587 - DNA, 299 bp, Homo sapiens
agaagtaccactttgcatttaggttgtgatccactgaaaagtaaattaaacacattaatatttctatttagggaaattctgacaagtaattttataacaaggtcacttcattrattataaagcttcaaaaatacttagtgaaaaaaactaacagatcaggttaattacatgagacttttcaggaaaaaaagccatacaaaagcaaaaaaaaaaaaaaatgagaggagagacaaaaactatctttgactaacattttaaaggtaaaattatttactaacattatttttcaaaattacatt

SEQ ID NO: 598588 - DNA, 531 bp, Homo sapiens
aaaacaattgtgcccagagtagaagtaccactttgcatttaggttgtgatccactgaaaagtaaattaaacacattaatatttctatttagggaaattctgacaagtaattttataacaaggtcacttcattgattataaagcttcaaaaatacttagtgaaaaaaactaacagatcaggttaattacatgagacttttcaggaaaaaaagccatacaaaagcaaaaaaaaaaaaaaatgagaggagagacaaaaactatctttgactaacattttaaaggtaaaattatttactaacattatttttcaaaattacattgtcaaattagcattcacttccttctaatctgaagccatctcactaaaaattatgcttttgaaacaaattaatgagcttaattcattttctatgagtgtatgttttgacttacttagttaattttttwgacatggaactgttagctttcaatgctgctgcaaaggcttccttatattcttctaactcagttgtaacctcttcataagcagttt

SEQ ID NO: 598589 - DNA, 608 bp, Homo sapiens
ttgtcaaattagcattcacttccttctaatctgaagccatctcactaaaaattatgcttttgaaacaaattaatgagcttaattcattttctatgagtgtatgttttgacttacttagttaattttttagacatggaactgttagctttcaatgctgctgcaaaggcttccttatattcttctaactcagttgtaacctcttcataagcagttttcattttgtagaatttacawtccacatctttaagtgtgagttccttcttatttagtgaagctgtattatatccttgtttaactgctctaattgttttttatattgtgcttgttcctaaaacagaggaaaagaatacacttttaaaacaattataacctaattattatgtttgttgcctttcattttgagtcagcgattcaaagagtatttttgaatatgttaaaaaagaggatgaagtttaaaatatttcagcaatatcaaaactaataactgaattcagaattaagtctgatttgtaaaaatttgaaatcataattatgctagtattaatgtaatctggtcatataaaaagtaatagaatccattcatagtcttaaaaagtgatcaatgaaca

SEQ ID NO: 598590 - DNA, 608 bp, Homo sapiens
ttgtcaaattagcattcacttccttctaatctgaagccatctcactaaaaattatgcttttgaaacaaattaatgagcttaattcattttctatgagtgtatgttttgacttacttagttaattttttagacatggaactgttagctttcaatgctgctgcaaaggcttccttatattcttctaactcagttgtaacctcttcataagcagttttcattttgtagaatttacattccacatctttaagtgtgagttccttcttatttagtgaagctgtatkatatccttgtttaactgctctaattgttttttatattgtgcttgttcctaaaacagaggaaaagaatacacttttaaaacaattataacctaattattatgtttgttgcctttcattttgagtcagcgattcaaagagtatttttgaatatgttaaaaaagaggatgaagtttaaaatatttcagcaatatcaaaactaataactgaattcagaattaagtctgatttgtaaaaatttgaaatcataattatgctagtattaatgtaatctggtcatataaaaagtaatagaatccattcatagtcttaaaaagtgatcaatgaaca

SEQ ID NO: 598591 - DNA, 578 bp, Homo sapiens
gtatgttttgacttacttagttaattttttagacatggaactgttagctttcaatgctgctgcaaaggcttccttatattcttctaactcagttgtaacctcttcataagcagttttcattttgtagaatttacattccacatctttaagtgtgagttccttcttatttagtgaagctgtattatatccttgtttaactgctctaattgttttttatattgtgcttgttcctaaaacagaggaaaagaatacacttttaaaacaattataacctaattattatgtttgttgcctttcattttgagtcagygattcaaagagtatttttgaatatgttaaaaaagaggatgaagtttaaaatatttcagcaatatcaaaactaataactgaattcagaattaagtctgatttgtaaaaatttgaaatcataattatgctagtattaatgtaatctggtcatataaaaagtaatagaatccattcatagtcttaaaaagtgatcaatgaacactgtagcttaagaccaattcataattatcacataatttctaaatcacaattttttcctatgccaactg

SEQ ID NO: 598592 - DNA, 578 bp, Homo sapiens
gtatgttttgacttacttagttaattttttagacatggaactgttagctttcaatgctgctgcaaaggcttccttatattcttctaactcagttgtaacctcttcataagcagttttcattttgtagaatttacattccacatctttaagtgtgagttccttcttatttagtgaagctgtattatatccttgtttaactgctctaattgttttttatattgtgcttgttcctaaaacagaggaaaagaatacacttttaaaacaattataacctaattattatgtttgttgcctttcattttgagtcagcgattcaaagagtatttttgaatatgttaaaaaagaggmtgaagtttaaaatatttcagcaatatcaaaactaataactgaattcagaattaagtctgatttgtaaaaatttgaaatcataattatgctagtattaatgtaatctggtcatataaaaagtaatagaatccattcatagtcttaaaaagtgatcaatgaacactgtagcttaagaccaattcataattatcacataatttctaaatcacaattttttcctatgccaactg

SEQ ID NO: 598593 - DNA, 578 bp, Homo sapiens
gtatgttttgacttacttagttaattttttagacatggaactgttagctttcaatgctgctgcaaaggcttccttatattcttctaactcagttgtaacctcttcataagcagttttcattttgtagaatttacattccacatctttaagtgtgagttccttcttatttagtgaagctgtattatatccttgtttaactgctctaattgttttttatattgtgcttgttcctaaaacagaggaaaagaatacacttttaaaacaattataacctaattattatgtttgttgcctttcattttgagtcagcgattcaaagagtatttttgaatatgttaaaaaagaggatgaagkttaaaatatttcagcaatatcaaaactaataactgaattcagaattaagtctgatttgtaaaaatttgaaatcataattatgctagtattaatgtaatctggtcatataaaaagtaatagaatccattcatagtcttaaaaagtgatcaatgaacactgtagcttaagaccaattcataattatcacataatttctaaatcacaattttttcctatgccaactg

SEQ ID NO: 598594 - DNA, 528 bp, Homo sapiens
tagtgaagctgtattatatccttgtttaactgctctaattgttttttatattgtgcttgttcctaaaacagaggaaaagaatacacttttaaaacaattataacctaattattatgtttgttgcctttcattttgagtcagcgattcaaagagtatttttgaatatgttaaaaaagaggatgaagtttaaaatatttcagcaatatcaaaactaataactgaattcagaattaagtctgatttgtaaaaatttgaaatcataattatgctagtattaatgtaatctggtcatataaaaagtaatagaatycattcatagtcttaaaaagtgatcaatgaacactgtagcttaagaccaattcataattatcacataatttctaaatcacaattttttcctatgccaactggtcttaatcatcaaattactccataatgagaatcattactctgaaagattgattttgttataataataatggaaatttaaatatttaaaagaaaaaacagataccatttttttctaga

SEQ ID NO: 598595 - DNA, 556 bp, Homo sapiens
gatgaagtttaaaatatttcagcaatatcaaaactaataactgaattcagaattaagtctgatttgtaaaaatttgaaatcataattatgctagtattaatgtaatctggtcatataaaaagtaatagaatccattcatagtyttaaaaagtgatcaatgaacactgtagcttaagaccaattcataattatcacataatttctaaatcacaattttttcctatgccaactggtcttaatcatcaaattactccataatgagaatcattactctgaaagattgattttgttataataataatggaaatttaaatatttaaaagaaaaaacagataccatttttttctagaactctacaaagcagattgctacaagagaggcaatctctctctctctctctctctctctctatatatatatatatatatatatatatatatataatctccaaaatataatttgcagtgaaataaatgaaagcacattacaagtaaacttacctgatttaaacaactcacctgtaaatggatttcttctaatttttctactgcctgca

SEQ ID NO: 598596 - DNA, 556 bp, Homo sapiens
gatgaagtttaaaatatttcagcaatatcaaaactaataactgaattcagaattaagtctgatttgtaaaaatttgaaatcataattatgctagtattaatgtaatctggtcatataaaaagtaatagaatccattcatagtcttaaaaagtgatcaatgaacactgtagcttaagaccaattcataattatcacataatttctaaatcacaattttttcctatgccaactggtcttaatcatcaaattactccataatgagaatcattactctgaaagattgattttgttataataataatggaaatttaaatatttaaaagaaaaaacagataccatttttttctagaactctacaaagcagattgctacaagagaggyaatctctctctctctctctctctctctctatatatatatatatatatatatatatatatataatctccaaaatataatttgcagtgaaataaatgaaagcacattacaagtaaacttacctgatttaaacaactcacctgtaaatggatttcttctaatttttctactgcctgca

SEQ ID NO: 598597 - DNA, 413 bp, Homo sapiens
aatcattactctgaaagattgattttgttataataataatggaaatttaaatatttaaaagaaaaaacagataccatttttttctagaactctacaaagcagattgctacaagagaggcaatctctctctctctctctctctctctctatatatatatatatatatatatatatatatataatctccaaaatataatttgcagtgaaataaatgaaagcacattacaagtaaacttayctgatttaaacaactcacctgtaaatggatttcttctaatttttctactgcctgcattgccctttcatctagctctgatttatattcttgtagtttactaagttctaccatactgttttccatatgtgtcttaagatttaatatttcttcttccaacatctttttatcctcctca

SEQ ID NO: 598598 - DNA, 413 bp, Homo sapiens
aatcattactctgaaagattgattttgttataataataatggaaatttaaatatttaaaagaaaaaacagataccatttttttctagaactctacaaagcagattgctacaagagaggcaatctctctctctctctctctctctctctatatatatatatatatatatatatatatatataatctccaaaatataatttgcagtgaaataaatgaaagcacattacaagtaaacttacctgatttaaacaactcacctgtaaatgkatttcttctaatttttctactgcctgcattgccctttcatctagctctgatttatattcttgtagtttactaagttctaccatactgttttccatatgtgtcttaagatttaatatttcttcttccaacatctttttatcctcctca

SEQ ID NO: 598599 - DNA, 515 bp, Homo sapiens
tgccctttcatctagctctgatttatattcttgtagtttactaagttctaccatactgttttccatatgtgtcttaagatttaatatttcttcttccaacatctttttatcytcctcaagtttttcacattcctgttgtacttttttcatagataataactcctgttgaaaaacttgattctctttagccaaattgacacattttgaagatacagcttccttctccgccataagatcatcaaactgcatgaataaaatagtatagcttgataatgaagtaggctgagaataatctaatacaaaaccaatagcaaattttgaaatgcatttacttgcaataaaatgttatctgtaatgcagcagattcttcaaatgtgaacccttaaattattcagaattttaagaacaaagttaaagctaccatgagtcataaaaatatattctttactatcatcatctttgccacagaatttttgtacttcattttacttttatttttctgataattcattttt

SEQ ID NO: 598600 - DNA, 576 bp, Homo sapiens
aatatttcttcttccaacatctttttatcctcctcaagtttttcacattcctgttgtrcttttttcatagataataactcctgttgaaaaacttgattctctttagccaaattgacacattttgaagatacagcttccttctccgccataagatcatcaaactgcatgaataaaatagtatagcttgataatgaagtaggctgagaataatctaatacaaaaccaatagcaaattttgaaatgcatttacttgcaataaaatgttatctgtaatgcagcagattcttcaaatgtgaacccttaaattattcagaattttaagaacaaagttaaagctaccatgagtcataaaaatatattctttactatcatcatctttgccacagaatttttgtacttcattttacttttatttttctgataattcatttttgttcctccttaaatggcacaaagttatctcctagtaaaaagtgtctaacccccttccttcattatcattccccacagtatgtcaaaaaaagtttcagagatatcatattgagttatttaggccaaagtcaataaatgggtcta

SEQ ID NO: 598601 - DNA, 569 bp, Homo sapiens
tgattttgttataataataatggaaatttaaatatttaaaagaaaaaacagataccatttttttctagaactctacaaagcagattgctacaagagaggcaatctctctctctctctctctctctctctatatatatatatatatatatatatatatatataatctccaaaatataatttgcagtgaaataaatgaaagcacattacaagtaaacttacctgatttaaacaactcacctgtaaatggatttcttctaatttttctactgcctgcattgccctttcatctagctctgatttatattcttgtagtttactaagttctaccatactgttttccatatgtgtcttaagatttaatatttcttcttccaacatctttttatcctcctcaagtttttcacattcctgttgtacttttttcatagataataactcctgttgaaaaacttgawtctctttagccaaattgacacattttgaagatacagcttccttctccgccataagatcatcaaactgcatgaataaaatagtatagcttgataatgaagtaggctgagaataat

SEQ ID NO: 598602 - DNA, 584 bp, Homo sapiens
ataccatttttttctagaactctacaaagcagattgctacaagagaggcaatctctctctctctctctctctctctctatatatatatatatatatatatatatatatataatctccaaaatataatttgcagtgaaataaatgaaagcacattacaagtaaacttacctgatttaaacaactcacctgtaaatggatttcttctaatttttctactgcctgcattgccctttcatctagctctgatttatattcttgtagtttactaagttctaccatactgttttccatatgtgtcttaagatttaatatttcttcttccaacatctttttatcctcctcaagtttttcacattcctgttgtacttttttcatagataataactcctgttgaaaaacttgattctctttagccaaattgacacattttgaagatacagcttccttctccrccataagatcatcaaactgcatgaataaaatagtatagcttgataatgaagtaggctgagaataatctaatacaaaaccaatagcaaattttgaaatgcatttacttgcaataaaatgttatctgtaatgca

SEQ ID NO: 598603 - DNA, 569 bp, Homo sapiens
tgattttgttataataataatggaaatttaaatatttaaaagaaaaaacagataccatttttttctagaactctacaaagcagattgctacaagagaggcaatctctctctctctctctctctctctctatatatatatatatatatatatatatatatataatctccaaaatataatttgcagtgaaataaatgaaagcacattacaagtaaacttacctgatttaaacaactcacctgtaaatggatttcttctaatttttctactgcctgcattgccctttcatctagctctgatttatattcttgtagtttactaagttctaccatactgttttccatatgtgtcttaagatttaatatttcttcttccaacatctttttatcctcctcaagtttttcacattcctgttgtacttttttcatagataataactcctgttgaaaaacttgattctctttagccaaattgacacattttgaagatacagcttccttctccgccataaratcatcaaactgcatgaataaaatagtatagcttgataatgaagtaggctgagaataat

SEQ ID NO: 598604 - DNA, 515 bp, Homo sapiens
tgccctttcatctagctctgatttatattcttgtagtttactaagttctaccatactgttttccatatgtgtcttaagatttaatatttcttcttccaacatctttttatcctcctcaagtttttcacattcctgttgtacttttttcatagataataactcctgttgaaaaacttgattctctttagccaaattgacacattttgaagatacagcttccttctccgccataagatcatcaaactgcawgaataaaatagtatagcttgataatgaagtaggctgagaataatctaatacaaaaccaatagcaaattttgaaatgcatttacttgcaataaaatgttatctgtaatgcagcagattcttcaaatgtgaacccttaaattattcagaattttaagaacaaagttaaagctaccatgagtcataaaaatatattctttactatcatcatctttgccacagaatttttgtacttcattttacttttatttttctgataattcattttt

SEQ ID NO: 598605 - DNA, 515 bp, Homo sapiens
tgccctttcatctagctctgatttatattcttgtagtttactaagttctaccatactgttttccatatgtgtcttaagatttaatatttcttcttccaacatctttttatcctcctcaagtttttcacattcctgttgtacttttttcatagataataactcctgttgaaaaacttgattctctttagccaaattgacacattttgaagatacagcttccttctccgccataagatcatcaaactgcatgaataaaatagtatarcttgataatgaagtaggctgagaataatctaatacaaaaccaatagcaaattttgaaatgcatttacttgcaataaaatgttatctgtaatgcagcagattcttcaaatgtgaacccttaaattattcagaattttaagaacaaagttaaagctaccatgagtcataaaaatatattctttactatcatcatctttgccacagaatttttgtacttcattttacttttatttttctgataattcattttt

SEQ ID NO: 598606 - DNA, 542 bp, Homo sapiens
cattgccctttcatctagctctgatttatattcttgtagtttactaagttctaccatactgttttccatatgtgtcttaagatttaatatttcttcttccaacatctttttatcctcctcaagtttttcacattcctgttgtacttttttcatagataataactcctgttgaaaaacttgattctctttagccaaattgacacattttgaagatacagcttccttctccgccataagatcatcaaactgcatgaataaaatagtatagcttgataatkaagtaggctgagaataatctaatacaaaaccaatagcaaattttgaaatgcatttacttgcaataaaatgttatctgtaatgcagcagattcttcaaatgtgaacccttaaattattcagaattttaagaacaaagttaaagctaccatgagtcataaaaatatattctttactatcatcatctttgccacagaatttttgtacttcattttacttttatttttctgataattcatttttgttcctccttaaatggcacaaagt

SEQ ID NO: 598607 - DNA, 542 bp, Homo sapiens
cattgccctttcatctagctctgatttatattcttgtagtttactaagttctaccatactgttttccatatgtgtcttaagatttaatatttcttcttccaacatctttttatcctcctcaagtttttcacattcctgttgtacttttttcatagataataactcctgttgaaaaacttgattctctttagccaaattgacacattttgaagatacagcttccttctccgccataagatcatcaaactgcatgaataaaatagtatagcttgataatgaagtaggctgagaataatckaatacaaaaccaatagcaaattttgaaatgcatttacttgcaataaaatgttatctgtaatgcagcagattcttcaaatgtgaacccttaaattattcagaattttaagaacaaagttaaagctaccatgagtcataaaaatatattctttactatcatcatctttgccacagaatttttgtacttcattttacttttatttttctgataattcatttttgttcctccttaaatggcacaaagt

SEQ ID NO: 598608 - DNA, 542 bp, Homo sapiens
cattgccctttcatctagctctgatttatattcttgtagtttactaagttctaccatactgttttccatatgtgtcttaagatttaatatttcttcttccaacatctttttatcctcctcaagtttttcacattcctgttgtacttttttcatagataataactcctgttgaaaaacttgattctctttagccaaattgacacattttgaagatacagcttccttctccgccataagatcatcaaactgcatgaataaaatagtatagcttgataatgaagtaggctgagaataatctaatacaaaaccaatagcaaattttgaaatgcatttayttgcaataaaatgttatctgtaatgcagcagattcttcaaatgtgaacccttaaattattcagaattttaagaacaaagttaaagctaccatgagtcataaaaatatattctttactatcatcatctttgccacagaatttttgtacttcattttacttttatttttctgataattcatttttgttcctccttaaatggcacaaagt

SEQ ID NO: 598609 - DNA, 576 bp, Homo sapiens
aatatttcttcttccaacatctttttatcctcctcaagtttttcacattcctgttgtacttttttcatagataataactcctgttgaaaaacttgattctctttagccaaattgacacattttgaagatacagcttccttctccgccataagatcatcaaactgcatgaataaaatagtatagcttgataatgaagtaggctgagaataatctaatacaaaaccaatagcaaattttgaaatgcatttacttgcaataaaatgttatctgtaatgcagcagattcttcaaatgtgaaccctkaaattattcagaattttaagaacaaagttaaagctaccatgagtcataaaaatatattctttactatcatcatctttgccacagaatttttgtacttcattttacttttatttttctgataattcatttttgttcctccttaaatggcacaaagttatctcctagtaaaaagtgtctaacccccttccttcattatcattccccacagtatgtcaaaaaaagtttcagagatatcatattgagttatttaggccaaagtcaataaatgggtcta

SEQ ID NO: 598610 - DNA, 576 bp, Homo sapiens
aatatttcttcttccaacatctttttatcctcctcaagtttttcacattcctgttgtacttttttcatagataataactcctgttgaaaaacttgattctctttagccaaattgacacattttgaagatacagcttccttctccgccataagatcatcaaactgcatgaataaaatagtatagcttgataatgaagtaggctgagaataatctaatacaaaaccaatagcaaattttgaaatgcatttacttgcaataaaatgttatctgtaatgcagcagattcttcaaatgtgaacccttaaattaytcagaattttaagaacaaagttaaagctaccatgagtcataaaaatatattctttactatcatcatctttgccacagaatttttgtacttcattttacttttatttttctgataattcatttttgttcctccttaaatggcacaaagttatctcctagtaaaaagtgtctaacccccttccttcattatcattccccacagtatgtcaaaaaaagtttcagagatatcatattgagttatttaggccaaagtcaataaatgggtcta

SEQ ID NO: 598611 - DNA, 479 bp, Homo sapiens
tctagaatttttatagttcaggaattagatttaagttcttaatccatcttgagtagatttttgtataagatgagagatgagaatccakttttattcccctacatgtggctcgccaattatcccaacatcatgtgttgaaaagggggtcctttccccactttatgtttttgtttactttgtcgaagatcagttggctgtaagtatttgggttaatttctgggttctctcttctgttccattggtctatgttcctatttttaaaccagtacgttggtgttttggtaactatggccttattgtacagtttgaaatcaagtagtgtgatacctccaagttctttttgcttaggcttggtttggttacatggctcttttttggttccatattaattttagaattctttttgtaattctgtgaagaatgatggtggcattcagatggggattgcattgaatttgtagactgcctttaacagaatg

SEQ ID NO: 598612 - DNA, 324 bp, Homo sapiens
tggttgtttcataggaatagtgttgaatgtctagtttgcttttggcagtatagccattttaacaatattgatctttctaatccatgarcatggaatggttttccatttgtttcgagatctatgatttctttctgcagtgttttgtagttctccttttagatatcctttacctccttggttagacatattcttcctttattttattttattttgggggttgctgttgtaaacaggattgcactcttgatttacctttcagtttaaacatttttggtgaacagaaatgctacttctttttatatgttgtttttttttatcctgaaa

SEQ ID NO: 598613 - DNA, 447 bp, Homo sapiens
cctgcttgctctggctaggacttgttaaacaggagtggggagaacaggyatccctattttattcctgttcataaggggaatgtgttgggagaaaagctgagtgttggaagagaagctgaggcagggccatatgtttctcattcacttgatacaccatttcctttcaacccccacatcctcaccacctgtttctttgtttaagcaccaacaaatagcgtgggctcccagagcttggggactttgcagactccatactcgtgatggtctcctggtcccactttctctctcaaactgtctttttctcattcctttgactctgccggacttcatcacccccatgacctagtgttgggtctgatcaccccaacattcctggcgcccaacatggggtgacaaagacctggtgaaggaaggctagagcatatgaaagcagaggacacatcatca

SEQ ID NO: 598614 - DNA, 447 bp, Homo sapiens
cctgcttgctctggctaggacttgttaaacaggagtggggagaacaggtatccctattttattcctgttcataaggggaatgtgttgggagaaaagctgagtgttggaagagaagctgaggcagggccatatgtttctcattcacttgatacaccatttcctttyaacccccacatcctcaccacctgtttctttgtttaagcaccaacaaatagcgtgggctcccagagcttggggactttgcagactccatactcgtgatggtctcctggtcccactttctctctcaaactgtctttttctcattcctttgactctgccggacttcatcacccccatgacctagtgttgggtctgatcaccccaacattcctggcgcccaacatggggtgacaaagacctggtgaaggaaggctagagcatatgaaagcagaggacacatcatca

SEQ ID NO: 598615 - DNA, 447 bp, Homo sapiens
cctgcttgctctggctaggacttgttaaacaggagtggggagaacaggtatccctattttattcctgttcataaggggaatgtgttgggagaaaagctgagtgttggaagagaagctgaggcagggccatatgtttctcattcacttgatacaccatttcctttcaacccccacatcctcaccacctgtttctttgtttragcaccaacaaatagcgtgggctcccagagcttggggactttgcagactccatactcgtgatggtctcctggtcccactttctctctcaaactgtctttttctcattcctttgactctgccggacttcatcacccccatgacctagtgttgggtctgatcaccccaacattcctggcgcccaacatggggtgacaaagacctggtgaaggaaggctagagcatatgaaagcagaggacacatcatca

SEQ ID NO: 598616 - DNA, 447 bp, Homo sapiens
cctgcttgctctggctaggacttgttaaacaggagtggggagaacaggtatccctattttattcctgttcataaggggaatgtgttgggagaaaagctgagtgttggaagagaagctgaggcagggccatatgtttctcattcacttgatacaccatttcctttcaacccccacatcctcaccacctgtttctttgtttaagcaccaacaaatagcgtgggctcccagagcttggggactttgcagactccayactcgtgatggtctcctggtcccactttctctctcaaactgtctttttctcattcctttgactctgccggacttcatcacccccatgacctagtgttgggtctgatcaccccaacattcctggcgcccaacatggggtgacaaagacctggtgaaggaaggctagagcatatgaaagcagaggacacatcatca

SEQ ID NO: 598617 - DNA, 611 bp, Homo sapiens
attcctttgactctgccggacttcatcacccccatgacctagtgttgggtctgatcaccccaacattcctggcgcccaacatrgggtgacaaagacctggtgaaggaaggctagagcatatgaaagcagaggacacatcatcaaaagacacccgaggacatacaaagatggggagtgaaagttagtacttagaatttgttattactctttagtacagtaaagcagttttgcccatcgtttccagaacaaaggactatgaagttggatgaatgggagagaattggaagagatttttaataggcatataaagatggagcagaaattccagtttatatatggtcagtgtgggcactaataaaggcagcccttgagccatttcaaacagatgatgaggcagattcagatgaggaagaggaggatgagtgtaaaaaactaacttcaaattctgagtgtgaggagcagctaccggaggagattaaagaaaagaaagaaaaactttaaaaagtatgttttactagcccgttggctccacctgctgaattaagtgaatggccacctcctctctctcccctaaatgggtgagaaaataaattagctgaaaaacttactgc

SEQ ID NO: 598618 - DNA, 611 bp, Homo sapiens
attcctttgactctgccggacttcatcacccccatgacctagtgttgggtctgatcaccccaacattcctggcgcccaacatggggtgacaaagaccyggtgaaggaaggctagagcatatgaaagcagaggacacatcatcaaaagacacccgaggacatacaaagatggggagtgaaagttagtacttagaatttgttattactctttagtacagtaaagcagttttgcccatcgtttccagaacaaaggactatgaagttggatgaatgggagagaattggaagagatttttaataggcatataaagatggagcagaaattccagtttatatatggtcagtgtgggcactaataaaggcagcccttgagccatttcaaacagatgatgaggcagattcagatgaggaagaggaggatgagtgtaaaaaactaacttcaaattctgagtgtgaggagcagctaccggaggagattaaagaaaagaaagaaaaactttaaaaagtatgttttactagcccgttggctccacctgctgaattaagtgaatggccacctcctctctctcccctaaatgggtgagaaaataaattagctgaaaaacttactgc

SEQ ID NO: 598619 - DNA, 611 bp, Homo sapiens
attcctttgactctgccggacttcatcacccccatgacctagtgttgggtctgatcaccccaacattcctggcgcccaacatggggtgacaaagacctggtgaaggaaggctagagcatatgaaagcagaggacacatcatcaaaagacacccgaggacatacaaagatggggagtgaaagttagtacttagaatttgttattactctttagtacagtaaagcagttttgcccatsgtttccagaacaaaggactatgaagttggatgaatgggagagaattggaagagatttttaataggcatataaagatggagcagaaattccagtttatatatggtcagtgtgggcactaataaaggcagcccttgagccatttcaaacagatgatgaggcagattcagatgaggaagaggaggatgagtgtaaaaaactaacttcaaattctgagtgtgaggagcagctaccggaggagattaaagaaaagaaagaaaaactttaaaaagtatgttttactagcccgttggctccacctgctgaattaagtgaatggccacctcctctctctcccctaaatgggtgagaaaataaattagctgaaaaacttactgc

SEQ ID NO: 598620 - DNA, 611 bp, Homo sapiens
attcctttgactctgccggacttcatcacccccatgacctagtgttgggtctgatcaccccaacattcctggcgcccaacatggggtgacaaagacctggtgaaggaaggctagagcatatgaaagcagaggacacatcatcaaaagacacccgaggacatacaaagatggggagtgaaagttagtacttagaatttgttattactctttagtacagtaaagcagttttgcccatcgtttccagaacaaaggactatgmagttggatgaatgggagagaattggaagagatttttaataggcatataaagatggagcagaaattccagtttatatatggtcagtgtgggcactaataaaggcagcccttgagccatttcaaacagatgatgaggcagattcagatgaggaagaggaggatgagtgtaaaaaactaacttcaaattctgagtgtgaggagcagctaccggaggagattaaagaaaagaaagaaaaactttaaaaagtatgttttactagcccgttggctccacctgctgaattaagtgaatggccacctcctctctctcccctaaatgggtgagaaaataaattagctgaaaaacttactgc

SEQ ID NO: 598621 - DNA, 538 bp, Homo sapiens
atttgttattactctttagtacagtaaagcagttttgcccatcgtttccagaacaaaggactatgaagttggatgaatgggagagaattggaagagatttttaawaggcatataaagatggagcagaaattccagtttatatatggtcagtgtgggcactaataaaggcagcccttgagccatttcaaacagatgatgaggcagattcagatgaggaagaggaggatgagtgtaaaaaactaacttcaaattctgagtgtgaggagcagctaccggaggagattaaagaaaagaaagaaaaactttaaaaagtatgttttactagcccgttggctccacctgctgaattaagtgaatggccacctcctctctctcccctaaatgggtgagaaaataaattagctgaaaaacttactgctcctgtagttacaacattaaaacctggagcagttggtggtgctagacaaaattctattcaaaaagctaaagccaagggagaccttgaagcatggcaatttcccgttactataatccagca

SEQ ID NO: 598622 - DNA, 538 bp, Homo sapiens
atttgttattactctttagtacagtaaagcagttttgcccatcgtttccagaacaaaggactatgaagttggatgaatgggagagaattggaagagatttttaataggcatataaagatggagcagaaattccagtttatatatggtcagtgtgggcactaataaaggcagcccttgagccatttcaaacagatgatgaggcagattcagatgaggaagaggaggatgagtgtaaaaaactaacttcaaattctgagtgtgaggagcagctaccggaggagattaaagaaaagaaagaaaaactttaaaaagtrtgttttactagcccgttggctccacctgctgaattaagtgaatggccacctcctctctctcccctaaatgggtgagaaaataaattagctgaaaaacttactgctcctgtagttacaacattaaaacctggagcagttggtggtgctagacaaaattctattcaaaaagctaaagccaagggagaccttgaagcatggcaatttcccgttactataatccagca

SEQ ID NO: 598623 - DNA, 538 bp, Homo sapiens
atttgttattactctttagtacagtaaagcagttttgcccatcgtttccagaacaaaggactatgaagttggatgaatgggagagaattggaagagatttttaataggcatataaagatggagcagaaattccagtttatatatggtcagtgtgggcactaataaaggcagcccttgagccatttcaaacagatgatgaggcagattcagatgaggaagaggaggatgagtgtaaaaaactaacttcaaattctgagtgtgaggagcagctaccggaggagattaaagaaaagaaagaaaaactttaaaaagtatgttttactagcccgttggctccacctgctgaattaagtgaatggccacctcctctctctcccctaaatgggtgagaaaataaattagctgaaaaacttactgctcctgtagttacaacattaaaacctggagcarttggtggtgctagacaaaattctattcaaaaagctaaagccaagggagaccttgaagcatggcaatttcccgttactataatccagca

SEQ ID NO: 598624 - DNA, 479 bp, Homo sapiens
tctagaatttttatagttcaggaattagatttaagttcttaatccatcttgagtagatttttgtataagatgagagatgagaatccatttttattcccctacatgtggctcgccaattatcccaacatcatgtgttgaaaagggggtcctttccccactttatgtttttgtttactttgtcgaagatcagttggctgtaagtatttgggttaatttctgggttctctcttctgttccattggtctatgttcctatttttaaaccagtacgttggtgttttggtaactatggccttattgtacagtttgaaatcaagtagtgtgatacctccaagttctttttgcttaggcttggtttggttacatggctcttttttggttccatattaattttagaattstttttgtaattctgtgaagaatgatggtggcattcagatggggattgcattgaatttgtagactgcctttaacagaatg

SEQ ID NO: 598625 - DNA, 652 bp, Homo sapiens
gaattccagaacactgctgggagggtctgaatgtatgtctctcctatgggattccagaacactgctccaagggtctaaatatctctccctcacataaaattccagcacacggctaygaagttctgaatgtttgtccctcacataggattccagagcccccttgctgtggtctgaacgtttgtccctcacataggatttcaaaacactgctacgaaagtctgaatctttgtccctcacatgggactccagaacactcctactggggtctcaatgtttgtccctcacataggattcctgaacactgctacaagggtctgaacgtttgtccttcacaaaggattccagaacactccttctgtggtctgaatatttgtccctcacatagtatttcagaacactcctgctgtgttctgaatgtttgtccatcacataggactccagaacactcctgctgtgctgtgaaattttgtccctcacatagcattcaagaacactgctatgagggtctgaatgtttgcacctcacatgggattccaggacactcctgttgtggtctgaatgtttgtacctcgcataggattccagaacactcttgctgtggtctgaatgtttgttcatcacataggatttcagaacactcctacgagggtct

SEQ ID NO: 598626 - DNA, 542 bp, Homo sapiens
accttgggactggtaaaaacaggcgttgacctctgtttttagatgtacagtctaatgccctactcagtcattttacccttttttctcacttcatttatgttggctgacagttgactaatctcaaccaaccataaagatatcgggacattatatttattatttgkcacatgagcagggatagtcagtacagctttaagccttattcgagctgaactctactagatgatcaaatttatgtcattgttatagcctatgcatttgtcataattttctttatagtaatactataattggaggtcttggcaactgattagtcccccgataattggcgcccctgatatagcatttctctgcataaataatatgagcttctgactcctcccaccctccttcctattattacttgcatccactatagtagaagccggcactggaaccggctgaacagtctctcctcccttagcaggaaacctaacacatgcaggcgcctctgtaggtttcactatcttttcactccacttgacaggtgtttcttctacttc

SEQ ID NO: 598627 - DNA, 542 bp, Homo sapiens
accttgggactggtaaaaacaggcgttgacctctgtttttagatgtacagtctaatgccctactcagtcattttacccttttttctcacttcatttatgttggctgacagttgactaatctcaaccaaccataaagatatcgggacattatatttattatttgtcacatgagcagggatagtcagtacagctttaagccttattcgagctgaactctactagatgatcaaatttatgtcattgttatagcctatgcatttgtcataattttctttatagtaatactataattggaggtcttggcaactgattagtcccccgataattggcgccccygatatagcatttctctgcataaataatatgagcttctgactcctcccaccctccttcctattattacttgcatccactatagtagaagccggcactggaaccggctgaacagtctctcctcccttagcaggaaacctaacacatgcaggcgcctctgtaggtttcactatcttttcactccacttgacaggtgtttcttctacttc

SEQ ID NO: 598628 - DNA, 326 bp, Homo sapiens
ctggtcaatatggtgaaaccctgtctctactaaaaatgcaaacattagctgggtgtaatggtgggtgcttgtagtctcagctactcaggaggctgaggcaggagaatcacttgaacccgggaggtggaggttgcagtgagtggagatgrcaccaagacactccagcctgggtgacagagtgagacactgcctcaaaaaaaagaaaaaaaaatgttggtatgaaccacagctaaactataatcaattagaaagtaagccagaccatctcaaagtatatcatcacttatcaggcaataacatgcaatttctaaaacctaacttaaatg

SEQ ID NO: 598629 - DNA, 326 bp, Homo sapiens
ctggtcaatatggtgaaaccctgtctctactaaaaatgcaaacattagctgggtgtaatggtgggtgcttgtagtctcagctactcaggaggctgaggcaggagaatcacttgaacccgggaggtggaggttgcagtgagtggagatgacaccaagacactccagcctgggtgacagagtgagacactgcctcaaaaaaaagaaaaaaaaatgttggtatgaaccacagctaaactataatcaattagaragtaagccagaccatctcaaagtatatcatcacttatcaggcaataacatgcaatttctaaaacctaacttaaatg

SEQ ID NO: 598630 - DNA, 530 bp, Homo sapiens
agctaaactataatcaattagaaagtaagccagaccatctcaaagtatatcatcacttatcaggcaataacatgcaatttctaaaacctaacttaaatgcagcttttaaagacatttcaaacatgtcagtttagtcacatttattgaataaagttagcaaatggatatctcttgaaaatgagagctccagggaattaaaaaatgtaaagttcccatttcctttctgtgttaacacagctaattrtgatctttacttcacatacaaaagtcaacagaacaactcagtatttcaccaaattataaacaagaattacgctagagaaatgaaaccctaaagagaaacggtcatataactaacctcagtcaaatagttctggcagttatttgaagtctgaggtttgaagtaggaattcttacgggcatttggagaatatattttctgttgagtcctatactagtaagattttcaacacaaggtgactctcgacctcgccttgtaggaagagtgctgagaaaatatttcacctgct

SEQ ID NO: 598631 - DNA, 530 bp, Homo sapiens
agctaaactataatcaattagaaagtaagccagaccatctcaaagtatatcatcacttatcaggcaataacatgcaatttctaaaacctaacttaaatgcagcttttaaagacatttcaaacatgtcagtttagtcacatttattgaataaagttagcaaatggatatctcttgaaaatgagagctccagggaattaaaaaatgtaaagttcccatttcctttctgtgttaacacagctaattgtgatctttacttcacatrcaaaagtcaacagaacaactcagtatttcaccaaattataaacaagaattacgctagagaaatgaaaccctaaagagaaacggtcatataactaacctcagtcaaatagttctggcagttatttgaagtctgaggtttgaagtaggaattcttacgggcatttggagaatatattttctgttgagtcctatactagtaagattttcaacacaaggtgactctcgacctcgccttgtaggaagagtgctgagaaaatatttcacctgct

SEQ ID NO: 598632 - DNA, 585 bp, Homo sapiens
gcttttaaagacatttcaaacatgtcagtttagtcacatttattgaataaagttagcaaatggatatctcttgaaaatgagagctccagggaattaaaaaatgtaaagttcccatttcctttctgtgttaacacagctaattgtgatctttacttcacatacaaaagtcaacagaacaactcagtatttcaccaaattataaacaagaattacgctagagaaatgaaaccctaaagagaaacggtcatataactaacctcagtcaartagttctggcagttatttgaagtctgaggtttgaagtaggaattcttacgggcatttggagaatatattttctgttgagtcctatactagtaagattttcaacacaaggtgactctcgacctcgccttgtaggaagagtgctgagaaaatatttcacctgctctttctccataaagagctgatactgatcattgctattttcttattcgatctgtaaaggtagcaaagacaaatgcttaatatttcattttttcttaaatgattcttaatgacttgcaggttttaaaaacttaccctgggaggaaaccacattaccca

SEQ ID NO: 598633 - DNA, 585 bp, Homo sapiens
gcttttaaagacatttcaaacatgtcagtttagtcacatttattgaataaagttagcaaatggatatctcttgaaaatgagagctccagggaattaaaaaatgtaaagttcccatttcctttctgtgttaacacagctaattgtgatctttacttcacatacaaaagtcaacagaacaactcagtatttcaccaaattataaacaagaattacgctagagaaatgaaaccctaaagagaaacggtcatataactaacctcagtcaaatagttctggcagttatttgaagtctgaggtttgaagtaggaattcttacgggcatttggrgaatatattttctgttgagtcctatactagtaagattttcaacacaaggtgactctcgacctcgccttgtaggaagagtgctgagaaaatatttcacctgctctttctccataaagagctgatactgatcattgctattttcttattcgatctgtaaaggtagcaaagacaaatgcttaatatttcattttttcttaaatgattcttaatgacttgcaggttttaaaaacttaccctgggaggaaaccacattaccca

SEQ ID NO: 598634 - DNA, 556 bp, Homo sapiens
tctagtttctccacctccttagcaacattgattttctgtgtcgttgttatgaaagccttactagtggatgcaaagtggcatctcatttgggttttrccttgcattttattaatgaataatggtgtttagcatcttttcttttccttcttagacatttgtgtatcttctttggagaaatgtctgttcaagtcctttgcctattttttaattgggatcttagaaattctgttgttgagttgtgggatattaagcttttatcagatacacattttgattttatcagatacatattttctcacatattatgggttgtcttttcactcccttgatagtatcctttgatgcataaagggttttttattttgattcaatctaattttcctgtattttcttttgttatctgtgcttttctgtcacatttcaaaatacacttaaaactcaaaggtcataaaggtttaccgtgtgttttcttctaagagttacatatttttagttcttacatttaagtcttttataatttagaattaatttttgtatatactgcaaggtaggggtc

SEQ ID NO: 598635 - DNA, 556 bp, Homo sapiens
tctagtttctccacctccttagcaacattgattttctgtgtcgttgttatgaaagccttactagtggatgcaaagtggcatctcatttgggttttgccttgcattttattaatgaataatggtgtttagcatcttttcttttccttcttagacatttgtgtatcttctttggagaaatgtctgttcaagtcctttgmctattttttaattgggatcttagaaattctgttgttgagttgtgggatattaagcttttatcagatacacattttgattttatcagatacatattttctcacatattatgggttgtcttttcactcccttgatagtatcctttgatgcataaagggttttttattttgattcaatctaattttcctgtattttcttttgttatctgtgcttttctgtcacatttcaaaatacacttaaaactcaaaggtcataaaggtttaccgtgtgttttcttctaagagttacatatttttagttcttacatttaagtcttttataatttagaattaatttttgtatatactgcaaggtaggggtc

SEQ ID NO: 598636 - DNA, 556 bp, Homo sapiens
tctagtttctccacctccttagcaacattgattttctgtgtcgttgttatgaaagccttactagtggatgcaaagtggcatctcatttgggttttgccttgcattttattaatgaataatggtgtttagcatcttttcttttccttcttagacatttgtgtatcttctttggagaaatgtctgttcaagtcctttgcctattttttaattgggatcttagaaattctgttgttgagytgtgggatattaagcttttatcagatacacattttgattttatcagatacatattttctcacatattatgggttgtcttttcactcccttgatagtatcctttgatgcataaagggttttttattttgattcaatctaattttcctgtattttcttttgttatctgtgcttttctgtcacatttcaaaatacacttaaaactcaaaggtcataaaggtttaccgtgtgttttcttctaagagttacatatttttagttcttacatttaagtcttttataatttagaattaatttttgtatatactgcaaggtaggggtc

SEQ ID NO: 598637 - DNA, 543 bp, Homo sapiens
ctccttagcaacattgattttctgtgtcgttgttatgaaagccttactagtggatgcaaagtggcatctcatttgggttttgccttgcattttattaatgaataatggtgtttagcatcttttcttttccttcttagacatttgtgtatcttctttggagaaatgtctgttcaagtcctttgcctattttttaattgggatcttagaaattctgttgttgagttgtgggatattaagcttttatcagatacacattttgattttatcagatacatattttctcacatattatgggttgtcttttcactcccttgatagtatcctttgatgcataaagggttttttattttgattmaatctaattttcctgtattttcttttgttatctgtgcttttctgtcacatttcaaaatacacttaaaactcaaaggtcataaaggtttaccgtgtgttttcttctaagagttacatatttttagttcttacatttaagtcttttataatttagaattaatttttgtatatactgcaaggtaggggtct

SEQ ID NO: 598638 - DNA, 543 bp, Homo sapiens
ctccttagcaacattgattttctgtgtcgttgttatgaaagccttactagtggatgcaaagtggcatctcatttgggttttgccttgcattttattaatgaataatggtgtttagcatcttttcttttccttcttagacatttgtgtatcttctttggagaaatgtctgttcaagtcctttgcctattttttaattgggatcttagaaattctgttgttgagttgtgggatattaagcttttatcagatacacattttgattttatcagatacatattttctcacatattatgggttgtcttttcactcccttgatagtatcctttgatgcataaagggttttttattttgattcaatctaattttcstgtattttcttttgttatctgtgcttttctgtcacatttcaaaatacacttaaaactcaaaggtcataaaggtttaccgtgtgttttcttctaagagttacatatttttagttcttacatttaagtcttttataatttagaattaatttttgtatatactgcaaggtaggggtct

SEQ ID NO: 598639 - DNA, 543 bp, Homo sapiens
ctccttagcaacattgattttctgtgtcgttgttatgaaagccttactagtggatgcaaagtggcatctcatttgggttttgccttgcattttattaatgaataatggtgtttagcatcttttcttttccttcttagacatttgtgtatcttctttggagaaatgtctgttcaagtcctttgcctattttttaattgggatcttagaaattctgttgttgagttgtgggatattaagcttttatcagatacacattttgattttatcagatacatattttctcacatattatgggttgtcttttcactcccttgatagtatcctttgatgcataaagggttttttattttgattcaatctaattttcctgtattttcttttgttatctgtgcttttctgtcayatttcaaaatacacttaaaactcaaaggtcataaaggtttaccgtgtgttttcttctaagagttacatatttttagttcttacatttaagtcttttataatttagaattaatttttgtatatactgcaaggtaggggtct

SEQ ID NO: 598640 - DNA, 619 bp, Homo sapiens
tgtgtatcttctttggagaaatgtctgttcaagtcctttgcctattttttaattgggatcttagaaattctgttgttgagttgtgggatattaagcttttatcagatacacattttgattttatcagatacatattttctcacatattatgggttgtcttttcactcccttgatagtatcctttgatgcataaagggttttttattttgattcaatctaattttcctgtattttcttttgttatctgtgcttttctgtcacatttcaaaatacacttaaaactcaaaggtcataaaggtttaccgtgtgttttcttctaagagttacatatttttagtycttacatttaagtcttttataatttagaattaatttttgtatatactgcaaggtaggggtctaacttctctcttgtgcactgacatccagctgttgaagagactgttctttcctcccttgactagacttggccaccttgttgaacagtcattgaccatatatgtgaggactaacttgtaggatctcaaatctgttctgttgtattggtctgaaagtctattggtcttattccagtaccacactctcttgattactgtagatttgtagtaggctctgaaac

SEQ ID NO: 598641 - DNA, 623 bp, Homo sapiens
tgtcttacaacccgtgaacacagaatgtctttccacttatttccactctctttagttttttgcagcaatgttttgtgtataccaccatggttagatttatgcctgaataacgtattctttgatgtcattataaatggaatttttaaaatgttttcatagttctttacaactatatagaaatatagctcatttgcctatgtttgtttgcatcctgcctcttttattagttataatcggttttgtgttttgtttggagctttataccyataagatcatgtgtagatataattttacacctattttttaatttctgatttagatgccttttatttctttgtcttgcctaattgctctggctagaactgccagtgctacgttgaatacaagtggcaaatgcaccatccttttcttctagatgttaggaaaacagctttcagtgtttcatcattgatcatgatattaactgttgggtttttgtacatcccattgtcatgttgcagaagatcccttctatgcctagtttattgagtatttttattatagaagggtgttgtatttcatcaatgttttctctgcatcaattgaaataatcacgtgcttattcattttactgttacagcata

SEQ ID NO: 598642 - DNA, 455 bp, Homo sapiens
gctctggctagaactgccagtgctacgttgaatacaagtggcaaatgcaccatccttttcttctagatgttaggaaaacagctttcagtgtttcatcattgatcatgatattaactgttgggtttttgtacatcccattgtcatgttgcagaagatcccttctatgcctagtttattgagtatttttattatagaagggtgttgtatttcatcaatgttttctctgcatcaattgaaataatcacgtgcttattcattttactgttacagcatattacactgattgattttttatatgttgaaccacccttgcattttggggataaatctcaaagggtgatagtttacaatcctttgattatacartattgctgctagtattttgctagtattgctagtattttgctgagatttttgcttatatattcataagggatatagtggtgtatttctct

SEQ ID NO: 598643 - DNA, 577 bp, Homo sapiens
attttacacctattttttaatttctgatttagatgccttttatttctttgtcttgcctaattgctctggctagaactgccagtgctacgttgaatacaagtggcaaatgcaccatccttttcttctagatgttaggaaaacagctttcagtgtttcatcattgatcatgatattaactgttgggtttttgtacatcccattgtcatgttgcagaagatcccttctatgcctagtttattgagtatttttattatagaagggtgttgtatttcatcaatgttttctctgcatcaattgaaataatcacgtgcttattcattttactgttacagcatattacactgattgattttttatatgttgaaccacccttgcattttggggataaatctcaaagggtgatagtttacaatcctttgattatacaatattgctgctagtattttgctagtattgctagtattttgctgagatttttgcttatatattcataagggatatagtgstgtatttctctcttttgtgctctctttgtctttggtataagaataatgctgttatcaaaaaatgaattagc

SEQ ID NO: 598644 - DNA, 520 bp, Homo sapiens
ttttgtcagaagagtttgagaagaaatggtattaattcttctttaaatgttaggttgactcaccagttaatgcagctatttggtcataaatgcttctttgttaatcactttcgattactaattcaatctcctaggttataggtctattcagattttctctttcttcttgagccactttggtagtttgtgtctttctagcgattcatccatttcatccaggacacctaatttgttgctagacagttgttcacagtatactcctgtaatccttttgtatttctgtaaagttggtagtaatggctctgctttcatttattattttaataattagtctcccatcttttgctcagtcaatatagtgaaaggcttgatctttcaaagaatctacatattttcattctactgctctccaaccttctattttattgatttatgctctaattatgctctttattatttctttccttctgctagctttggatttrgtcttccacctggatttattttgggagtgatattg

SEQ ID NO: 598645 - DNA, 462 bp, Homo sapiens
ccaagttttatttttttctctgacccaaaaaacaatttggcagccggtgagaaactctcacagctctggatgtgagtttaggacactgcatttctaccattcaatktcttactacttttttgcacagggatcatggcacaagttgcagtttccaccctgcccatggaagatgaggagtccatggaagatgaggagtccattgaagatgaggagtctgttgaagatgattccgtggagagcaggatggtggtgacatttctcatatcagctcccgagtccacggtgagaccttctgttctaacatgatataattgggtagaactgggtggtagataaggttgatttgtttttgtagaacttataattttatgatttgtagttctaatgagtagatctttttctggaatagtagttatggtcaaacacttctaaccaaatgtgccatgttgtccagtctggtct

SEQ ID NO: 598646 - DNA, 462 bp, Homo sapiens
ccaagttttatttttttctctgacccaaaaaacaatttggcagccggtgagaaactctcacagctctggatgtgagtttaggacactgcatttctaccattcaatgtcttactacttttttgcacagggatcatggcacaagttgcagtttccaccctgcccatggaagatgaggagtccatggaagatgaggagtccattgaagatgaggagtctgttgaagatgattccgtggagagcaggatggtggtgacatttctcatatcagctcycgagtccacggtgagaccttctgttctaacatgatataattgggtagaactgggtggtagataaggttgatttgtttttgtagaacttataattttatgatttgtagttctaatgagtagatctttttctggaatagtagttatggtcaaacacttctaaccaaatgtgccatgttgtccagtctggtct

SEQ ID NO: 598647 - DNA, 430 bp, Homo sapiens
gctcaagagacctgcccaccttggcctcccaaaatactgggattacaggtgtaagccgctgaatctggccagatatttttctttttatggctgaataatactctgtgtatgtatatattacattttctttatctattcacctactgatgggcattaggtttgggctaccttttggccactgtgaataatgctgctgttaatcgggtgtacaaatacctgtttgagtccctgctctcagttcttttgggtatataygcttaaagggtgtggatggatcatataattctatgcttcatatttttaaggagctgctaaaccattttccacagtgggctgtaccattttacattccaaaaagcaatgcatacagcttccaatttctctatagcattgctgacagttaatattttctgtttatgtattgtatttt

SEQ ID NO: 598648 - DNA, 430 bp, Homo sapiens
gctcaagagacctgcccaccttggcctcccaaaatactgggattacaggtgtaagccgctgaatctggccagatatttttctttttatggctgaataatactctgtgtatgtatatattacattttctttatctattcacctactgatgggcattaggtttgggctaccttttggccactgtgaataatgctgctgttaatcgggtgtacaaatacctgtttgagtccctgctctcagttcttttgggtatatatgcttaaagggtgtkgatggatcatataattctatgcttcatatttttaaggagctgctaaaccattttccacagtgggctgtaccattttacattccaaaaagcaatgcatacagcttccaatttctctatagcattgctgacagttaatattttctgtttatgtattgtatttt

SEQ ID NO: 598649 - DNA, 380 bp, Homo sapiens
gagctgctaaaccattttccacagtgggctgtaccattttacattccaaaaagcaatgcatacagcttccaatttctctatagcattgctgacagttaatattttctgtttatgtattgtatttttatagtgtttgaaattaatctgaggctttttgctgataccaaaatattaggaaaggttttccaaaaataatactgcttattataaaggattttacgtgttacttgatgccctgtgatctgttttctaagtaagaagaggaacttcttggctgggcacagcrgctcatgcctgtaatcctagcacttttggaggccgaggtgggtagatcacctaaagtcaggagttcaagaccagcctggccaacatagtgaaac

SEQ ID NO: 598650 - DNA, 380 bp, Homo sapiens
gagctgctaaaccattttccacagtgggctgtaccattttacattccaaaaagcaatgcatacagcttccaatttctctatagcattgctgacagttaatattttctgtttatgtattgtatttttatagtgtttgaaattaatctgaggctttttgctgataccaaaatattaggaaaggttttccaaaaataatactgcttattataaaggattttacgtgttacttgatgccctgtgatctgttttctaagtaagaagaggaacttcttggctgggcacagcagctcatgcctgtaatcctagcacttttggaggccgaggtgggtagatcacctaargtcaggagttcaagaccagcctggccaacatagtgaaac

SEQ ID NO: 598651 - DNA, 567 bp, Homo sapiens
gagtctcactctgtcgtccaggctgaggtgcagtggtgcgatctctgctcactgcaacctcakcctcctgggttcaagtgattctcctgcctcagcctcccaagaagctgggactacaggcacatgccaccacacctggctaccttttttttatttttagtagagacagggtatcaccatgttggccaggctggtcttgaactcctgacttcaggtgatccacccaccttggcctcccaaagtgctggggttaaaggcatgagacactgcgcccgtccacctcctcttttacttgggagaaatgcacagattctgggtgccatgtgcatttgttttgggagtgataattgatctaacttatggaaataatactagatagttagcagatggattctgtatctgatgagagttttgggcaaaacgaattcctagtttctgagtcttatttttcccctgattcaagaaaactgtgaattatccagccagtaaaaaactctcacagctctggatgtgagtttaggacactggatttctaccactcattttcttactacttttcttgtgcaa

SEQ ID NO: 598652 - DNA, 567 bp, Homo sapiens
gagtctcactctgtcgtccaggctgaggtgcagtggtgcgatctctgctcactgcaacctcatcctcctgggttcaagtgattctcctgcctcagcctcccaagaagctgggactacaggcacatgccaccacacctggctaccttttttttatttttagtagagamagggtatcaccatgttggccaggctggtcttgaactcctgacttcaggtgatccacccaccttggcctcccaaagtgctggggttaaaggcatgagacactgcgcccgtccacctcctcttttacttgggagaaatgcacagattctgggtgccatgtgcatttgttttgggagtgataattgatctaacttatggaaataatactagatagttagcagatggattctgtatctgatgagagttttgggcaaaacgaattcctagtttctgagtcttatttttcccctgattcaagaaaactgtgaattatccagccagtaaaaaactctcacagctctggatgtgagtttaggacactggatttctaccactcattttcttactacttttcttgtgcaa

SEQ ID NO: 598653 - DNA, 567 bp, Homo sapiens
gagtctcactctgtcgtccaggctgaggtgcagtggtgcgatctctgctcactgcaacctcatcctcctgggttcaagtgattctcctgcctcagcctcccaagaagctgggactacaggcacatgccaccacacctggctaccttttttttatttttagtagagacagggtatcaccatgttggccaggctggtcttgaactcctgacttcaggtgatccacccaccttggccycccaaagtgctggggttaaaggcatgagacactgcgcccgtccacctcctcttttacttgggagaaatgcacagattctgggtgccatgtgcatttgttttgggagtgataattgatctaacttatggaaataatactagatagttagcagatggattctgtatctgatgagagttttgggcaaaacgaattcctagtttctgagtcttatttttcccctgattcaagaaaactgtgaattatccagccagtaaaaaactctcacagctctggatgtgagtttaggacactggatttctaccactcattttcttactacttttcttgtgcaa

SEQ ID NO: 598654 - DNA, 454 bp, Homo sapiens
ttttttatttttagtagagacagggtatcaccatgttggccaggctggtcttgaactcctgacttcaggtgatccacccaccttggcctcccaaagtgctggggttaaaggcatgagacactgygcccgtccacctcctcttttacttgggagaaatgcacagattctgggtgccatgtgcatttgttttgggagtgataattgatctaacttatggaaataatactagatagttagcagatggattctgtatctgatgagagttttgggcaaaacgaattcctagtttctgagtcttatttttcccctgattcaagaaaactgtgaattatccagccagtaaaaaactctcacagctctggatgtgagtttaggacactggatttctaccactcattttcttactacttttcttgtgcaaggatcatggcacaagttacagtttccaccctgc

SEQ ID NO: 598655 - DNA, 594 bp, Homo sapiens
gcaccacggcaccccagcctgtgtgacagagcgagagtccatctcaaaaaaaaaaaaaaaggaaagaaagaagaggaacttctctacatccagcctcattccactgcaccaactcttctgtgtcgggttgtacaggggagaaagggagcttggcaactctttgctgtgttgagttgtggtagcccatcactgggttgtaaagtgccttgcctcctttcctctcctccttttttttttgagacagagtctcactctgtcgtccaggctgaggtgcagtggtgcgatctctgctcactgcaacctcatcctcctgggttcaagtgattctcctgcctcagcctcccaagaagctgggactacaggcacatgccaccacacctggctaccttttttttatttttagtagagacagggtatcaccatgttggccaggctggtcttgaactcctgacttcaggtgatccacccaccttggcctcccaaagtgctggggttaaaggcatgagacactgcgcccrtccacctcctcttttacttgggagaaatgcacagattctgggtgccatgtgcatttgttttgggagtgataattga

SEQ ID NO: 598656 - DNA, 567 bp, Homo sapiens
gagtctcactctgtcgtccaggctgaggtgcagtggtgcgatctctgctcactgcaacctcatcctcctgggttcaagtgattctcctgcctcagcctcccaagaagctgggactacaggcacatgccaccacacctggctaccttttttttatttttagtagagacagggtatcaccatgttggccaggctggtcttgaactcctgacttcaggtgatccacccaccttggcctcccaaagtgctggggttaaaggcatgagacactgcgcccgtccacctcctcttttacttgggagaaatgcacagattctgggtgccatgtgcatttgttttgggagtgataattgatctaacttatggaaataatactagatagttagcrgatggattctgtatctgatgagagttttgggcaaaacgaattcctagtttctgagtcttatttttcccctgattcaagaaaactgtgaattatccagccagtaaaaaactctcacagctctggatgtgagtttaggacactggatttctaccactcattttcttactacttttcttgtgcaa

SEQ ID NO: 598657 - DNA, 483 bp, Homo sapiens
acattcctgtcagctctcgactccatggtcagaccttctkttctcacattctgtagttcggtaggactgggcggtagataaggttgatttgtttttgtagaacttacaattttgtgatttttagttctaatgagtagaccttttttgtgaatagtagttacggtcaaacacctctgaccaaatgtgcatgtggagtttctacactgattttcagacaatctggatcccaactgagtatcccacaattccatcctgacactccctggagttagtgcagaccccgcagggatgggagctcagtcccaggagtctaccctcactccacatgccaattgcaagtcttgggttgttacatgtagttttgaccaaccagttagaaaacagggtttcatgacccccattggtgggtggaatcatttgctcggacagcttgcagaactcagaaaaacagattgttttctttttttttctgagatacagggt

SEQ ID NO: 598658 - DNA, 483 bp, Homo sapiens
acattcctgtcagctctcgactccatggtcagaccttcttttctcacattctgtagttcggtaggactgggcggtagataaggttgatttgtttttgtagaacttacaattttgtgatttttagttctaatgagtagacctttttygtgaatagtagttacggtcaaacacctctgaccaaatgtgcatgtggagtttctacactgattttcagacaatctggatcccaactgagtatcccacaattccatcctgacactccctggagttagtgcagaccccgcagggatgggagctcagtcccaggagtctaccctcactccacatgccaattgcaagtcttgggttgttacatgtagttttgaccaaccagttagaaaacagggtttcatgacccccattggtgggtggaatcatttgctcggacagcttgcagaactcagaaaaacagattgttttctttttttttctgagatacagggt

SEQ ID NO: 598659 - DNA, 593 bp, Homo sapiens
tgtgatttttagttctaatgagtagaccttttttgtgaatagtagttacggtcaaacacctctgaccaaatgtgcatgtggagtttctacactgattttcagacaatctggatcccaactgrgtatcccacaattccatcctgacactccctggagttagtgcagaccccgcagggatgggagctcagtcccaggagtctaccctcactccacatgccaattgcaagtcttgggttgttacatgtagttttgaccaaccagttagaaaacagggtttcatgacccccattggtgggtggaatcatttgctcggacagcttgcagaactcagaaaaacagattgttttctttttttttctgagatacagggtctcagtctgttgccaggctggaatgcagtggtgtgatcaaagctcactgtagcatgggactcctgggctcaagtgatcctcccacctcagcctcccaaatagctgagattataggcctgtaccagcatatctggctatgttcttttactttttgtagagatggggtcttgttatgttgcccaggctggtctcaaatttctgggctcacatgatcctcccacc

SEQ ID NO: 598660 - DNA, 593 bp, Homo sapiens
tgtgatttttagttctaatgagtagaccttttttgtgaatagtagttacggtcaaacacctctgaccaaatgtgcatgtggagtttctacactgattttcagacaatctggatcccaactgagtatcccacaattccatcctgacactccctggagttagtgcagaccccgcagggatgggagctcagtcccaggagtctaccctcactccacatrccaattgcaagtcttgggttgttacatgtagttttgaccaaccagttagaaaacagggtttcatgacccccattggtgggtggaatcatttgctcggacagcttgcagaactcagaaaaacagattgttttctttttttttctgagatacagggtctcagtctgttgccaggctggaatgcagtggtgtgatcaaagctcactgtagcatgggactcctgggctcaagtgatcctcccacctcagcctcccaaatagctgagattataggcctgtaccagcatatctggctatgttcttttactttttgtagagatggggtcttgttatgttgcccaggctggtctcaaatttctgggctcacatgatcctcccacc

SEQ ID NO: 598661 - DNA, 492 bp, Homo sapiens
cctgacactccctggagttagtgcagaccccgcagggatgggagctcagtcccaggagtctaccctcactccacatgccaattgcaagtcttgggttgttacatgtagttttgaccaaccagttagaaaacagggtttcatgacccccattggtgggtggaatcatttgctyggacagcttgcagaactcagaaaaacagattgttttctttttttttctgagatacagggtctcagtctgttgccaggctggaatgcagtggtgtgatcaaagctcactgtagcatgggactcctgggctcaagtgatcctcccacctcagcctcccaaatagctgagattataggcctgtaccagcatatctggctatgttcttttactttttgtagagatggggtcttgttatgttgcccaggctggtctcaaatttctgggctcacatgatcctcccacctcaacttcacaaaatgctgggattatggtcatgaacca

SEQ ID NO: 598662 - DNA, 593 bp, Homo sapiens
tgtgatttttagttctaatgagtagaccttttttgtgaatagtagttacggtcaaacacctctgaccaaatgtgcatgtggagtttctacactgattttcagacaatctggatcccaactgagtatcccacaattccatcctgacactccctggagttagtgcagaccccgcagggatgggagctcagtcccaggagtctaccctcactccacatgccaattgcaagtcttgggttgttacatgtagttttgaccaaccagttagaaaacagggtttcatgacccccattggtgggtggaatcatttgctcggayagcttgcagaactcagaaaaacagattgttttctttttttttctgagatacagggtctcagtctgttgccaggctggaatgcagtggtgtgatcaaagctcactgtagcatgggactcctgggctcaagtgatcctcccacctcagcctcccaaatagctgagattataggcctgtaccagcatatctggctatgttcttttactttttgtagagatggggtcttgttatgttgcccaggctggtctcaaatttctgggctcacatgatcctcccacc

SEQ ID NO: 598663 - DNA, 593 bp, Homo sapiens
tgtgatttttagttctaatgagtagaccttttttgtgaatagtagttacggtcaaacacctctgaccaaatgtgcatgtggagtttctacactgattttcagacaatctggatcccaactgagtatcccacaattccatcctgacactccctggagttagtgcagaccccgcagggatgggagctcagtcccaggagtctaccctcactccacatgccaattgcaagtcttgggttgttacatgtagttttgaccaaccagttagaaaacagggtttcatgacccccattggtgggtggaatcatttgctcggacagcttgcagaactcagaaaaacagattgttttctttttttttctgagatacagggtctcagtctgttgccaggctggaatgcagtggtgtgatcaaagctcactgtagcatgggactcctgggctcaagtgatcctyccacctcagcctcccaaatagctgagattataggcctgtaccagcatatctggctatgttcttttactttttgtagagatggggtcttgttatgttgcccaggctggtctcaaatttctgggctcacatgatcctcccacc

SEQ ID NO: 598664 - DNA, 467 bp, Homo sapiens
gtagcatgggactcctgggctcaagtgatcctcccacctcagcctcccaaatagctgagattataggcctgtaccagcatatctggctatgttcttttactttttgtagagatggggtcttgttatgttgcccaggctggtctcaaatttctgggctcacatgatcctcccacctcaacttcacaaaatgctgggattatggkcatgaaccactgcatctcaccaatttactttcttttactggttcattttaaaggctaaatctcagaaacagccagtgaaagagatgtacatgctgggcacagtggctcatgtctgtaatttcagcactttgggagactgaggcgggagcatcgcttaagtgctcaggagattaagaccagcctgggtaacaaggtgaaaatgcatctctacaaaaagattttttctaaaaattagccaggcacagttatctatatttctagcta

SEQ ID NO: 598665 - DNA, 467 bp, Homo sapiens
gtagcatgggactcctgggctcaagtgatcctcccacctcagcctcccaaatagctgagattataggcctgtaccagcatatctggctatgttcttttactttttgtagagatggggtcttgttatgttgcccaggctggtctcaaatttctgggctcacatgatcctcccacctcaacttcacaaaatgctgggattatggtcatgaaccactgcatctcaccaatttactttcttttactggttcattttaaaggctaaatctcagaaacagccagtgaaagagatgtacatgctgggcacagtggctcatgyctgtaatttcagcactttgggagactgaggcgggagcatcgcttaagtgctcaggagattaagaccagcctgggtaacaaggtgaaaatgcatctctacaaaaagattttttctaaaaattagccaggcacagttatctatatttctagcta

SEQ ID NO: 598666 - DNA, 680 bp, Homo sapiens
atgcccagctaattttttcttatttctttttgttgtttaattgagggggtctcgctgtgtttcccaggctggtcctgaagttttggcctcaagcgtttctcctgctttgaactcctaaattgttgggattatggctgtgagccacggcctctgtgtccagcaatcacaagaggtctttataagtgaaagagggaggtaagagagtccgaattgaaggagatttgatgatggaagcacaggtcacagagggagattcgaatatgctttgcttctggctttgaagatgcagttaggggccatgagccaaagaatargagtggctttagcaactgggaaaggcaagggacatattctctccagaacctccagaagggatgcagtcctgctgcacccttgactttagccttaatagacctatttgacatctgcccccccagacctcttagttagtagatttgtggtgtattaagcaactcaatgtagggtagtttgtaacagcggcaagaagaaatgaacatgaagccagaattggtggcccacacctataattccagctatttaggaggctgaggcaggatggttgctttggcccaggagttcacgataagtctgggcaacaaaatgataccctgtctacatggaaaaaaaaaaatagctggtgtggtggcatgcacttgtag

SEQ ID NO: 598667 - DNA, 405 bp, Homo sapiens
aacctccagaagggatgcagtcctgctgcacccttgactttagccttaatagacctatttgacatctgcccccccagacctcttagttagtagatttgtggtgtattaagcaactcaatgtagggtagtttgtaacagcggcaagaagaaatgaacatgaagccagaattggtggcccacacctataattccagctatttaggaggctgaggcaggatggttgctttggcccaggagttcacgataagtctgggcaacaaaatgataccctgtctacatggaaaaaaaaaaatagctggtgtggtggcatgcacttgtagtcttagctactagaggccctgaggcaggacaatttcttgayctaagagctccaggtctcagtgcgttgtgatcgtgccatggcac

SEQ ID NO: 598668 - DNA, 608 bp, Homo sapiens
ctttggtttttattctgtctgagatgggagatgcggaagggttctgagcagagaggtgacacgaactgtctactgatttaaaagcatcccatggcagctgagttgagaaagattgtgggaagatttgggtagaagcagggaggccatgctgtggcaacctccaggtgggagatgatagtggttctgaccagggccctggcaatggtgagagatggttgattcttgttgaaatactawgtaatttaaaaaaaaacactactgctttttccaattatatgacgtatgggatgctagattacagaaatcttaagtcgggccagctgcagtggcttatgcccgtagcttcagcactttgggaggcagagatgggagaatggtttgagtccaggagtttgagaccaccctgggcaacacagcaagacctcctgtctatgcaaataaaaattaataaaatataattatcccggcatagtggtattttcctgtagaacctgttacttaggttgttgaggtgggcagatctcttgagggcgggagtttgaggccagcttgggcaacatagcaaggctcctctttctacaaaaaaaaaattagctgggtgttttggt

SEQ ID NO: 598669 - DNA, 608 bp, Homo sapiens
ctttggtttttattctgtctgagatgggagatgcggaagggttctgagcagagaggtgacacgaactgtctactgatttaaaagcatcccatggcagctgagttgagaaagattgtgggaagatttgggtagaagcagggaggccatgctgtggcaacctccaggtgggagatgatagtggttctgaccagggccctggcaatggtgagagatggttgattcttgttgaaatactatgtaatttaaaaaaaaacactactgctttttccaattatatgacgtatgggatgctagattacagaaatcttaagtcgggccagstgcagtggcttatgcccgtagcttcagcactttgggaggcagagatgggagaatggtttgagtccaggagtttgagaccaccctgggcaacacagcaagacctcctgtctatgcaaataaaaattaataaaatataattatcccggcatagtggtattttcctgtagaacctgttacttaggttgttgaggtgggcagatctcttgagggcgggagtttgaggccagcttgggcaacatagcaaggctcctctttctacaaaaaaaaaattagctgggtgttttggt

SEQ ID NO: 598670 - DNA, 434 bp, Homo sapiens
agccgtagctatgttgagggtgaggcaggaggatccccggagcccaggasgtcacggctgcagttagctatgagtgcacccctgcattgcagccagagtgacagagtgagacccggtctcagaatacagataaaagtaaagaaatctcagctcagagcagtctgtttgtcactatgcagcctttgcaaccccatagctgcgtgattgggtttgtgttgctggagatgaggagacccgtgcccaggtgttgttgcctgtctaatcagtttattttaaaatatattaatgaaatttatttcatcatactttatggcctcatacctgagtgttttttttgaattctcctttgaatagcttgtaactattcaaacctcttattggttctataattaattctttttctaattagctttttaaaaatcagaattgatatt

SEQ ID NO: 598671 - DNA, 434 bp, Homo sapiens
agccgtagctatgttgagggtgaggcaggaggatccccggagcccaggacgtcacggctgcagttagctatgagtgcacccctgcattgcagccagagtgacagagtgagacccggtctcagaatacagatamaagtaaagaaatctcagctcagagcagtctgtttgtcactatgcagcctttgcaaccccatagctgcgtgattgggtttgtgttgctggagatgaggagacccgtgcccaggtgttgttgcctgtctaatcagtttattttaaaatatattaatgaaatttatttcatcatactttatggcctcatacctgagtgttttttttgaattctcctttgaatagcttgtaactattcaaacctcttattggttctataattaattctttttctaattagctttttaaaaatcagaattgatatt

SEQ ID NO: 598672 - DNA, 437 bp, Homo sapiens
ctaatatcaattctgatttttaaaaagctaattagaaaaagaattaattatagaaccaataagaggtttgaatagttacaagctattcaaaggagaattcaaaaaaccattcaggtatgaggccataaagtatgatgaaataaatttcattaatatattttaaaataaactgattagacaggcaacaacacctgggcacgggtctcctcacctccagcaacacaaacccaatcrcgcagctatggggttgcaaaggctgcatagtgacaaacagactgctctgagctgagatttctttacttgtatctgtattctgagaccgggtctcactctgtcactctggctgcaatgcaggggtgcactcatagctaactgcagccgtgacctcctgggctccggggatcctcttgcctcaccctcaccatagctatggctac

SEQ ID NO: 598673 - DNA, 565 bp, Homo sapiens
gagacccgtgcccaggtgttgttgcctgtctaatcagtttattttaaaatatattaatgaaatttatttcatcatactttatggcctcatacctgagtgktttttttgaattctcctttgaatagcttgtaactattcaaacctcttattggttctataattaattctttttctaattagctttttaaaaatcagaattgatattagaccaatcagttattaatgaggagatgaaattgagttgtttgtacactttatctaagatagtgttatattggctaactcaaatcagtagttcagcaaatgcagagtcagagcttcttcagcgtggaactctcttgtggttcttgaagatgctatttcttttctttttttttttttttttgagacagcatcttcctctgtcaccaggctcgagtgcagtggcacaatctcaactcacagcaacttctgcctcccgggttcaagcatttcttttgcctcagcctctgaagtagctgggactacaggcacatgtcaccatgcccggctaagctttgtattttctgtagatacggggtttcag

SEQ ID NO: 598674 - DNA, 623 bp, Homo sapiens
agcttgtaactattcaaacctcttattggttctataattaattctttttctaattagctttttaaaaatcagaattgatattagaccaatcagttattaatgaggagatgaaattgagttgtttgtacactttatctaagatagtgttatattggctaactcaaatcagtagttcagcaaatgcagartcagagcttcttcagcgtggaactctcttgtggttcttgaagatgctatttcttttctttttttttttttttttgagacagcatcttcctctgtcaccaggctcgagtgcagtggcacaatctcaactcacagcaacttctgcctcccgggttcaagcatttcttttgcctcagcctctgaagtagctgggactacaggcacatgtcaccatgcccggctaagctttgtattttctgtagatacggggtttcagcatgttggacaggctggtcttgaacttctgaccttgtgatccactggccttggactcctaaagtgctgggattacaggtgtgagccaccgtgcctggcctcttttttcagtctttaataaactgctgccatcatttcagaccgcttgctattttaggcacttagaaatttttcactggaat

SEQ ID NO: 598675 - DNA, 613 bp, Homo sapiens
gaattctcctttgaatagcttgtaactattcaaacctcttattggttctataattaattctttttctaattagctttttaaaaatcagaattgatattagaccaatcagttattaatgaggagatgaaattgagttgtttgtacactttatctaagatagtgttatattggctaactcaaatcagtagttcagcaaatgcagagtcagagcttcttcagcgtggaactctcttgtggttcttgaagatkctatttcttttctttttttttttttttttgagacagcatcttcctctgtcaccaggctcgagtgcagtggcacaatctcaactcacagcaacttctgcctcccgggttcaagcatttcttttgcctcagcctctgaagtagctgggactacaggcacatgtcaccatgcccggctaagctttgtattttctgtagatacggggtttcagcatgttggacaggctggtcttgaacttctgaccttgtgatccactggccttggactcctaaagtgctgggattacaggtgtgagccaccgtgcctggcctcttttttcagtctttaataaactgctgccatcatttcagaccgcttgctatttta

SEQ ID NO: 598676 - DNA, 605 bp, Homo sapiens
cttattggttctataattaattctttttctaattagctttttaaaaatcagaattgatattagaccaatcagttattaatgaggagatgaaattgagttgtttgtacactttatctaagatagtgttatattggctaactcaaatcagtagttcagcaaatgcagagtcagagcttcttcagcgtggaactctcttgtggttcttgaagatgctatttcttttctttttttttttttttttgagacagcatcttcctctgtcaccaggctcgagtgcagtggcacaatctcaaytcacagcaacttctgcctcccgggttcaagcatttcttttgcctcagcctctgaagtagctgggactacaggcacatgtcaccatgcccggctaagctttgtattttctgtagatacggggtttcagcatgttggacaggctggtcttgaacttctgaccttgtgatccactggccttggactcctaaagtgctgggattacaggtgtgagccaccgtgcctggcctcttttttcagtctttaataaactgctgccatcatttcagaccgcttgctattttaggcacttagaaatttttcactggaattca

SEQ ID NO: 598677 - DNA, 565 bp, Homo sapiens
gaattctcctttgaatagcttgtaactattcaaacctcttattggttctataattaattctttttctaattagctttttaaaaatcagaattgatattagaccaatcagttattaatgaggagatgaaattgagttgtttgtacactttatctaagatagtgttatattggctaactcaaatcagtagttcagcaaatgcagagtcagagcttcttcagcgtggaactctcttgtggttcttgaagatgctatttcttttctttttttttttttttttgagacagcatcttcctctgtcaccaggctcgagtgcagtggcacaatctcaactcacagcaacttctgcctcccgggttcaagcatttcttttgcctcagcctctgaagtagctgggactacaggcacatgtcaccatgcccggctaagcyttgtattttctgtagatacggggtttcagcatgttggacaggctggtcttgaacttctgaccttgtgatccactggccttggactcctaaagtgctgggattacaggtgtgagccaccgtgcctggcctctttttt

SEQ ID NO: 598678 - DNA, 431 bp, Homo sapiens
agcttcttcagcgtggaactctcttgtggttcttgaagatgctatttcttttctttttttttttttttttgagacagcatcttcctctgtcaccaggctcgagtgcagtggcacaatctcaactcacagcaacttctgcctcccgggttcaagcatttcttttgcctcagcctctgaagtagctgggactacaggcacatgtcaccatgcccggctaagctttgtattttctgtagatacggggtttcagcatgttggacaggctggtcttgaactyctgaccttgtgatccactggccttggactcctaaagtgctgggattacaggtgtgagccaccgtgcctggcctcttttttcagtctttaataaactgctgccatcatttcagaccgcttgctattttaggcacttagaaatttttcactggaat

SEQ ID NO: 598679 - DNA, 560 bp, Homo sapiens
ggctaagctttgtattttctgtagatacggggtttcagcatgttggacaggctggtcttgaacttctgaccttgtgatccactggccttggactcctaaagtgctgggattacaggtgtgagccaccgtgcctggcctcttttttcagtctttaataaactgctgccatcatttcagaccgcttgctattttaggcacttagaaatttttcactggaattcatgtaaagaaagaccatgggtgtttgtactggatttagtattcatccttcgactgcatgactcacccctagtgccataattttactaatgaatttttcagatactactcagctggccactgaacctaaccaacaacccaccctcarccattcagtggtcttttgttcttctctgttcctcctgaatgttgattactctcagaagttgataaaaacttggatttctttttttttctttctagagacagggttttgttctgtcacccaggctgcagtgcggtggcatgatcatggttcactgcagcctgaaaccccggactcaaacagtcctcccacctca

SEQ ID NO: 598680 - DNA, 616 bp, Homo sapiens
ctttttttttctttctagagacagggttttgttctgtcacccaggctgcagtgcggtggcatgatcatggttcactgcagcctgaaaccccggactcaaacagtcctcccacctcagcctcccaagtagctgggactacrtacatttgcccctatgcccagctaacttctttattttttattgtacagatgggatcttgctgtgttgctcaggatgttgtcagactcctggcctcaagtgatcattctgcctcagcttcccaaagtgcttggattatatgtaggtgggagccacctgtgttcaatgcccattttctttttctttctttcttttggagacggactctcactctgtcatgcaggctggaatgcagtggtgtgatctcagctgactgcaacctccacctccctggttcaagcaactcccctgcctcagcctcccgactagctggaattacaggcccatgtcaccactctcagctaatatttttgtatttttagtagagacagagtttcagtatgttggccagactggtctcgaactcctgaaatcaggcaatccacccaccttggcctcccagtgtgctgagatcagaggcgtgagtcaccacgccatg

SEQ ID NO: 598681 - DNA, 385 bp, Homo sapiens
gatcttgctgtgttgctcaggatgttgtcagactcctggcctcaagtgatcattctgcctcagcttcccaaagtgcttggattatatgtaggtgggagccacctgtgttcaatgcccattttctttttctttctttcttttggagayggactctcactctgtcatgcaggctggaatgcagtggtgtgatctcagctgactgcaacctccacctccctggttcaagcaactcccctgcctcagcctcccgactagctggaattacaggcccatgtcaccactctcagctaatatttttgtatttttagtagagacagagtttcagtatgttggccagactggtctcgaactcctgaaatcaggcaatccacccaccttggcctcc

SEQ ID NO: 598682 - DNA, 567 bp, Homo sapiens
gatcattctgcctcagcttcccaaagtgcttggattatatgtaggtgggagccacctgtgttcaatgcccattttctttttctttctttcttttggagacggactctyactctgtcatgcaggctggaatgcagtggtgtgatctcagctgactgcaacctccacctccctggttcaagcaactcccctgcctcagcctcccgactagctggaattacaggcccatgtcaccactctcagctaatatttttgtatttttagtagagacagagtttcagtatgttggccagactggtctcgaactcctgaaatcaggcaatccacccaccttggcctcccagtgtgctgagatcagaggcgtgagtcaccacgccatgcccagccatttttaaaataataacgttattgaaatatgattaacgtatcatgcaattcatttatcaaagtacgcaattcaggccaggtgcagtggctaattcctataacgctaagactttgggcagctgaggcaggtggatcgcttgtgttcaggagtttgcgactagcctgggcaacatggcaaaacag

SEQ ID NO: 598683 - DNA, 567 bp, Homo sapiens
gatcattctgcctcagcttcccaaagtgcttggattatatgtaggtgggagccacctgtgttcaatgcccattttctttttctttctttcttttggagacggactctcactctgtcatgcaggctggaatgcagtggtgtgatctcagctgactgcaacctccacctccctggttcaagcaactcccctgcctcagcctccmgactagctggaattacaggcccatgtcaccactctcagctaatatttttgtatttttagtagagacagagtttcagtatgttggccagactggtctcgaactcctgaaatcaggcaatccacccaccttggcctcccagtgtgctgagatcagaggcgtgagtcaccacgccatgcccagccatttttaaaataataacgttattgaaatatgattaacgtatcatgcaattcatttatcaaagtacgcaattcaggccaggtgcagtggctaattcctataacgctaagactttgggcagctgaggcaggtggatcgcttgtgttcaggagtttgcgactagcctgggcaacatggcaaaacag

SEQ ID NO: 598684 - DNA, 385 bp, Homo sapiens
gatcttgctgtgttgctcaggatgttgtcagactcctggcctcaagtgatcattctgcctcagcttcccaaagtgcttggattatatgtaggtgggagccacctgtgttcaatgcccattttctttttctttctttcttttggagacggactctcactctgtcatgcaggctggaatgcagtggtgtgatctcagctgactgcaacctccacctccctggttcaagcaactcccctgcctcagcctcccgactagctggaattacaggcmcatgtcaccactctcagctaatatttttgtatttttagtagagacagagtttcagtatgttggccagactggtctcgaactcctgaaatcaggcaatccacccaccttggcctcc

SEQ ID NO: 598685 - DNA, 567 bp, Homo sapiens
gatcattctgcctcagcttcccaaagtgcttggattatatgtaggtgggagccacctgtgttcaatgcccattttctttttctttctttcttttggagacggactctcactctgtcatgcaggctggaatgcagtggtgtgatctcagctgactgcaacctccacctccctggttcaagcaactcccctgcctcagcctcccgactagctggaattacaggcccatgtcaccactctcagctaatatttttgtatttttagtagagacagagtttcagtatgttggccagactggtctcgaactcctgaaatcaggcaatccacccaccttggcctcccagtgtgctgagatcagaggcgtgagtcaccacgccatgcccagccatttttaaaataataacgttattgaaatatgrttaacgtatcatgcaattcatttatcaaagtacgcaattcaggccaggtgcagtggctaattcctataacgctaagactttgggcagctgaggcaggtggatcgcttgtgttcaggagtttgcgactagcctgggcaacatggcaaaacag

SEQ ID NO: 598686 - DNA, 567 bp, Homo sapiens
gatcattctgcctcagcttcccaaagtgcttggattatatgtaggtgggagccacctgtgttcaatgcccattttctttttctttctttcttttggagacggactctcactctgtcatgcaggctggaatgcagtggtgtgatctcagctgactgcaacctccacctccctggttcaagcaactcccctgcctcagcctcccgactagctggaattacaggcccatgtcaccactctcagctaatatttttgtatttttagtagagacagagtttcagtatgttggccagactggtctcgaactcctgaaatcaggcaatccacccaccttggcctcccagtgtgctgagatcagaggcgtgagtcaccacgccatgcccagccatttttaaaataataacgttattgaaatatgattaacgtatcatgcaattcatttatcaaagtacgcaattcaggccaggtgcagtggctaattcctataacgctaagactttgggcagctgaggcaggtggatcgcttgtgtkcaggagtttgcgactagcctgggcaacatggcaaaacag

SEQ ID NO: 598687 - DNA, 555 bp, Homo sapiens
ggcaatccacccaccttggcctcccagtgtgctgagatcagaggcgtgagtcaccacgccatgcccagccatttttaaaataataacgttattgaaatatgattaacgtatcatgcaattcatttatcaaagtacgcaattcaggccaggtgcagtggctaattcctataacgctaagactttgggcagctgaggcaggtggatcgcttgtgttcaggagtttgcgactagcctgggcaacatggcaaaacagcatctctagcaaaaatacaaaaattagctgggtgtggtggctcatgcctgtagtcccaactacttggggacatgagactggaagatcacttgagcccagaagccataggttgcagtgagaccagatggcaccactgcactacagcatgggtgacaaaaggaraccctgcctttaaataactaaataaaaaaagaaagtatacaattgagtggtttttagaatattcaaggagctgtgcatccatcaccacagtctttcttagaagtgattacccacttgtgagttacccacttatgagtgag

SEQ ID NO: 598688 - DNA, 555 bp, Homo sapiens
ggcaatccacccaccttggcctcccagtgtgctgagatcagaggcgtgagtcaccacgccatgcccagccatttttaaaataataacgttattgaaatatgattaacgtatcatgcaattcatttatcaaagtacgcaattcaggccaggtgcagtggctaattcctataacgctaagactttgggcagctgaggcaggtggatcgcttgtgttcaggagtttgcgactagcctgggcaacatggcaaaacagcatctctagcaaaaatacaaaaattagctgggtgtggtggctcatgcctgtagtcccaactacttggggacatgagactggaagatcacttgagcccagaagccataggttgcagtgagaccagatggcaccactgcactacagcatgggtgacaaaaggaaaccctgyctttaaataactaaataaaaaaagaaagtatacaattgagtggtttttagaatattcaaggagctgtgcatccatcaccacagtctttcttagaagtgattacccacttgtgagttacccacttatgagtgag

SEQ ID NO: 598689 - DNA, 454 bp, Homo sapiens
acatgttcataggcaaccactgatttattttctgtcattgtagttttgcctaatctggaccttttatagaaatagaattgtacaatgtgtgatcttttgtaatttgcttttttttctcttagcagaatgttttcaaatwtctttcatgttatagtgtgtatccggatttctttccttttgtagctgagtaatagtttatgtctatccattcattagttgatggacatttgggttgtttttgcgtattcaccatcatgagtcaggctgctatgaacactcgtacgtaagttttagtgtgaacatatatttttatttctcttggatttacactcaggagtgaaattgttgcattatgtgattactatacatttagtctttgagaaactgccacgttgtttttcaaagtggttacactggtcaggcacagtggctcacacctttaatctcaggtatt

SEQ ID NO: 598690 - DNA, 454 bp, Homo sapiens
acatgttcataggcaaccactgatttattttctgtcattgtagttttgcctaatctggaccttttatagaaatagaattgtacaatgtgtgatcttttgtaatttgcttttttttctcttagcagaatgttttcaaatatctttcatgttatagtgtgtatccggatttctttccttttgtagctgagtaatagtttatgtctatccattcattagttgatggacatttgkgttgtttttgcgtattcaccatcatgagtcaggctgctatgaacactcgtacgtaagttttagtgtgaacatatatttttatttctcttggatttacactcaggagtgaaattgttgcattatgtgattactatacatttagtctttgagaaactgccacgttgtttttcaaagtggttacactggtcaggcacagtggctcacacctttaatctcaggtatt

SEQ ID NO: 598691 - DNA, 588 bp, Homo sapiens
aaaaccaggaaaaccaaactcaggattattaggtattctgtaatgctattttctctttggactcacagaaaatagttattattattattattattattatcattattattattattattttgatatggagcctcactctgtcacccaggctggagtgcagtggcgcaatgttggctcactgcaacctctgcctcctgggttcaagtgattctcctgcctcagccttcagagtagttgrgattagaggcaggttccaccatgcctggctaacttgtatttttggtagagacagggtttcaccatgttggccaggctggtctgaaactcctgatctcaaacaatctgcctacctcagcctcccaaagtgctggaattacaggcatgagccactgtgctcagctgaaaatagttaattttatgtatattccaagtcagaatacatcctatttttgaatatttgatgactttaggatactatattaactcttaattgaattaatacaagtttaggtgtaaagatgatgtttatgttgacaaaaatgattaatgttttacatatatgaaagtaacaatatcatatatttttca

SEQ ID NO: 598692 - DNA, 608 bp, Homo sapiens
atattaactcttaattgaattaatacaagtttaggtgtaaagatgatgtttatgttgacaaaaatgattaatgttttacatatatgaaagtaacaatatcatatatttttcatacttgtagaatactttgaaatctattattagctaatattttatattcattttgggttttcacattattgttagatccagagaaaagtaatattttgtgaatactcaaatcataaayattttgctggatgcattcatagatactttatttaaaaagtacactaattgaagttttacaccattttatgattcatcaaacacagcaactgaatactggcgtatatcaacattacagatgatgttagtctaagataaaactcataacacattttaaaaagggtaaaaggaaggaaaggaaaaaggatacaagactgtagaaagattttaaaaacaaacgtcgtatgtctgaacctttgcctggagtttcatattttgtgaaaagcagtttgtaagtagaggactcgtaagtgcacctagtacactgcaatggcacagacacggcagatagtcaataaaatgatctttaacttctgatctaggttatttttgttgttgtt

SEQ ID NO: 598693 - DNA, 608 bp, Homo sapiens
atattaactcttaattgaattaatacaagtttaggtgtaaagatgatgtttatgttgacaaaaatgattaatgttttacatatatgaaagtaacaatatcatatatttttcatacttgtagaatactttgaaatctattattagctaatattttatattcattttgggttttcacattattgttagatccagagaaaagtaatattttgtgaatactcaaatcataaacattttgctggatgcattcatagatactttatttaaaaagtacactaattgaagttttacaccattttatgattcatcaaacacagcaactgaatactggcgtatatcaacattacagatgatgttagtctaagataaaactcataacacattttaaaaagggtaaaaggaaggaaagraaaaaggatacaagactgtagaaagattttaaaaacaaacgtcgtatgtctgaacctttgcctggagtttcatattttgtgaaaagcagtttgtaagtagaggactcgtaagtgcacctagtacactgcaatggcacagacacggcagatagtcaataaaatgatctttaacttctgatctaggttatttttgttgttgtt

SEQ ID NO: 598694 - DNA, 608 bp, Homo sapiens
atattaactcttaattgaattaatacaagtttaggtgtaaagatgatgtttatgttgacaaaaatgattaatgttttacatatatgaaagtaacaatatcatatatttttcatacttgtagaatactttgaaatctattattagctaatattttatattcattttgggttttcacattattgttagatccagagaaaagtaatattttgtgaatactcaaatcataaacattttgctggatgcattcatagatactttatttaaaaagtacactaattgaagttttacaccattttatgattcatcaaacacagcaactgaatactggcgtatatcaacattacagatgatgttagtctaagataaaactcataacacattttaaaaagggtaaaaggaaggaaaggaaaaaggatacaagactgtagaaagattttaaaaacaaacgtcgtatgtytgaacctttgcctggagtttcatattttgtgaaaagcagtttgtaagtagaggactcgtaagtgcacctagtacactgcaatggcacagacacggcagatagtcaataaaatgatctttaacttctgatctaggttatttttgttgttgtt

SEQ ID NO: 598695 - DNA, 544 bp, Homo sapiens
ccaaccaacatttagcataagctacagcttatattgttaataattcttctatgtttatgtgctgatttgcaaataaatgggcctatatagtctttatctagtgttggattgggatcaaaagcttcatgaaatcattgtttttagtatacgtacagatggataattgtataaataagtacagatgtgtataaatgwgtgagtatacatacatatattttctagctcctctaacaaaagggcctagaaacaacatcatcccagtaacaatgagaacaccattctccaattaaaggaaccaaggctccttggggacatatttgatatcaggattgggcagggaaaatacaagattagtttgaaatattttgtcatgttaggaagtaaggaaatgctcacaaaatggggaaaatgtgaaagggaaacagatccactttgaataaacttccatagccaaatttgagaaaattggggcaataaaatagataacaatagtaatatattacaatctacagaagaaaattttcaattaatccaggccgggtgc

SEQ ID NO: 598696 - DNA, 612 bp, Homo sapiens
ggcccatgaataggcaaatcaatcttgaaacagaacaaaattaaaggtctcaaaacaattaccaaactgcaataagccaaaaaaaaatgtggtcatggcataaagacatacttgacacacttatggaccaacacaacagagacctcagaagccaaccctggcatatatggtttgatgatcttccacaaggatgccaagaccactcaatggcaaaggacagtttcttcaayaaatggtgttgggaaaattgtatatctacatgcaaaacaatgaagttggactcttaccttacaccacgttaaaattaattcaaagtgaattataaacctaaatgtaaaactagaactatcaaactcctagggaaaacaaatttggaaaatgctttatgacgatgaatttgtcaataatttttaggatacgacattaaaagctcaggcagtaaaagcaaaaatatatcaaacttaaaacttttgtaccacaaaggtcacaaacaacagggtaaaaggcaaactgtagaataaaagaaaataccagttgagtgtcccttatttgaaatgcttgggatgtgtttcagattttgtaatatttgcattattcttactggttgagcat

SEQ ID NO: 598697 - DNA, 471 bp, Homo sapiens
gttctggaatgctctctgagggccaaacattgagacctcagcagcagtgttctggaatcctatgtgatggacaaacattcagctcacagcaggattgttctgaaatcctatgtgagggacagacatttggaccccatcagcagtgttctggaatcctatttgagggacaaacactcagaacccagcagcagtattctggaatcctaagtgagggacaaatattcagaccctcttagcagtgttctggaatcctatgtgaatgacaaacgctcagaatccagcaccactgttctgaaatcatatgtgaaggacaaaccttcagaccagagcartagtgctgtggaattttatgttagagacaaacattcagactccagcagcagtgttcttgaatgctatctgagggacaaacattctaaccacagcaggagtgctatggagacgtatgtgagggacaaaaattcagaacac

SEQ ID NO: 598698 - DNA, 612 bp, Homo sapiens
ggcccatgaataggcaaatcaatcttgaaacagaacaaaattaaaggtctcaaaacaattaccaaactgcaataagccaaaaaaaaatgtggtcatggcataaagacatacttgacacacttatggaccaacacaacagagacctcagaagccaaccctggcatatatggtttgatgatcttccacaaggatgccaagaccactcaatggcaaaggacagtttcttcaacaaatggtgttgggaaaattgtatatctacatgcaaaacaatgaagttggactcttaccttacaccacgttaaaattaattcaaagtgaattataaacctaaatgtaaaactagaactatcaaactcctagggaaaacaaatttggaaaatgctttatgacgatgaatttgtcaataatttttaggataygacattaaaagctcaggcagtaaaagcaaaaatatatcaaacttaaaacttttgtaccacaaaggtcacaaacaacagggtaaaaggcaaactgtagaataaaagaaaataccagttgagtgtcccttatttgaaatgcttgggatgtgtttcagattttgtaatatttgcattattcttactggttgagcat

SEQ ID NO: 598699 - DNA, 612 bp, Homo sapiens
ggcccatgaataggcaaatcaatcttgaaacagaacaaaattaaaggtctcaaaacaattaccaaactgcaataagccaaaaaaaaatgtggtcatggcataaagacatacttgacacacttatggaccaacacaacagagacctcagaagccaaccctggcatatatggtttgatgatcttccacaaggatgccaagaccactcaatggcaaaggacagtttcttcaacaaatggtgttgggaaaattgtatatctacatgcaaaacaatgaagttggactcttaccttacaccacgttaaaattaattcaaagtgaattataaacctaaatgtaaaactagaactatcaaactcctagggaaaacaaatttggaaaatgctttatgacgatgaatttgtcaataatttttaggatacgacattaaaagctcaggcagtaaaagcaaaaatatatcaaacttaaaacttttgtaccacaaaggtmacaaacaacagggtaaaaggcaaactgtagaataaaagaaaataccagttgagtgtcccttatttgaaatgcttgggatgtgtttcagattttgtaatatttgcattattcttactggttgagcat

SEQ ID NO: 598700 - DNA, 505 bp, Homo sapiens
ttatgacgatgaatttgtcaataatttttaggatacgacattaaaagctcaggcagtaaaagcaaaaatatatcaaacttaaaacttttgtaccacaaaggtcacaaacaacagggtaaaaggcaaactgtagaataaaagaaaataccagttgagtgtcccttatttgaaatgcttgggatgtgtttcagattttgtaatatttgcattattcttactggttgagcatctcgaattcaaacacctgagtctgcgatgctccaataagcatttcctttgagtgtcatgttggcactcaaaaagtttcagamtttggagcatttgggatttcagatttttggatcagagacattcaacctatagttgcacatcatgtatctcataagaagtgaatattcagaatacgtaaagtactcctacggagagactaccagaagcaaagaggagcaaacacattttcacactagggcacctcctatctctcccggattccaattagggcaga

SEQ ID NO: 598701 - DNA, 563 bp, Homo sapiens
tgaggtacaaacattcagaccctggaatcagtgttctggaatcctatgtgagggacaaatattcagatcattgcattagtgttctggaatcctatgtgagggaaaaactttcagaccacagcagccatgttctggagtcctatgtgacagacattcagaccctcgtagcagtgttctggaatcttatgtgagggacacgcattcagaccacagcaggagggttctggaatcctatgtgagggacaaatattcagaccctcatagcagtgttctggagtcttatgtgagggacaaacattcagaccccggcagcagtgttctggaatcctatgtgagggacaaacattcagaccccagcagcagtgttctagaatcctatgtaatggacaaacattcagaacctcgtagcagtgttctggaatcctatgtgaaggacagacatttagcccctcgcagcaatgttctggaatcctatgtgagggagaaacattcagaccctcgcagcagtgttctggaatcctatgtgagggacaaacwttctgaccccagcagcagtgttctgg

SEQ ID NO: 598702 - DNA, 563 bp, Homo sapiens
tgaggtacaaacattcagaccctggaatcagtgttctggaatcctatgtgagggacaaatattcagatcattgcattagtgttctggaatcctatgtgagggaaaaactttcagaccacagcagccatgttctggagtcctatgtgacagacattcagaccctcgtagcagtgttctggaatcttatgtgagggacacgcattcagaccacagcaggagggttctggaatcctatgtgagggacaaatattcagaccctcatagcagtgttctggagtcttatgtgagggacaaacattcagaccccggcagcagtgttctggaatcctatgtgagggacaaacattcagaccccagcagcagtgttctagaatcctatgtaatggacaaacattcagaacctcgtagcagtgttctggaatcctatgtgaaggacagacatttagcccctcgcagcaatgttctggaatcctatgtgagggagaaacattcagaccctcgcagcagtgttctggaatcctatgtgagggacaaactttcwgaccccagcagcagtgttctgg

SEQ ID NO: 598703 - DNA, 505 bp, Homo sapiens
ttatgacgatgaatttgtcaataatttttaggatacgacattaaaagctcaggcagtaaaagcaaaaatatatcaaacttaaaacttttgtaccacaaaggtcacaaacaacagggtaaaaggcaaactgtagaataaaagaaaataccagttgagtgtcccttatttgaaatgcttgggatgtgtttcagattttgtaatatttgcattattcttactggttgagcatctcgaattcaaacacctgagtctgcgatgctccaataagcatttcctttgagtgtcatgttggcactcaaaaagtttcagaatttggagcatttgggatttcagatttttggatcagagacattcaacctatagttgcacatcatgtatctcataagaagtgaayattcagaatacgtaaagtactcctacggagagactaccagaagcaaagaggagcaaacacattttcacactagggcacctcctatctctcccggattccaattagggcaga

SEQ ID NO: 598704 - DNA, 505 bp, Homo sapiens
ttatgacgatgaatttgtcaataatttttaggatacgacattaaaagctcaggcagtaaaagcaaaaatatatcaaacttaaaacttttgtaccacaaaggtcacaaacaacagggtaaaaggcaaactgtagaataaaagaaaataccagttgagtgtcccttatttgaaatgcttgggatgtgtttcagattttgtaatatttgcattattcttactggttgagcatctcgaattcaaacacctgagtctgcgatgctccaataagcatttcctttgagtgtcatgttggcactcaaaaagtttcagaatttggagcatttgggatttcagatttttggatcagagacattcaacctatagttgcacatcatgtatctcataagaagtgaatattcagaatacgtaaagtactcctacrgagagactaccagaagcaaagaggagcaaacacattttcacactagggcacctcctatctctcccggattccaattagggcaga

SEQ ID NO: 598705 - DNA, 609 bp, Homo sapiens
taagttaagggtaaacattcagaccccagcatcaatgttctggaatcctttgtgagggacaaacattcagaccctcgtagcagtgttctggaatactgtgtaagggacaaacattcagacctcaggagcagcgttttggtatcgtatgtgagggacaaacacgcagaccccagctgccatgttctggaatgctatgattgggtttatactgtgaacctcagaagtgttcctctgtttaattaattttctgccttaggtggaacatgactagaatgggctacagtggaaggggtaattcccttcccctaggttatttagtctctgattatactagagcagattaggctgaagttaagtagtttctcctgtggacaagccttgttaagaaccwggtactctggcacatttcaaactggttttcctttttccttcccaaaggtagaagcaggaggggagttttctcaggtatttgtcacaggagcctggtgaagccccatgagacaattttacagtattgttcccccttcccccacaataactttatctctttgtagtttttaccacttagaattgtccacgtggatcctccagtcgttcaccagttacggt

SEQ ID NO: 598706 - DNA, 609 bp, Homo sapiens
taagttaagggtaaacattcagaccccagcatcaatgttctggaatcctttgtgagggacaaacattcagaccctcgtagcagtgttctggaatactgtgtaagggacaaacattcagacctcaggagcagcgttttggtatcgtatgtgagggacaaacacgcagaccccagctgccatgttctggaatgctatgattgggtttatactgtgaacctcagaagtgttcctctgtttaattaattttctgccttaggtggaacatgactagaatgggctacagtggaaggggtaattcccttcccctaggttatttagtctctgattatactagagcagattaggctgaagttaagtagtttctcctgtggacaagccttgttaagaacctggtactctggcacatttcaaactggttttcctttttccttcccaaaggtagaagcaggaggggagttttctcaggtatttgtcacaggagcctggtgaagccccatgagacaattttacagtattgttccccctycccccacaataactttatctctttgtagtttttaccacttagaattgtccacgtggatcctccagtcgttcaccagttacggt

SEQ ID NO: 598707 - DNA, 609 bp, Homo sapiens
taagttaagggtaaacattcagaccccagcatcaatgttctggaatcctttgtgagggacaaacattcagaccctcgtagcagtgttctggaatactgtgtaagggacaaacattcagacctcaggagcagcgttttggtatcgtatgtgagggacaaacacgcagaccccagctgccatgttctggaatgctatgattgggtttatactgtgaacctcagaagtgttcctctgtttaattaattttctgccttaggtggaacatgactagaatgggctacagtggaaggggtaattcccttcccctaggttatttagtctctgattatactagagcagattaggctgaagttaagtagtttctcctgtggacaagccttgttaagaacctggtactctggcacatttcaaactggttttcctttttccttcccaaaggtagaagcaggaggggagttttctcaggtatttgtcacaggagcctggtgaagccccatgagacaattttacagtattgttcccccttcccccacaataactytatctctttgtagtttttaccacttagaattgtccacgtggatcctccagtcgttcaccagttacggt

SEQ ID NO: 598708 - DNA, 609 bp, Homo sapiens
taagttaagggtaaacattcagaccccagcatcaatgttctggaatcctttgtgagggacaaacattcagaccctcgtagcagtgttctggaatactgtgtaagggacaaacattcagacctcaggagcagcgttttggtatcgtatgtgagggacaaacacgcagaccccagctgccatgttctggaatgctatgattgggtttatactgtgaacctcagaagtgttcctctgtttaattaattttctgccttaggtggaacatgactagaatgggctacagtggaaggggtaattcccttcccctaggttatttagtctctgattatactagagcagattaggctgaagttaagtagtttctcctgtggacaagccttgttaagaacctggtactctggcacatttcaaactggttttcctttttccttcccaaaggtagaagcaggaggggagttttctcaggtatttgtcacaggagcctggtgaagccccatgagacaattttacagtattgttcccccttcccccacaataactttatctctttgtagtttttaccacttagaattgtccacgyggatcctccagtcgttcaccagttacggt

SEQ ID NO: 598709 - DNA, 504 bp, Homo sapiens
aagtcctatattcatttctctgtctctgcaatcctgggggaagtggtttgccctgtgtcctcccctgagwttcaaatctagaaacaattgtggattttttagtctcttcagctttttatttgttgttaagattatctgtgtcatattaatttgttgttaagcttgttataaaaattaattattgtaaagtaattattgattacttccaagcttcttacatgcagaaataggaacctggaatgtgtttctaaaactatcttctcaatgcctatgtgcacagttaaaggatttttttccacaggaatatggtcatgatgaattatattagacttcttaatattgaacttttctttattcgtggaataaactcagaaagttccttcttggtcttcacagtctatttctcttcctctgtaaatgttagtgtttctgtagattctgtacttgtttcttttattctttccttctcttattttcatttggtctcatggattcaggtaccat

SEQ ID NO: 598710 - DNA, 625 bp, Homo sapiens
gagtccatgttcctgtaagccattaagtcctatattcatttctctgtctctgcaatcctgggggaagtggtttgccctgtgtcctcccctgagtttcaaatctagaaacaattgtggattttttagtctcttcagctttttatttgttgttaagattawctgtgtcatattaatttgttgttaagcttgttataaaaattaattattgtaaagtaattattgattacttccaagcttcttacatgcagaaataggaacctggaatgtgtttctaaaactatcttctcaatgcctatgtgcacagttaaaggatttttttccacaggaatatggtcatgatgaattatattagacttcttaatattgaacttttctttattcgtggaataaactcagaaagttccttcttggtcttcacagtctatttctcttcctctgtaaatgttagtgtttctgtagattctgtacttgtttcttttattctttccttctcttattttcatttggtctcatggattcaggtaccattgaaattctggtaatttccaaatctttatctttagttttgatctctcttctgaaccactggagccatattcccaattgccagttgaacattcccaca

SEQ ID NO: 598711 - DNA, 625 bp, Homo sapiens
gagtccatgttcctgtaagccattaagtcctatattcatttctctgtctctgcaatcctgggggaagtggtttgccctgtgtcctcccctgagtttcaaatctagaaacaattgtggattttttagtctcttcagctttttatttgttgttaagattatytgtgtcatattaatttgttgttaagcttgttataaaaattaattattgtaaagtaattattgattacttccaagcttcttacatgcagaaataggaacctggaatgtgtttctaaaactatcttctcaatgcctatgtgcacagttaaaggatttttttccacaggaatatggtcatgatgaattatattagacttcttaatattgaacttttctttattcgtggaataaactcagaaagttccttcttggtcttcacagtctatttctcttcctctgtaaatgttagtgtttctgtagattctgtacttgtttcttttattctttccttctcttattttcatttggtctcatggattcaggtaccattgaaattctggtaatttccaaatctttatctttagttttgatctctcttctgaaccactggagccatattcccaattgccagttgaacattcccaca

SEQ ID NO: 598712 - DNA, 638 bp, Homo sapiens
tggtttcagtagtgagtccatgttcctgtaagccattaagtcctatattcatttctctgtctctgcaatcctgggggaagtggtttgccctgtgtcctcccctgagtttcaaatctagaaacaattgtggattttttagtctcttcagctttttatttgttgttaagattatctgtgtcatattaatttgttgttaagcttgttataaaaattaattattgtaaagtaattattgattacytccaagcttcttacatgcagaaataggaacctggaatgtgtttctaaaactatcttctcaatgcctatgtgcacagttaaaggatttttttccacaggaatatggtcatgatgaattatattagacttcttaatattgaacttttctttattcgtggaataaactcagaaagttccttcttggtcttcacagtctatttctcttcctctgtaaatgttagtgtttctgtagattctgtacttgtttcttttattctttccttctcttattttcatttggtctcatggattcaggtaccattgaaattctggtaatttccaaatctttatctttagttttgatctctcttctgaaccactggagccatattcccaattgccagttgaacattcccaca

SEQ ID NO: 598713 - DNA, 563 bp, Homo sapiens
cattgtcttcagtattatatgtaatctaaagatttaaagttcagtcgtgcatggcttactgatgggattactttctgagaaatgcatctttaggtaatttcattgttttgtgaayatcatagtgttacaaaaacctacatggtatgtatatttttatttatatgtttttggaatatgggtaaccagatggctcagagccattattgaatatcattttctgcacttcatctgcaatgccaatatcaggtttctgtgtatgtttcatcatcatcttatgggactattttgatatacatgtttcatcattggctgaaatgttattatgcagctcatgactgtatacaggatgatgtacataagttatatgtaaatatgagacttgtttatataagagagttatccaatctgtggattttggtatctgggtctatcttggaatcagtccccatggatactgaggaagtaatgtaatgtaaaaatgataggtgcataaaaatttttgaaattaggtcaaatatttaaatgcagaatcactgcataatcaattccttaaatattgcatt

SEQ ID NO: 598714 - DNA, 645 bp, Homo sapiens
tttaggtaatttcattgttttgtgaatatcatagtgttacaaaaacctacatggtatgtatatttttatttatatgtttttggaatatgggtaaccagatggctcagagccattattgaatatcattttctgcacttcatctgcaatgccaatatcaggtttctgtgtatgtttcatcatcatcttatgggactattttgatatacatgtttcatcattggctgaaatgttattatgcagctcatgactgtatacaggatgatgtacataagttatatgtaaatatgagacttgtttatataagagagttatccaatctgtggattttggtatctgggtctatcttggaatcagtccccwtggatactgaggaagtaatgtaatgtaaaaatgataggtgcataaaaatttttgaaattaggtcaaatatttaaatgcagaatcactgcataatcaattccttaaatattgcatttagctttcatcactgaccaggatcattcatctaggcatggtgctgtccagagttccattaaagtggtgtgtgttctctttgcctttgtcagtagacttctgatactttctcatagtcatgagaattcatggttcatgtggaagagccaaacacctgatttttcagtaaag

SEQ ID NO: 598715 - DNA, 606 bp, Homo sapiens
cagtccccatggatactgaggaagtaatgtaatgtaaaaatgataggtgcataaaaatttttgaaattaggtcaaatatttaaatgcagaatcactgcataatcaattccttaaatattgcatttagctttcatcactgaccaggatcattcatctaggcatggtgctgtccagagttccattaaagtrgtgtgtgttctctttgcctttgtcagtagacttctgatactttctcatagtcatgagaattcatggttcatgtggaagagccaaacacctgatttttcagtaaagtggaacctcatgatgcaaaagaaacaaaatttattttctccttctctcttatcttagtctgcattgaacttgtgtctcaatgagttcacctaaacattattcccagtatgtgtttatacttatatattcataaccaaatcatgagctcctttgaggagtagaattttattcctcttttttttttttaagagataggctctctgttggccaggctggagtgcagtggtgtgatcatcactcactgcactgtcaaactcctgggcttgagcaatccttcagcctcagcttacagagtagccaggactacaggca

SEQ ID NO: 598716 - DNA, 598 bp, Homo sapiens
ccaaacacctgatttttcagtaaagtggaacctcatgatgcaaaagaaacaaaatttattttctccttctctcttatcttagtctgcattgaacttgtgtctcaatgagttcacctaaacattattcccagtatgtgtttatacttatatattcataaccaaatcatgagctcctttgaggagtagaattttattcctcttttttttttttragagataggctctctgttggccaggctggagtgcagtggtgtgatcatcactcactgcactgtcaaactcctgggcttgagcaatccttcagcctcagcttacagagtagccaggactacaggcatccagcattatgcctatttttttttcttacttttgaagagagagggtcttgcattttgtttatacttttatccctagcaacaagggtggttctagatctataaggtgaactttgtaatacaattttattaattcataagttattacagtggaagcatatttctactgtgattactccttctcccaccataaacagtacaaaacaaactacgtcttatctaaaatacatataagacacatggacacacaaaagagtgaattc

SEQ ID NO: 598717 - DNA, 604 bp, Homo sapiens
agcatatttctactgtgattactccttctcccaccataaacagtacaaaacaaactacgtcttatctaaaatacatataagacacatggacacacaaaagagtgaattcccagattcttgttttttgaccctgggctgatgctttgacttgaggaaatatgtgccattacaggggttkgtgtcctttgaagatgtggctctgcactttacctgggaggagtgtcaggacctggatgatgttcagaggaccctgtacagggacgtgatggtggagactggtatcattgggtgagtgaacttcccagtaactcccaggaatgtgttttgttgttggtaaatataggaacccttttaaggtataataatatttacttgtaggattctggttgatgaaaaatgtgtcattactctgtaatgaaatgttcaaattggctccttcattacacagtccctgaagcccagctcttgtcattctgaaaaggatttgacttagtgatttcacaaagtattccattgtttctcattaccagggcattgcattaccaaacctgagatgatcttcaagctagaacaaggagcagagccatggatagtagaagaaacc

SEQ ID NO: 598718 - DNA, 635 bp, Homo sapiens
caaactcctgggcttgagcaatccttcagcctcagcttacagagtagccaggactacaggcatccagcattatgcctatttttttttcttacttttgaagagagagggtcttgcattttgtttatacttttatccctagcaacaagggtggttctagatctataaggtgaactttgtaatacaattttattaattcataagttattacagtggaagcatatttctactgtgattactccttctcccaccataaacagtacaaaacaaactacgtcttatctaaaatacatataagacacatggacacacaaaagagtgaattcccagattcttgttttttgaccctgggctgatgctttgacttgaggaaatatgtgccattacaggggtttgtgtcctttgaagatgtggctctgcactttacctgggaggagtgtcaggacctggatgatgttcagaggaccctgtacagggacgtgatggtggagactggtatcattgggtgagtgaacttcccagtaactcccaggaatgtgttttgttgttggtaaatatagraacccttttaaggtataataatatttacttgtaggattctggttgatgaaaaatgtgtcattactctgtaatgaaat

SEQ ID NO: 598719 - DNA, 552 bp, Homo sapiens
aggaccctgtacagggacgtgatggtggagactggtatcattgggtgagtgaacttcccagtaactcccaggaatgtgttttgttgttggtaaatataggaacccttttaaggtataataatatttacttgtaggattctggttgatgaaaaatgtgtcattactctgtaatgaaatgttcaaattggctccttcattacacagtccctgaagcccagctcttgtcattctgaaaaggatttgacttagtgatttsacaaagtattccattgtttctcattaccagggcattgcattaccaaacctgagatgatcttcaagctagaacaaggagcagagccatggatagtagaagaaaccccaaacctgagactttcaggtcagtcagtgaatactggagagggaggcctggaggagtaatgcccagcagattttggtagtgttatcttgttttcaccacttttttccctaggtcttcgacctgaagactgttggtctgtattaaatatccattatatagtccccaggggtaactctcatgcatatatccca

SEQ ID NO: 598720 - DNA, 570 bp, Homo sapiens
tgatgaaaaatgtgtcattactctgtaatgaaatgttcaaattggctccttcattacacagtccctgaagcccagctcttgtcattctgaaaaggatttgacttagtgatttcacaaagtattccattgtttctcattaccagggcattgcattaccaaacctgagatgatcttcaagctagaacaaggagcagagccatggatagtagaagaaaccccaaacctgagactttcaggtcagtcagtgaatactggrgagggaggcctggaggagtaatgcccagcagattttggtagtgttatcttgttttcaccacttttttccctaggtcttcgacctgaagactgttggtctgtattaaatatccattatatagtccccaggggtaactctcatgcatatatcccagtctcttatttttctgagtatcttcttctatttacctcaaatccaatccctgccatcctctctttaggcctttttctttgctatttattttctctatttcccccttttcctctattctgatgtagtgtcttaaaaaattttttagacattcatgcatttat

SEQ ID NO: 598721 - DNA, 460 bp, Homo sapiens
cccagtctcttatttttctgagtatcttcttctatttacctcaaatccaatccctgccatcctctctttaggcctttttctttgctatttattttctctatttcccccttttcctctattctgatgtagtgtcttaaaaaattttttagacattcatgcatttatttatcctttsaatgtatcttaggcgatttttgagaatcagtcattataacaatgatgatgaaaatagtgtttctttttaagctgtagctttattcttcttgttttatttataataaaacagatggttctcactctgttctcagactcaagggcagtggcatgattatagttcactgtaacgatgaactcctgggatcaagtgttcctcacagcctagcctcccaagtaggtaggactacaggtgtgtgccaccacacctggctaattttttattgtttgtggagatgaggtcttg

SEQ ID NO: 598722 - DNA, 460 bp, Homo sapiens
cccagtctcttatttttctgagtatcttcttctatttacctcaaatccaatccctgccatcctctctttaggcctttttctttgctatttattttctctatttcccccttttcctctattctgatgtagtgtcttaaaaaattttttagacattcatgcatttatttatcctttcaatgtatcttaggcgatttttgagaatcagtcattataacaatgatgatgaaaatagtgtttctttttaagctgtagctttattcttcttgttttatttataataaaacagatggttctcactctgttctcagactcaagkgcagtggcatgattatagttcactgtaacgatgaactcctgggatcaagtgttcctcacagcctagcctcccaagtaggtaggactacaggtgtgtgccaccacacctggctaattttttattgtttgtggagatgaggtcttg

SEQ ID NO: 598723 - DNA, 412 bp, Homo sapiens
atcttaggcgatttttgagaatcagtcattataacaatgatgatgaaaatagtgtttctttttaagctgtagctttattcttcttgttttatttataataaaacagatggttctcactctgttctcagactcaagggcagtggcatgattatagttcactgtaacgatgaactcctgggatcaagtgttcctcacagcctagcctcccaagtaggtaggactacaggtgtgtgccaccacacctggctaattttttattgtttgtggagatgaggtcttgttctattgcccaggctggtctcaracttctggccttaaatgatccttgtagactcccacccacacacacaaaaaaaatagtagctgagtatggtgacatgggtttgtaatcccagtttttatacttgggagg

SEQ ID NO: 598724 - DNA, 524 bp, Homo sapiens
aggtaggactacaggtgtgtgccaccacacctggctaattttttattgtttgtggagatgaggtcttgttctattgcccaggctggtctcagacttctggccttaaatgatccttgtagactcccacccacacacacaaaaaaaatagtagctgagtatggtgacatgggtttgtaatcccagtttttatacttgggaggttgaggtggaaggattgcttgagctcaggagtttgaagcttcagtgagctatgatagcaacactgcactccagcctgggtaacagagtaagatcctgtctcagaaagaaattatgaarctgaggagaacccatcataggggcctggataggggtggtgctggacttgggaggataaccagaagattctcggtctcaagtccaaagaaaccaatgatttcctgttgaagggctcagatttctgtttgagagtggagtttgtagttatcatttgaagatgagaaatgtacaggaaacttcatttttatatataactgtgtgacatc

SEQ ID NO: 598725 - DNA, 511 bp, Homo sapiens
ttataaataatggaaacagttcagaaatgaagcctgggcagtttaatgtctgccagaacgtgcttttccctattaagcctggtgagacacagtctggagagaaacctcatgtccttgatataaccaggagatcccacagacgtcatgaacatcttactcagcatcacaagattcaaactctgctgcaggccttttcaatgtaatgaacaagtgaaaaccttcaacatggaggcaatgttctttatacataagagggttcatataggacagacckttggtaaatataatgaatatgagaaagcctgtaataactgagctattattgtccaagggataactcaggtaggacagccaacttgctgtagaaagtctgacttcaccaaacatcagcaaacacacacaggagagaaaccccatgaatgtgttgaatgtgagaaaccctccattagcaaatcagaccttatgatacagcacaagatgcctactgaggaaaaaccttatgcctgtaact

SEQ ID NO: 598726 - DNA, 631 bp, Homo sapiens
aatgaatgtggaaaaacctttcatcagaagtcaaatctcagcacccatcagggaacacacacaggggagaaaccttacatatgaaatgaatgtggaaaaacctttcattgcaagtcattcctcaccatacaccagagtactcacacggggagaaaccgtatggatgtaacgaaagtggaaaaactttttgtcagaaatcataccttattatacatcagagaactcacactggggaaaagctctatgaatgtaatgaatgtggaaaatcctttcatcagaaggcaaatmttcagaagcatcaaggtattcacacgggggagaaaccctatgaatgtagcaaatgtggaaaaaccttcagtcagaagtcagtcctcactgtacatcatagaactcagactggagaaaaactttctgatgtaatcagtgtgggaaactttttgttacaagtcaaacttcaatatgcatcaggggaatcactcaggagagaaaccttgtgattgtgatgatgtaggacactttttaccataaggcagttctcaccatacatcagagaacttacacaggtgagaagccatttgaatgtaagaaaaccttctcccagaagtcaaaactctttgtacagcacagaact

SEQ ID NO: 598727 - DNA, 605 bp, Homo sapiens
cagagtactcacacggggagaaaccgtatggatgtaacgaaagtggaaaaactttttgtcagaaatcataccttattatacatcagagaactcacactggggaaaagctctatgaatgtaatgaatgtggaaaatcctttcatcagaaggcaaatcttcagaagcatcaaggtattcacacgggggagaaaccctatgaatgtagcaaatgtggaaaaaccttcagtcagaagtcagtcctcactgtacatcatagaactcagactggagaaaaactttctgatgtaatcagtgtgggaaactttttgttacaagtcaaacttcaatatgcatcaggggaatcactcaggagagaaaccttgtgattgtgatgatgtaggacactttttaccataaggcagttctcaccatacatcagagaacttacacaggtgagaagccatttgaatgtaagaaaaccttctcccagaagtcaaaactctttgtacagcacagaactcacacaggggaataacmctttagttataatgaatgtaggaaaactttctcccagaagccaggcctcagtatacatcagagaacacacacaggagaaaaaccttata

SEQ ID NO: 598728 - DNA, 401 bp, Homo sapiens
gatatagctgacgcaggctatgtattccctcaaaatcactttttttcccttgaacacacaacctacacctctccagstactactatagatttctccatgctcagtctaggagaatatggacacaaatggtgaccattacctcctgacctaccaacaagaaagttataaccatgctgtaacagaagtgctatcatgcaggctttcttgttcccatttttacagcacacttcacactttaatgtcacagatatggctgttttcctagaagctcatgtaccaacctctgccagcttcaaacatttcttctgcaactttctcacctctcttctcctccatagaattgaagagagttagggcctttctcaggattaggctttgtctcaagggaattttggggctgg

SEQ ID NO: 598729 - DNA, 637 bp, Homo sapiens
atcactttttttcccttgaacacacaacctacacctctccaggtactactatagatttctccatgctcagtctaggagaatatggacacaaatggtgaccattacctcctgacctaccaacaagaargttataaccatgctgtaacagaagtgctatcatgcaggctttcttgttcccatttttacagcacacttcacactttaatgtcacagatatggctgttttcctagaagctcatgtaccaacctctgccagcttcaaacatttcttctgcaactttctcacctctcttctcctccatagaattgaagagagttagggcctttctcaggattaggctttgtctcaagggaattttggggctggtttgatcttctatgcagaccactcagactttctctgtgtcagtaaaaaatctgttttttttttaaatcattcatgtgttcactggagtagcacctataacttccttcaagaactttttgtttccattcacaacttgggtagctcatgcaaaaagcttatctttggcctgtcttagcttctaacatgctttcttcactaagcttgatgatttctacctcttgatttgaagtgacagatgtgaacacttcttttcacttgaatacatagtgg

SEQ ID NO: 598730 - DNA, 613 bp, Homo sapiens
caggctttcttgttcccatttttacagcacacttcacactttaatgtcacagatatggctgttttcctagaagctcatgtaccaacctctgccagcttcaaacatttcttctgcaactttctcacctctcttctcctccatagaattgaagagagttagggcctttctcaggattaggctttgtctcaagggaattttggggctggtttgatcttctatgcagaccactcagactttctctgtgtcagtaaaaaatctgktttttttttaaatcattcatgtgttcactggagtagcacctataacttccttcaagaactttttgtttccattcacaacttgggtagctcatgcaaaaagcttatctttggcctgtcttagcttctaacatgctttcttcactaagcttgatgatttctacctcttgatttgaagtgacagatgtgaacacttcttttcacttgaatacatagtggccactgcagactggaggggcctaatttcattgttgtatcttggggaacggggggctggaagagagaaatggagatagggaaatgactagccaatgaaacagtcaaacacaacacttttccattgtttttactgtctt

SEQ ID NO: 598731 - DNA, 514 bp, Homo sapiens
ctcctgcctcagcctctggagtagttaggactacaggcttctgccaccatgcctggctaattttttgtatttttagtggagacggggtttcaycatgttagccaggatggtctcgatctcctgacctcgtgatccacccaccttggcctcccacagtactgggattagaggcatgagccaccaagcccggcctgaatgtgatttttgtttgtctgtaggtttctttgtttctctttctttgtttctttgtttctctataggtaggatgttgtccactccacctttgctctgttggagctgctgttttgtacagttggagaataacatgcctagctgtaggtttttagcatgtgtcctgtctggtgcactctgagcttccgatctttgattttgtgtctgacattaacagtggaagttgtcagacatgactgttgcagatgtttcttctacttctctctcttctccttctagtattctcatcactctatgttacaccttttctagctgtcctaca

SEQ ID NO: 598732 - DNA, 402 bp, Homo sapiens
caaagtgctggggttacaggtgtgagcctccatgcccagcctaatttttttatttttagtagagatgggggtttgccatgttgaccaggctggtcttgaacttctgacttcaggttatctgcccaccttggtctcccaaagtgctgggattacaggcatgagccactgcacctggccacttctaagcttcttacatgcagaaatcagaacctggaatctgtttctatgacttttcttcttaatgcctatgtggacaattaaaggatttttcttctcaggactctgaatatgatgaattgtattagtagactttctaatattgagctkttcttaatttgtgaaataaactcagaaagttccttcttggtcttaacagtttatttctctttgtaaatattaggg

SEQ ID NO: 598733 - DNA, 564 bp, Homo sapiens
tgttggtcagggtggtctcaaactcctgacctcaggtgatccagccacctcagcctcttagagtgctgggattacagatgtgagctgctgtgcctggtctgatagctcatctttacagtgcataggacagaactcagagtcatccctctgcccacctgacacaaatgcatatctgattgttcccctccctgtttgtctatgttatgtataaatgcagattcactgagacaaaggcatgaatgactgtatcagtctgttctcatactgctctgaagaaatactcaagactgggtcayttataaaggaaagaggtttaattgactcacagctctgcatgactggggaggcctcaggaaacttacaataatggcagagagcagctcttcacgggggggcaggagagactttgagtgcaagcaggggaaaggccagacacttacaaaaccatcagatctcatgtgactcattatcatgagaacagcatagaggaaactgctttgatgatccaattacttccacctggccccacccttgacacatggggattattacaatttatggtga

SEQ ID NO: 598734 - DNA, 564 bp, Homo sapiens
tgttggtcagggtggtctcaaactcctgacctcaggtgatccagccacctcagcctcttagagtgctgggattacagatgtgagctgctgtgcctggtctgatagctcatctttacagtgcataggacagaactcagagtcatccctctgcccacctgacacaaatgcatatctgattgttcccctccctgtttgtctatgttatgtataaatgcagattcactgagacaaaggcatgaatgactgtatcagtctgttctcatactgctctgaagaaatactcaagactgggtcatttataaaggaaagaggtttaattgactcacagctctgcatgactggggaggcctcaggaaacttacaataatgrcagagagcagctcttcacgggggggcaggagagactttgagtgcaagcaggggaaaggccagacacttacaaaaccatcagatctcatgtgactcattatcatgagaacagcatagaggaaactgctttgatgatccaattacttccacctggccccacccttgacacatggggattattacaatttatggtga

SEQ ID NO: 598735 - DNA, 593 bp, Homo sapiens
gggaaaggccagacacttacaaaaccatcagatctcatgtgactcattatcatgagaacagcatagaggaaactgctttgatgatccaattacttccacctggccccacccttgacacatggggattattacaatttatggtgaaatttgggtggggacacagagccaaaccatatcaatgaatgttttccccctaccccagtcttacatgaaaactgtatttctcagtgtttcaccctttcccctttaaatttggagccctcataatcatttttaaagaaaggcatagacttgtctcctgggtgtgcatccttaatgttgrcaaataaacctcttaaaatgattgagatttgtctcggtcatgtttcctgattgaccgaagtgttccagagatgatataaagtacactcatgcatggcttaatgacatgtgtatgttctgagacatgcattactaagcaacatttttgttttgtgaacatcataaagtgtgcttacataatcctagatggtatatatgtttatattttttcttatgagaaatcatatgttctaacaccatcattgaatatcagtcactttccctacttgatc

SEQ ID NO: 598736 - DNA, 580 bp, Homo sapiens
tgaaaatatttatcttccttgatacttactactctttctgctttctctctctcatattgaaagagactttcttttaaatgatcacattcattcattagcttcttatttttctcttctagcatgtggtctttctttccactctcaataaagcctctttggatattagttaytatctctttatgatcctctttctgatgaacatcatctagttgctgttcaatgcacggattttcatgttggagttgacatatcctctcttctacacagctccactttccagtggaattattcactttagcttctgcattttcatacatctctttcatttcctttatttgctgctgtgtttggcttaggtcgtttggagagtttctaaagccaatgacttttttctgagagtatctcttttcttacggaacttatcttttaaggtattgaatttaatttgctttttagaaagttgttcagtaagaaactcattcttatcttctacttcggaaatatcagaactcatttttacttgtacggaaacatcttgtgttcactctaatgcaagttttacgtttctttctgttttcac

SEQ ID NO: 598737 - DNA, 580 bp, Homo sapiens
tgaaaatatttatcttccttgatacttactactctttctgctttctctctctcatattgaaagagactttcttttaaatgatcacattcattcattagcttcttatttttctcttctagcatgtggtctttctttccactctcaataaagcctctttggatattagttattatctctttatgatcctctttctgatgaacatcatctagttgctgttcaatgcacggattttcatgttggagttgacatatcctctcttctacacagctccactttccagtggaattattcactttagcttctgcattttcatacatctctttcatttcctttatttgctgctgtgtttggcttaggtcgtttggagagtttctaaagccaatgacttttttctgagagtatctctttwcttacggaacttatcttttaaggtattgaatttaatttgctttttagaaagttgttcagtaagaaactcattcttatcttctacttcggaaatatcagaactcatttttacttgtacggaaacatcttgtgttcactctaatgcaagttttacgtttctttctgttttcac

SEQ ID NO: 598738 - DNA, 580 bp, Homo sapiens
tgaaaatatttatcttccttgatacttactactctttctgctttctctctctcatattgaaagagactttcttttaaatgatcacattcattcattagcttcttatttttctcttctagcatgtggtctttctttccactctcaataaagcctctttggatattagttattatctctttatgatcctctttctgatgaacatcatctagttgctgttcaatgcacggattttcatgttggagttgacatatcctctcttctacacagctccactttccagtggaattattcactttagcttctgcattttcatacatctctttcatttcctttatttgctgctgtgtttggcttaggtcgtttggagagtttctaaagccaatgacttttttctgagagtatctcttttcttacggaacttatcttttaaggtattgaatttaatttgctttttagaaagttgttcagtaagaaactcattcttatcttctacttcggaaatatcagaactcatttttacttgtamggaaacatcttgtgttcactctaatgcaagttttacgtttctttctgttttcac

SEQ ID NO: 598739 - DNA, 563 bp, Homo sapiens
atcctctttctgatgaacatcatctagttgctgttcaatgcacggattttcatgttggagttgacatatcctctcttctacacagctccactttccagtggaattattcactttagcttctgcattttcatacatctctttcatttcctttatttgctgctgtgtttggcttaggtcgtttggagagtttctaaagccaatgacttttttctgagagtatctcttttcttacggaacttatcttttaaggtattgaatttaatttgctttttagaaagttgttcagtaagaaactcattcttatcttctacttcggaaatatcagaactcatttttacttgtacggaaacatcttgtgttcactctaatgcaagttttasgtttctttctgttttcacactttcactgtgcttacttatagcagcagtcagtctagactgatgattcaatttcagcttccagtcttttgttgctttcttcttccttcaacagttcggaattgagccttgtattctcagctttgagatcattaagctcttgttgataccggaatgctgtttttg

SEQ ID NO: 598740 - DNA, 572 bp, Homo sapiens
ctctcttctacacagctccactttccagtggaattattcactttagcttctgcattttcatacatctctttcatttcctttatttgctgctgtgtttggcttaggtcgtttggagagtttctaaagccaatgacttttttctgagagtatctcttttcttacggaacttatcttttaaggtattgaatttaatttgctttttagaaagttgttcagtaagaaactcattcttatcttctacttcggaaatatcagaactcatttttacttgtacggaaacatcttgtgttcactctaatgcaagttttacgtttctttctgttttcacactttcactgtgcttacttatagcagcagtcagtctagactgatgattcaatttcagcttccagtcttttgttgctttcttcttccttcaacagttcggaattgagccttgtattctcagctttgagatcattaagctcttgttgataccggaatgctgttyttgttatcaattcctcattgagttttatatacttttcaagggcagcatttgtttttttaacaattttagcgtccttaagata

SEQ ID NO: 598741 - DNA, 572 bp, Homo sapiens
ctctcttctacacagctccactttccagtggaattattcactttagcttctgcattttcatacatctctttcatttcctttatttgctgctgtgtttggcttaggtcgtttggagagtttctaaagccaatgacttttttctgagagtatctcttttcttacggaacttatcttttaaggtattgaatttaatttgctttttagaaagttgttcagtaagaaactcattcttatcttctacttcggaaatatcagaactcatttttacttgtacggaaacatcttgtgttcactctaatgcaagttttacgtttctttctgttttcacactttcactgtgcttacttatagcagcagtcagtctagactgatgattcaatttcagcttccagtcttttgttgctttcttcttccttcaacagttcggaattgagccttgtattctcagctttgagatcattaagctcttgttgataccggaatgctgtttttgttatcaattcctcattgagttttatatacttttcaagggcagcrtttgtttttttaacaattttagcgtccttaagata

SEQ ID NO: 598742 - DNA, 572 bp, Homo sapiens
ctctcttctacacagctccactttccagtggaattattcactttagcttctgcattttcatacatctctttcatttcctttatttgctgctgtgtttggcttaggtcgtttggagagtttctaaagccaatgacttttttctgagagtatctcttttcttacggaacttatcttttaaggtattgaatttaatttgctttttagaaagttgttcagtaagaaactcattcttatcttctacttcggaaatatcagaactcatttttacttgtacggaaacatcttgtgttcactctaatgcaagttttacgtttctttctgttttcacactttcactgtgcttacttatagcagcagtcagtctagactgatgattcaatttcagcttccagtcttttgttgctttcttcttccttcaacagttcggaattgagccttgtattctcagctttgagatcattaagctcttgttgataccggaatgctgtttttgttatcaattcctcattgagttttatatacttttcaagggcagcatttgtttttttaacaattttarcgtccttaagata

SEQ ID NO: 598743 - DNA, 567 bp, Homo sapiens
agtcagtctagactgatgattcaatttcagcttccagtcttttgttgctttcttcttccttcaacagttcggaattgagccttgtattctcagctttgagatcattaagctcttgttgataccggaatgctgtttttgttatcaattcctcattgagttttatatacttttcaagggcagcatttgtttttttaacaattttagcgtccttaagatatttattttctttttccaggttgtcatttttcattgtgcatatttcctgtcggagtatmgcaatatctgtcttcaaaatgcaattttcatccatcagatctttcatttcttcctgattatgaaaatcctaaataaaacaaaagaaagttttagctagtactcaataaaatatcatgattacctctgaagttaaagaataacctgcacatccatatactaaaaaggttactgtaagtggatatccaactggagaaaaagttgaagcaaaactttgtactttatagagcataagttccaaaaagttcagaaatttatttaaagtcaatgaatttataaaagtaaacacacaca

SEQ ID NO: 598744 - DNA, 595 bp, Homo sapiens
actgtaagtggatatccaactggagaaaaagttgaagcaaaactttgwactttatagagcataagttccaaaaagttcagaaatttatttaaagtcaatgaatttataaaagtaaacacacacacacacacgcacaccagagaatttttaagaatttcagaattggaaaagcctttccctgaattacaagaaactcaaaagcataaattaaagcattaacaaatttgactaaattaaaagatatcaaaaattgcatttacactttgatatctaacccatacaccaccctatagtaagaaccttatttcacacatatttggacagataaaatttcccagagttattacagttctgtttcactgataacattctattttaatttgactcttttaacacttttatagtcagttgaaagaattacatttactaaatcataaatctagacattatactagtcactcctatatacattcattgatgaactcatctagttaccacaaatttgaaaaagaaatgttaaaaatataagcaagctacaggattttccccaggacttcttactctacttctagttctctgacagatcacagttact

SEQ ID NO: 598745 - DNA, 595 bp, Homo sapiens
actgtaagtggatatccaactggagaaaaagttgaagcaaaactttgtactttatagagcataagttccaaaaagttcagaaatttatttaaagtcaatgaatttataaaagtaaacacacacacacacacgcacaccagagaatttttaagaatttcagaattggaaaagcctttccctgaattacaasaaactcaaaagcataaattaaagcattaacaaatttgactaaattaaaagatatcaaaaattgcatttacactttgatatctaacccatacaccaccctatagtaagaaccttatttcacacatatttggacagataaaatttcccagagttattacagttctgtttcactgataacattctattttaatttgactcttttaacacttttatagtcagttgaaagaattacatttactaaatcataaatctagacattatactagtcactcctatatacattcattgatgaactcatctagttaccacaaatttgaaaaagaaatgttaaaaatataagcaagctacaggattttccccaggacttcttactctacttctagttctctgacagatcacagttact

SEQ ID NO: 598746 - DNA, 597 bp, Homo sapiens
tggacagataaaatttcccagagttattacagttctgtttcactgataacattctattttaatttgactcttttaacacttttatagtcagttgaaagaattacatttactaaatcataaatctagacattatactagtcactcctatatacattcattgatgaacycatctagttaccacaaatttgaaaaagaaatgttaaaaatataagcaagctacaggattttccccaggacttcttactctacttctagttctctgacagatcacagttacttctgtggtgtaaatgtatcaatacgaaagaaaacttttatttcaaaacaccaatggtaaataagataaaatttatagagctcttcttagaatatcatgagattatttgtgattgcaataatttgtttcctctttatagtattaggtacagtaatcaatatgaaatggcgggaagtacaaggaacaattttactgggaacaaaatctttatcaataggttatcactaagtatatattatggcatattattgttttcaaaagctctttgtaataaaataatatcctatgtggatgccaagatttataataaaaataattgt

SEQ ID NO: 598747 - DNA, 597 bp, Homo sapiens
tggacagataaaatttcccagagttattacagttctgtttcactgataacattctattttaatttgactcttttaacacttttatagtcagttgaaagaattacatttactaaatcataaatctagacattatactagtcactcctatatacattcattgatgaactcatctagttaccacaaatttgaaaaagaaatgttaaaaatataagcaagctacaggattttccccaggacttcttactctacttctagttctctgacagatcacagttacttctgtggtgtaaatgtatcaatacgaaagaaaacwtttatttcaaaacaccaatggtaaataagataaaatttatagagctcttcttagaatatcatgagattatttgtgattgcaataatttgtttcctctttatagtattaggtacagtaatcaatatgaaatggcgggaagtacaaggaacaattttactgggaacaaaatctttatcaataggttatcactaagtatatattatggcatattattgttttcaaaagctctttgtaataaaataatatcctatgtggatgccaagatttataataaaaataattgt

SEQ ID NO: 598748 - DNA, 609 bp, Homo sapiens
atcctatgtggatgccaagatttataataaaaataattgtacctgtaagtgtcatcattcattttttaaaaatgagataacatttctggtttgttttagaccaaaatattatatattaaatcaagaggatattataagtaacattgataaaataaagtttaaaatatagaatttttaccaaagattgatttatctgatttggagtatttcttgtagtcttcggtttcatctctagtgattcaatagttggttcaagttgttttgcttcaacttctttcttatattgtttctctttcctttctaattcttctctatttttttgtacagcatattaacrtttgttttttcttcactttcttgtcttaagatgcatctgcagacgaagacatttatcttaaaattcattttgttaaaaaataaagaaatcatcctgtgatctacctctgcagatgctctttatcatcctagtaaaatttctatgttctggattatttttcctttgtagttctcaaatatttaatttctcacttcaacatcttcaaacgaatgcatatacttgaaaagtagtaaggaaagaatattctactaaagtttttattactagtcact

SEQ ID NO: 598749 - DNA, 614 bp, Homo sapiens
atttataataaaaataattgtacctgtaagtgtcatcattcattttttaaaaatgagataacatttctggtttgttttagaccaaaatattatatattaaatcaagaggatattataagtaacattgataaaataaagtttaaaatatagaatttttaccaaagattgatttatctgatttggagtatttcttgtagtcttcggtttcatctctagtgattcaatagttggttcaagttgttttgcttcaacttctttcttatattgtttctctttcctttctaattcttctctatttttttgtacagcatattaacatttgttttttcttcactttcttgtcttaagatgcatctgcagacraagacatttatcttaaaattcattttgttaaaaaataaagaaatcatcctgtgatctacctctgcagatgctctttatcatcctagtaaaatttctatgttctggattatttttcctttgtagttctcaaatatttaatttctcacttcaacatcttcaaacgaatgcatatacttgaaaagtagtaaggaaagaatattctactaaagtttttattactagtcactctagtatgtattatacaaaaagat

SEQ ID NO: 598750 - DNA, 614 bp, Homo sapiens
atttataataaaaataattgtacctgtaagtgtcatcattcattttttaaaaatgagataacatttctggtttgttttagaccaaaatattatatattaaatcaagaggatattataagtaacattgataaaataaagtttaaaatatagaatttttaccaaagattgatttatctgatttggagtatttcttgtagtcttcggtttcatctctagtgattcaatagttggttcaagttgttttgcttcaacttctttcttatattgtttctctttcctttctaattcttctctatttttttgtacagcatattaacatttgttttttcttcactttcttgtcttaagatgcatctgcagacgaagacatttatcttaaaattcattttgttaaaaaataaagaratcatcctgtgatctacctctgcagatgctctttatcatcctagtaaaatttctatgttctggattatttttcctttgtagttctcaaatatttaatttctcacttcaacatcttcaaacgaatgcatatacttgaaaagtagtaaggaaagaatattctactaaagtttttattactagtcactctagtatgtattatacaaaaagat

SEQ ID NO: 598751 - DNA, 562 bp, Homo sapiens
tcttaaaattcattttgttaaaaaataaagaaatcatcctgtgatctacctctgcagatgctctttatcatcctagtaaaatttctatgttctggattatttttcctttgtagttctcaaatatttaatttctcacttcaacatcttcaaacgaatgcatatacttgaaaagtagtaaggaaagaatattctrctaaagtttttattactagtcactctagtatgtattatacaaaaagatactggaaataattcagtatagttagaagttcaaaactaccttttcaaatcacacagtcataattactacctgattagaaaaggtcatttacaatcaactaaatttttaaagttactatttattgacaagcgtataagttcactagaaataagttttcatctctatgaaatattgcaggtgtctctccaaatgatttacagagtaagatgtctctcacacaaactgtatctgcagattattgtcatctaaaactaggctaaagagtctaacatctgtcaccccacacttttcctaattctttcttaatacttccaattcacc

SEQ ID NO: 598752 - DNA, 562 bp, Homo sapiens
tcttaaaattcattttgttaaaaaataaagaaatcatcctgtgatctacctctgcagatgctctttatcatcctagtaaaatttctatgttctggattatttttcctttgtagttctcaaatatttaatttctcacttcaacatcttcaaacgaatgcatatacttgaaaagtagtaaggaaagaatattctactaaagtttttattactagtcactctagtatgtattatacaaaaagatactggaaataattcagtatagttagaagttcaaaactaccttttcaaatcacacagtcataattactacctgattagaaaaggtcatttacaatcaactaaatttttaaagttactatttattgacaagcgtataagttcactagaaataagttttcatctctatgaaatattgcaggtgtctctccaaatgatttacagagtaagatgtctctcacacaaactrtatctgcagattattgtcatctaaaactaggctaaagagtctaacatctgtcaccccacacttttcctaattctttcttaatacttccaattcacc

SEQ ID NO: 598753 - DNA, 516 bp, Homo sapiens
gtcatctaaaactaggctaaagagtctaacatctgtcaccccacacttttcctaattctttcttaatacttccarttcaccttcttattacatatatttgatatatttatgaagctattgttcattatgtgtaatatataattaatgcccttaataagtgtgtgtatgtttacacaagtcatgttttcctgtgaaatctagtcccagaagtggagttgttgagttaaagggatgtcaggttatttgaaattttgataaacagcactaagttacccttcagaagtaatttacaaatttcatataccaacagtgtatgagaatgcctttttcctctcattttcaatggtaggaattactttttcaatatcagcatgactttacaaaatatatcttattttatgttaatttgcatttttctgattaccaggcagggctaaatatccctggtaaaactataaaactttttaatcataatgaacattagtccaattttgaattagtttatagcacaatgac

SEQ ID NO: 598754 - DNA, 606 bp, Homo sapiens
gatttacagagtaagatgtctctcacacaaactgtatctgcagattattgtcatctaaaactaggctaaagagtctaacatctgtcaccccacacttttcctaattctttcttaatacttccaattcaccttcttattacatatatttgatatatttatgaagctattgttcattatgtgtaatatataattaatgcccttaataagtgtgtgtatgtttacacaagtcatgttttcctgtgaaatctagtcccagaagtggagttgttgagttaargggatgtcaggttatttgaaattttgataaacagcactaagttacccttcagaagtaatttacaaatttcatataccaacagtgtatgagaatgcctttttcctctcattttcaatggtaggaattactttttcaatatcagcatgactttacaaaatatatcttattttatgttaatttgcatttttctgattaccaggcagggctaaatatccctggtaaaactataaaactttttaatcataatgaacattagtccaattttgaattagtttatagcacaatgacaattatctgctgagaaatactgctataggtggccaggcacg

SEQ ID NO: 598755 - DNA, 525 bp, Homo sapiens
gtctctccaaatgatttacagagtaagatgtctctcacacaaactgtatctgcagattattgtcatctaaaactaggctaaagagtctaacatctgtcaccccacacttttcctaattctttcttaatacttccaattcaccttcttattacatatatttgatatatttatgaagctattgttcattatgtgtaatatataattaatgcccttaataagtgtgtgtatgtttacacaagtcatgttttcctgtgaaatctagtcccagaagtggagttgttgagttaaagggatgtcaggttatttgaaattttgatamacagcactaagttacccttcagaagtaatttacaaatttcatataccaacagtgtatgagaatgcctttttcctctcattttcaatggtaggaattactttttcaatatcagcatgactttacaaaatatatcttattttatgttaatttgcatttttctgattaccaggcagggctaaatatccctggtaaaactataaaacttt

SEQ ID NO: 598756 - DNA, 525 bp, Homo sapiens
gtctctccaaatgatttacagagtaagatgtctctcacacaaactgtatctgcagattattgtcatctaaaactaggctaaagagtctaacatctgtcaccccacacttttcctaattctttcttaatacttccaattcaccttcttattacatatatttgatatatttatgaagctattgttcattatgtgtaatatataattaatgcccttaataagtgtgtgtatgtttacacaagtcatgttttcctgtgaaatctagtcccagaagtggagttgttgagttaaagggatgtcaggttatttgaaattttgataaacagcactaagttacccttcagaagtaatttacaaatttcatataccaacagtgtatgagaatgcctttttcctctcattttcaatggtagkaattactttttcaatatcagcatgactttacaaaatatatcttattttatgttaatttgcatttttctgattaccaggcagggctaaatatccctggtaaaactataaaacttt

SEQ ID NO: 598757 - DNA, 589 bp, Homo sapiens
gtttacacaagtcatgttttcctgtgaaatctagtcccagaagtggagttgttgagttaaagggatgtcaggttatttgaaattttgataaacagcactaagttacccttcagaagtaatttacaaatttcatataccaacagtgtatgagaatgcctttttcctctcattttcaatggtaggaattactttttcaatatcagcatgactttacaaaatatatcttattttatgttaatttgcatttttctgattacyaggcagggctaaatatccctggtaaaactataaaactttttaatcataatgaacattagtccaattttgaattagtttatagcacaatgacaattatctgctgagaaatactgctataggtggccaggcacggtggctcattcctgtaaacccagcactttgggaggccgaggtgggcagaacacctgaggtcaggagttcgagacaagcctggataacatggtgaaacatcatttctactaaaaatacaagaaattagctaggcatggtggcacatgtctgtaatctcagctactagggaggctgagtcaagagaatcacttgaacccag

SEQ ID NO: 598758 - DNA, 589 bp, Homo sapiens
gtttacacaagtcatgttttcctgtgaaatctagtcccagaagtggagttgttgagttaaagggatgtcaggttatttgaaattttgataaacagcactaagttacccttcagaagtaatttacaaatttcatataccaacagtgtatgagaatgcctttttcctctcattttcaatggtaggaattactttttcaatatcagcatgactttacaaaatatatcttattttatgttaatttgcatttttctgattaccaggcagggctaaatatccctggtaaaactataaaactttttaatcataatgaacattagtccaattttgaattagtttatagcacaatgacaattatctgctgagaaatactgctataggtggccaggcacggtggctcaytcctgtaaacccagcactttgggaggccgaggtgggcagaacacctgaggtcaggagttcgagacaagcctggataacatggtgaaacatcatttctactaaaaatacaagaaattagctaggcatggtggcacatgtctgtaatctcagctactagggaggctgagtcaagagaatcacttgaacccag

SEQ ID NO: 598759 - DNA, 365 bp, Homo sapiens
ggggaaattaatagttgttgaatgggtatagagttttccaagataaaaaaaatctagaaatctgctacacaacactgtaaatattcttaactctacaaaactgtacacttacaattggttatgatggtaaattttaaggtatgtgtttgttaccaaaattctaaataataaattatttataaaaaatgatcttttttgacacagggtcttactctgttgccctggcaggagtgcaatggcatgatcacagctcattgcagtctcaacctcccaggctcaagaaacccttccacctcagcctcccgaatagttgggactacaggtrcacaccaagatgtcaggctaaattttggtttggttttttt

SEQ ID NO: 598760 - DNA, 589 bp, Homo sapiens
gtttacacaagtcatgttttcctgtgaaatctagtcccagaagtggagttgttgagttaaagggatgtcaggttatttgaaattttgataaacagcactaagttacccttcagaagtaatttacaaatttcatataccaacagtgtatgagaatgcctttttcctctcattttcaatggtaggaattactttttcaatatcagcatgactttacaaaatatatcttattttatgttaatttgcatttttctgattaccaggcagggctaaatatccctggtaaaactataaaactttttaatcataatgaacattagtccaattttgaattagtttatagcacaatgacaattatctgctgagaaatactgctataggtggccaggcacggtggctcattcctgtaaacccagcactttgggaggccgaggtgggcagaacacctgaggtcaggagttcgagacaagcctggataacatggtgaaacmtcatttctactaaaaatacaagaaattagctaggcatggtggcacatgtctgtaatctcagctactagggaggctgagtcaagagaatcacttgaacccag

SEQ ID NO: 598761 - DNA, 365 bp, Homo sapiens
ggggaaattaatagttgttgaatgggtatagagttttccaagataaaaaaaatctagaaatctgctacacaacactgtaaatattcttaactctacaaaactgtacacttacaattggttatgatggtaaattttaaggtatgtgtttgttaccaaaattctaaataataaattatttataaaaaatgatcttttttgacacagggtcttactctgttgccctggcaggagtgcaatggcatgatcacagctcattgcagtctcaacctcccaggctcaagaaacccttccacctcagcctcccgaatagttgggactacaggtgcacamcaagatgtcaggctaaattttggtttggttttttt

SEQ ID NO: 598762 - DNA, 559 bp, Homo sapiens
acaattatctgctgagaaatactgctataggtggccaggcacggtggctcattcctgtaaacccagcactttgggaggccgaggtgggcagaacacctgaggtcaggagttcgagacaagcctggataacatggtgaaacatcatttctactaaaaatacaagaaattagctaggcatggtggcacatgtctgtaatctcagctactagggaggctgagtcaagagaatcacttgaacccagtatgcataggttgcagtgaggtgagaacacaccattgcactccagcttgggtaacaagagagaaactccatytcaaaaaaaaaaaaaaaaaaacctgctataggcttacttacctatcatgctcttccttcagtttcttgggaaattgctgaggatacgttttcccaatctttctttctttggttaatctgtcagcagcagcagaagatgtactatgacatacattttctgatagttgtattttttcacttttgtttgtattatttccttctttgacctttaataaaagtaatatgaataataattattattttatt

SEQ ID NO: 598763 - DNA, 704 bp, Homo sapiens
ttcaatggtaggaattactttttcaatatcagcatgactttacaaaatatatcttattttatgttaatttgcatttttctgattaccaggcagggctaaatatccctggtaaaactataaaactttttaatcataatgaacattagtccaattttgaattagtttatagcacaatgacaattatctgctgagaaatactgctataggtggccaggcacggtggctcattcctgtaaacccagcactttgggaggccgaggtgggcagaacacctgaggtcaggagttcgagacaagcctggataacatggtgaaacatcatttctactaaaaatacaagaaattagctaggcatggtggcacatgtctgtaatctcagctactagggaggctgagtcaagagaatcacttgaacccagtatgcataggttgcagtgaggtgagaacacaccattgcactccagcttgggtaacaagagagaaactccatctcaaaaaaaaaaaaaaaaaaacctgctataggcttacttacctatcatgctcttccttcagtttcttgggaaattgctgaggataygttttcccaatctttctttctttggttaatctgtcagcagcagcagaagatgtactatgacatacattttctgatagttgtattttttcacttttgtttgtattatttccttctttgacctttaataa

SEQ ID NO: 598764 - DNA, 587 bp, Homo sapiens
gcagaaacagagaaataaaaagacacaggcataacatatatcttctgtcattgccacatggattttacatgaaatagccagattaagaggawgtaaccttgtaggccttcaagaacagtaaagaagttttcccttttctgcactgagctattcttttccccactgccttttatctcttttttttttttttgaatcctgggatatcaaaaaagtgaaagttctccctgaactatgggaaccaatgtttgtttgccacaacacaagaagcagagtgaaactgctgagtttctagtgcagaattctggaaaacgagatgcttcccagatttcactttcaattaccacaaatgtttataggtggaacacatatggtacagttatctacttaagccatattatctactgaaaacgggagtcaaaccaaccaagacatatgaaatgtttcatccagagctcttgaggcggcattccctagcatttcatggcaccaaataacatgatacaattccatgttgctgaattacataaattaccagataaatttatcaaattagtcagatatattaaaagtctaacttgagcaaagca

SEQ ID NO: 598765 - DNA, 587 bp, Homo sapiens
gcagaaacagagaaataaaaagacacaggcataacatatatcttctgtcattgccacatggattttacatgaaatagccagattaagaggatgtaaccttgtaggccttcaagaacagtaaagaagttttcccttttctgcactgagctattcttttccccactgccttttatctctttttwttttttttgaatcctgggatatcaaaaaagtgaaagttctccctgaactatgggaaccaatgtttgtttgccacaacacaagaagcagagtgaaactgctgagtttctagtgcagaattctggaaaacgagatgcttcccagatttcactttcaattaccacaaatgtttataggtggaacacatatggtacagttatctacttaagccatattatctactgaaaacgggagtcaaaccaaccaagacatatgaaatgtttcatccagagctcttgaggcggcattccctagcatttcatggcaccaaataacatgatacaattccatgttgctgaattacataaattaccagataaatttatcaaattagtcagatatattaaaagtctaacttgagcaaagca

SEQ ID NO: 598766 - DNA, 632 bp, Homo sapiens
aatgtttatgctagttgactggcagaaacagagaaataaaaagacacaggcataacatatatcttctgtcattgccacatggattttacatgaaatagccagattaagaggatgtaaccttgtaggccttcaagaacagtaaagaagttttcccttttctgcactgagctattcttttccccactgccttttatctcttttttttttttttgaatcctgggatatcaaaaaagtgaaagttctccctgaactatgggaaccaatgtttgtttgccacaacacaagaagcagagtgaaactgctgagtttctagtgcagaattctggaaaacgagatgcttcccagatttcacwttcaattaccacaaatgtttataggtggaacacatatggtacagttatctacttaagccatattatctactgaaaacgggagtcaaaccaaccaagacatatgaaatgtttcatccagagctcttgaggcggcattccctagcatttcatggcaccaaataacatgatacaattccatgttgctgaattacataaattaccagataaatttatcaaattagtcagatatattaaaagtctaacttgagcaaagcaatttaacacctcagagggtggaaa

SEQ ID NO: 598767 - DNA, 412 bp, Homo sapiens
aacacagtgtacagaactcaactttctactaaagagtcaaaggttaaatttttarctaagaaattatgcttcttacatgataaaaatcatacatgccaaaacttaccatactttattaaacaacataatgtaaggtctgattcaacagaaatattggagtggtgattttttaaaatatgtggaagtatatatttgttttcaaaatattagaaataaccatgatggaactataaattcaaacagtttgagctaagcagataaacttgcatgcatgaaaacacattaaacagactcatttggctgggaatattcattgcaactctcaaggctagaagtgtttttgtggctcatctcagtcattgcttccctcccattgtattcccattctatcattaaataaatgtaattcatc

SEQ ID NO: 598768 - DNA, 404 bp, Homo sapiens
ttagaacacagtgtacagaactcaactttctactaaagagtcaaaggttaaatttttaactaagaaattatgcttcttacatgataaaaatcatacwtgccaaaacttaccatactttattaaacaacataatgtaaggtctgattcaacagaaatattggagtggtgattttttaaaatatgtggaagtatatatttgttttcaaaatattagaaataaccatgatggaactataaattcaaacagtttgagctaagcagataaacttgcatgcatgaaaacacattaaacagactcatttggctgggaatattcattgcaactctcaaggctagaagtgtttttgtggctcatctcagtcattgcttccctcccattgtattcccattctatcattaaataa

SEQ ID NO: 598769 - DNA, 404 bp, Homo sapiens
ttagaacacagtgtacagaactcaactttctactaaagagtcaaaggttaaatttttaactaagaaattatgcttcttacatgataaaaatcatacatgccaaaacttaccatactttattaaacaacataatgtaaggtctgattcaacagaaatattggagtggtgattttttaaaatatgtggaagtatatatttgttttcaaaatattrgaaataaccatgatggaactataaattcaaacagtttgagctaagcagataaacttgcatgcatgaaaacacattaaacagactcatttggctgggaatattcattgcaactctcaaggctagaagtgtttttgtggctcatctcagtcattgcttccctcccattgtattcccattctatcattaaataa

SEQ ID NO: 598770 - DNA, 419 bp, Homo sapiens
agtgtacagaactcaactttctactaaagagtcaaaggttaaatttttaactaagaaattatgcttcttacatgataaaaatcatacatgccaaaacttaccatactttattaaacaacataatgtaaggtctgattcaacagaaatattggagtggtgattttttaaaatatgtggaagtatatatttgttttcaaaatattagaaataaccatgatggaactataaattcaaacagtttgagctaarcagataaacttgcatgcatgaaaacacattaaacagactcatttggctgggaatattcattgcaactctcaaggctagaagtgtttttgtggctcatctcagtcattgcttccctcccattgtattcccattctatcattaaataaatgtaattcatctctaaatgacta

SEQ ID NO: 598771 - DNA, 256 bp, Homo sapiens
taaaatatgtggaagtatatatttgttttcaaaatattagaaataaccatgatggaactataaattcaaacagtttgagctaagcagatraacttgcatgcatgaaaacacattaaacagactcatttggctgggaatattcattgcaactctcaaggctagaagtgtttttgtggctcatctcagtcattgcttccctcccattgtattcccattctatcattaaataaatgtaattcatctctaaatgactata

SEQ ID NO: 598772 - DNA, 404 bp, Homo sapiens
ttagaacacagtgtacagaactcaactttctactaaagagtcaaaggttaaatttttaactaagaaattatgcttcttacatgataaaaatcatacatgccaaaacttaccatactttattaaacaacataatgtaaggtctgattcaacagaaatattggagtggtgattttttaaaatatgtggaagtatatatttgttttcaaaatattagaaataaccatgatggaactataaattcaaacagtttgagctaagcagataaactkgcatgcatgaaaacacattaaacagactcatttggctgggaatattcattgcaactctcaaggctagaagtgtttttgtggctcatctcagtcattgcttccctcccattgtattcccattctatcattaaataa

SEQ ID NO: 598773 - DNA, 404 bp, Homo sapiens
ttagaacacagtgtacagaactcaactttctactaaagagtcaaaggttaaatttttaactaagaaattatgcttcttacatgataaaaatcatacatgccaaaacttaccatactttattaaacaacataatgtaaggtctgattcaacagaaatattggagtggtgattttttaaaatatgtggaagtatatatttgttttcaaaatattagaaataaccatgatggaactataaattcaaacagtttgagctaagcagataaacttgcrtgcatgaaaacacattaaacagactcatttggctgggaatattcattgcaactctcaaggctagaagtgtttttgtggctcatctcagtcattgcttccctcccattgtattcccattctatcattaaataa

SEQ ID NO: 598774 - DNA, 256 bp, Homo sapiens
taaaatatgtggaagtatatatttgttttcaaaatattagaaataaccatgatggaactataaattcaaacagtttgagctaagcagataaacttgcatgcatgaaaayacattaaacagactcatttggctgggaatattcattgcaactctcaaggctagaagtgtttttgtggctcatctcagtcattgcttccctcccattgtattcccattctatcattaaataaatgtaattcatctctaaatgactata

SEQ ID NO: 598775 - DNA, 419 bp, Homo sapiens
agtgtacagaactcaactttctactaaagagtcaaaggttaaatttttaactaagaaattatgcttcttacatgataaaaatcatacatgccaaaacttaccatactttattaaacaacataatgtaaggtctgattcaacagaaatattggagtggtgattttttaaaatatgtggaagtatatatttgttttcaaaatattagaaataaccatgatggaactataaattcaaacagtttgagctaagcagataaacttgcatgcatgaaaacacattaaacagactcatttggctgggaatattcattgcaactytcaaggctagaagtgtttttgtggctcatctcagtcattgcttccctcccattgtattcccattctatcattaaataaatgtaattcatctctaaatgacta

SEQ ID NO: 598776 - DNA, 256 bp, Homo sapiens
taaaatatgtggaagtatatatttgttttcaaaatattagaaataaccatgatggaactataaattcaaacagtttgagctaagcagataaacttgcatgcatgaaaacacattaaacagactcatttggctgggaatattcattgcaactctcaaggctagamgtgtttttgtggctcatctcagtcattgcttccctcccattgtattcccattctatcattaaataaatgtaattcatctctaaatgactata

SEQ ID NO: 598777 - DNA, 256 bp, Homo sapiens
taaaatatgtggaagtatatatttgttttcaaaatattagaaataaccatgatggaactataaattcaaacagtttgagctaagcagataaacttgcatgcatgaaaacacattaaacagactcatttggctgggaatattcattgcaactctcaaggctagaagtgtttttgtggctcrtctcagtcattgcttccctcccattgtattcccattctatcattaaataaatgtaattcatctctaaatgactata

SEQ ID NO: 598778 - DNA, 667 bp, Homo sapiens
aactataaattcaaacagtttgagctaagcagataaacttgcatgcatgaaaacacattaaacagactcatttggctgggaatattcattgcaactctcaaggctagaagtgtttttgtggctcatctcagtcattgcttccctcccattgtattcccattctatcattaaataaatgtaattcatctctaaatgactatagtaaaaagaatctagaatctaaaacttatttctttagcaatttctttatgttgatctggttcagaagktcacatggtatatggctgaattagtttcccagctcatatgccacttggaagactgagagtgagaattaggttgattaatgaacaaacattatgagaacattctccagaaccgttgtttagatagcaggactagtctactttgacacataattacacatttagaaaaccccgctgtaactgtatacatgggattttcttgaatagaaaatttgactaaatcaaataattgataaagagaaaaaagaagcagcaagtgaacctctgtctttttgaagttggactttctctttctccaaagccaggaactctacttgtaacatgcctacctcattctttttactattattatactttaaattctggtacatgtgcacaatgtgcaggtttgttacatatgt

SEQ ID NO: 598779 - DNA, 667 bp, Homo sapiens
aactataaattcaaacagtttgagctaagcagataaacttgcatgcatgaaaacacattaaacagactcatttggctgggaatattcattgcaactctcaaggctagaagtgtttttgtggctcatctcagtcattgcttccctcccattgtattcccattctatcattaaataaatgtaattcatctctaaatgactatagtaaaaagaatctagaatctaaaacttatttctttagcaatttctttatgttgatctggttcagaagttcacatggtatatggctgaattagtttcccagctcatatgccacttggaagactgagagtgagaattaggttgattaatgaacaaacattatgagaacattctccagaaccgttgtttagatagcaggactagtctactttgacacataattacacatttagaaaaccccgctgtaactgtayacatgggattttcttgaatagaaaatttgactaaatcaaataattgataaagagaaaaaagaagcagcaagtgaacctctgtctttttgaagttggactttctctttctccaaagccaggaactctacttgtaacatgcctacctcattctttttactattattatactttaaattctggtacatgtgcacaatgtgcaggtttgttacatatgt

SEQ ID NO: 598780 - DNA, 532 bp, Homo sapiens
atgttagtgaccttgaaatatcttgctgtaagtttctagctatatttttgatgttctctcactatgtggcaaagaataacccggattttataattcaagattcatggttttgtagttattaacactgggattgtcattcagtggmttctggaataagcattgtgttggttttctgtttttataagtatctgtagcagcagaaatactgtggctttctatctgaatcatatgcttcatttctttggggtgggtaaaccacaaatcaaaaagactttctggatctatagactgagactaatgcctaatgtctaatttccaattagtggtatttgggtttatatatttttccatttgcatgtcaaactcttaatcatctttcatttcaatcataattactgggttccttactttctcagtttctatatcataacaaaaattttcatcatctgtgttagaaacaagctgtgtgtctggtttgttatcatttttatagtctgatttattttaatttaaatgaagcttagaagatgac

SEQ ID NO: 598781 - DNA, 532 bp, Homo sapiens
atgttagtgaccttgaaatatcttgctgtaagtttctagctatatttttgatgttctctcactatgtggcaaagaataacccggattttataattcaagattcatggttttgtagttattaacactgggattgtcattcagtggattctggaataagcattgtgttggttttctgtttttataagtatctgtagcagcagaaatactgtggctttctatctgaatcatatgcttcatttctttggggtgggtaaaccacaaatcaaaaagactttctggatctmtagactgagactaatgcctaatgtctaatttccaattagtggtatttgggtttatatatttttccatttgcatgtcaaactcttaatcatctttcatttcaatcataattactgggttccttactttctcagtttctatatcataacaaaaattttcatcatctgtgttagaaacaagctgtgtgtctggtttgttatcatttttatagtctgatttattttaatttaaatgaagcttagaagatgac

SEQ ID NO: 598782 - DNA, 532 bp, Homo sapiens
atgttagtgaccttgaaatatcttgctgtaagtttctagctatatttttgatgttctctcactatgtggcaaagaataacccggattttataattcaagattcatggttttgtagttattaacactgggattgtcattcagtggattctggaataagcattgtgttggttttctgtttttataagtatctgtagcagcagaaatactgtggctttctatctgaatcatatgcttcatttctttggggtgggtaaaccacaaatcaaaaagactttctggatctatagactgagacyaatgcctaatgtctaatttccaattagtggtatttgggtttatatatttttccatttgcatgtcaaactcttaatcatctttcatttcaatcataattactgggttccttactttctcagtttctatatcataacaaaaattttcatcatctgtgttagaaacaagctgtgtgtctggtttgttatcatttttatagtctgatttattttaatttaaatgaagcttagaagatgac

SEQ ID NO: 598783 - DNA, 532 bp, Homo sapiens
atgttagtgaccttgaaatatcttgctgtaagtttctagctatatttttgatgttctctcactatgtggcaaagaataacccggattttataattcaagattcatggttttgtagttattaacactgggattgtcattcagtggattctggaataagcattgtgttggttttctgtttttataagtatctgtagcagcagaaatactgtggctttctatctgaatcatatgcttcatttctttggggtgggtaaaccacaaatcaaaaagactttctggatctatagactgagactaatgcctaatgtctaatttccaattagtggtatttgggtttatatatttttccatttgcatgtcaaactcttaatcatctttcatttcaatcataattactgggttccttactttytcagtttctatatcataacaaaaattttcatcatctgtgttagaaacaagctgtgtgtctggtttgttatcatttttatagtctgatttattttaatttaaatgaagcttagaagatgac

SEQ ID NO: 598784 - DNA, 535 bp, Homo sapiens
gggtaaaccacaaatcaaaaagactttctggatctatagactgagactaatgcctaatgtctaatttccaattagtggtatttgggtttatatatttttccatttgcatgtcaaactcttaatcatctttcatttcaatcataattactgggttccttactttctcagtttctatatcataacaaaaatttycatcatctgtgttagaaacaagctgtgtgtctggtttgttatcatttttatagtctgatttattttaatttaaatgaagcttagaagatgactggtaagtgtatttcagggacctggagtgtgaatggaataaaaagacatttgacatgggcttcctctgttcaggcgctgcctggactgccacagagctagaccctccagatacatttttctcctcacaatcagggacatgattcatcagactagagggcactccttttttgttcatccctctttagagttaccatgtaggagctcttcctcaggccaagcagtaattttggagttttcagaacttttacca

SEQ ID NO: 598785 - DNA, 624 bp, Homo sapiens
  misc_feature 412, 413: n = A,T,C or G
atttcaaaaagccaaaagattaatcaaactggaatatttagaaatatttaacccaaaagaagttaggaaagaatatatataagatcaaaacacagacgaaggccagacatggtggctcatgcctgtaatcygaacactttgggaggccaatgtgggtagattgcttgagctcaggagttcaagaccagcctgtgcaacatggcaaaaccctatctctacaaaaaatataaaaattagccaggtgtgtttccatgcgcctgtagtcccagctactcagtgggctccagtgagtataggttgggcctgggaggcagaggttgcagtgagccaacattgcaccattgcactacagtctcggtgacagagcaagaccctgtcttaaaaaacaaataacataacaaatagaaatagnntagaaaatggcagacctaaatccaaccttagcaatgattagttacaatgtaactggacaaatactctacttaagacagagactgccagacctgagaggaaagcaagacccaacaatatgcatccacagagacacaatttaaatacaaagacacaaagtatgagaaaaaatatgctatgcagacactaatcataaaaatatgctatccagac

SEQ ID NO: 598786 - DNA, 624 bp, Homo sapiens
  misc_feature 412, 413: n = A,T,C or G
atttcaaaaagccaaaagattaatcaaactggaatatttagaaatatttaacccaaaagaagttaggaaagaatatatataagatcaaaacacagacgaaggccagacatggtggctcatgcctgtaatctraacactttgggaggccaatgtgggtagattgcttgagctcaggagttcaagaccagcctgtgcaacatggcaaaaccctatctctacaaaaaatataaaaattagccaggtgtgtttccatgcgcctgtagtcccagctactcagtgggctccagtgagtataggttgggcctgggaggcagaggttgcagtgagccaacattgcaccattgcactacagtctcggtgacagagcaagaccctgtcttaaaaaacaaataacataacaaatagaaatagnntagaaaatggcagacctaaatccaaccttagcaatgattagttacaatgtaactggacaaatactctacttaagacagagactgccagacctgagaggaaagcaagacccaacaatatgcatccacagagacacaatttaaatacaaagacacaaagtatgagaaaaaatatgctatgcagacactaatcataaaaatatgctatccagac

SEQ ID NO: 598787 - DNA, 557 bp, Homo sapiens
gacatgggcttcctctgttcaggcgctgcctggactgccacagagctagaccctccagatacatttttctcctcacaatcagggacatgattcatcagactagagggcactccttttttgttcatccctctttagagttaccatgtaggagctcttcctcaggscaagcagtaattttggagttttcagaacttttaccaatattcagcttgaacttgtttgtaatgaattttaaagaaagtcatgaatatatagattgattccccttatcactgttcttacccagttctgattcttgagacttcttttggtggagggcaggtgcaaaatggaaaacaaatttgcttgttttgtttctcagatgtcttttctgtcagagtgcatgttttaaaattagctttaatcaagtataaacaaagaaatattagaaaataattaaaatttaactgtgaaacttaatctatgtgttgctactcttaaattatgggattgtaactaaaaagtgaaaaataatttaccttggcttaacataggacagaaacatgaaccagcaagct

SEQ ID NO: 598788 - DNA, 535 bp, Homo sapiens
gggtaaaccacaaatcaaaaagactttctggatctatagactgagactaatgcctaatgtctaatttccaattagtggtatttgggtttatatatttttccatttgcatgtcaaactcttaatcatctttcatttcaatcataattactgggttccttactttctcagtttctatatcataacaaaaattttcatcatctgtgttagaaacaagctgtgtgtctggtttgttatcatttttatagtctgatttattttaatttaaatgaagcttagaagatgactggtaagtgtatttcagggacctggagtgtgaatggaataaaaagacatttgacatgggcttcctctgttcaggcgctgcctggactgccacagagctagaccctccagatacatttttctcctcacaatcagggacatgattcatcagactagagggcactccttttttgttcatccctctttagagttaccatgtaggagctcttcctcaggccaagyagtaattttggagttttcagaacttttacca

SEQ ID NO: 598789 - DNA, 557 bp, Homo sapiens
gacatgggcttcctctgttcaggcgctgcctggactgccacagagctagaccctccagatacatttttctcctcacaatcagggacatgattcatcagactagagggcactccttttttgttcatccctctttagagttaccatgtaggagctcttcctcaggccaagcagtaattttggagttttcagaacttttaccaatattcagcttgaacttgtttgtaatgaattttaaagaaagtcatgaatatatagattgattcccyttatcactgttcttacccagttctgattcttgagacttcttttggtggagggcaggtgcaaaatggaaaacaaatttgcttgttttgtttctcagatgtcttttctgtcagagtgcatgttttaaaattagctttaatcaagtataaacaaagaaatattagaaaataattaaaatttaactgtgaaacttaatctatgtgttgctactcttaaattatgggattgtaactaaaaagtgaaaaataatttaccttggcttaacataggacagaaacatgaaccagcaagct

SEQ ID NO: 598790 - DNA, 624 bp, Homo sapiens
  misc_feature 412, 413: n = A,T,C or G
atttcaaaaagccaaaagattaatcaaactggaatatttagaaatatttaacccaaaagaagttaggaaagaatatatataagatcaaaacacagacgaaggccagacatggtggctcatgcctgtaatctgaacactttgggaggccaakgtgggtagattgcttgagctcaggagttcaagaccagcctgtgcaacatggcaaaaccctatctctacaaaaaatataaaaattagccaggtgtgtttccatgcgcctgtagtcccagctactcagtgggctccagtgagtataggttgggcctgggaggcagaggttgcagtgagccaacattgcaccattgcactacagtctcggtgacagagcaagaccctgtcttaaaaaacaaataacataacaaatagaaatagnntagaaaatggcagacctaaatccaaccttagcaatgattagttacaatgtaactggacaaatactctacttaagacagagactgccagacctgagaggaaagcaagacccaacaatatgcatccacagagacacaatttaaatacaaagacacaaagtatgagaaaaaatatgctatgcagacactaatcataaaaatatgctatccagac

SEQ ID NO: 598791 - DNA, 557 bp, Homo sapiens
gacatgggcttcctctgttcaggcgctgcctggactgccacagagctagaccctccagatacatttttctcctcacaatcagggacatgattcatcagactagagggcactccttttttgttcatccctctttagagttaccatgtaggagctcttcctcaggccaagcagtaattttggagttttcagaacttttaccaatattcagcttgaacttgtttgtaatgaattttaaagaaagtcatgaatatatagattgattccccttatcactgttcttacccagttctgrttcttgagacttcttttggtggagggcaggtgcaaaatggaaaacaaatttgcttgttttgtttctcagatgtcttttctgtcagagtgcatgttttaaaattagctttaatcaagtataaacaaagaaatattagaaaataattaaaatttaactgtgaaacttaatctatgtgttgctactcttaaattatgggattgtaactaaaaagtgaaaaataatttaccttggcttaacataggacagaaacatgaaccagcaagct

SEQ ID NO: 598792 - DNA, 645 bp, Homo sapiens
tccagatacatttttctcctcacaatcagggacatgattcatcagactagagggcactccttttttgttcatccctctttagagttaccatgtaggagctcttcctcaggccaagcagtaattttggagttttcagaacttttaccaatattcagcttgaacttgtttgtaatgaattttaaagaaagtcatgaatatatagattgattccccttatcactgttcttacccagttctgattcttgagacttcttttggtggrgggcaggtgcaaaatggaaaacaaatttgcttgttttgtttctcagatgtcttttctgtcagagtgcatgttttaaaattagctttaatcaagtataaacaaagaaatattagaaaataattaaaatttaactgtgaaacttaatctatgtgttgctactcttaaattatgggattgtaactaaaaagtgaaaaataatttaccttggcttaacataggacagaaacatgaaccagcaagctgaactctcagtgtctgtttggactaaacttaatgcatttgtgtaaaatctaccagaaatgaattcaaagatgataggtagtattataaaagcttcctctcttacaaagactttacctcagcataccagaaagagtgagccc

SEQ ID NO: 598793 - DNA, 631 bp, Homo sapiens
tatgtgttgctactcttaaattatrggattgtaactaaaaagtgaaaaataatttaccttggcttaacataggacagaaacatgaaccagcaagctgaactctcagtgtctgtttggactaaacttaatgcatttgtgtaaaatctaccagaaatgaattcaaagatgataggtagtattataaaagcttcctctcttacaaagactttacctcagcataccagaaagagtgagcccctacagtgcatgtttatttctgaagattaactagagcactaggcaaacactaaattattaagagctaaactgaacaccaataagaaagagaagcaaaattttaaattctaattcagatgatatactatgatagtgttatgtatctagatagaatttctgcttatatccgcttctaatatattttaagttccggtagtgatagggtttggattttttaaattttagtaatgtttactatgtatttatgttgaaataaagttattgttcacaccctgacaccaaagatcccattctgcaaggtaggattctcttaataggcaactgcattgacttttatgaccccattcactccctgaacacagacacagaagtcaactggtgaccacaaaacaga

SEQ ID NO: 598794 - DNA, 533 bp, Homo sapiens
tggtggagggcaggtgcaaaatggaaaacaaatttgcttgttttgtttctcagatgtcttttctgtcagagtgcatgttttaaaattagctttaatcaagtataaacaaagaaatattagaaaataattaaaatttaactgtgaaacttaatctatgtgttgctactcttaaattatgggattgtawctaaaaagtgaaaaataatttaccttggcttaacataggacagaaacatgaaccagcaagctgaactctcagtgtctgtttggactaaacttaatgcatttgtgtaaaatctaccagaaatgaattcaaagatgataggtagtattataaaagcttcctctcttacaaagactttacctcagcataccagaaagagtgagcccctacagtgcatgtttatttctgaagattaactagagcactaggcaaacactaaattattaagagctaaactgaacaccaataagaaagagaagcaaaattttaaattctaattcagatgatatactatgatagtgttatgtat

SEQ ID NO: 598795 - DNA, 533 bp, Homo sapiens
tggtggagggcaggtgcaaaatggaaaacaaatttgcttgttttgtttctcagatgtcttttctgtcagagtgcatgttttaaaattagctttaatcaagtataaacaaagaaatattagaaaataattaaaatttaactgtgaaacttaatctatgtgttgctactcttaaattatgggattgtaactaaaaagtgaaaaataatttrccttggcttaacataggacagaaacatgaaccagcaagctgaactctcagtgtctgtttggactaaacttaatgcatttgtgtaaaatctaccagaaatgaattcaaagatgataggtagtattataaaagcttcctctcttacaaagactttacctcagcataccagaaagagtgagcccctacagtgcatgtttatttctgaagattaactagagcactaggcaaacactaaattattaagagctaaactgaacaccaataagaaagagaagcaaaattttaaattctaattcagatgatatactatgatagtgttatgtat

SEQ ID NO: 598796 - DNA, 552 bp, Homo sapiens
tgaaacttaatctatgtgttgctactcttaaattatgggattgtaactaaaaagtgaaaaataatttaccttggcttaacataggacagaaacatgaaccagcaagctgaactctcagtgtctgtttggactaaacttaatgcatttgwgtaaaatctaccagaaatgaattcaaagatgataggtagtattataaaagcttcctctcttacaaagactttacctcagcataccagaaagagtgagcccctacagtgcatgtttatttctgaagattaactagagcactaggcaaacactaaattattaagagctaaactgaacaccaataagaaagagaagcaaaattttaaattctaattcagatgatatactatgatagtgttatgtatctagatagaatttctgcttatatccgcttctaatatattttaagttccggtagtgatagggtttggattttttaaattttagtaatgtttactatgtatttatgttgaaataaagttattgttcacaccctgacaccaaagatcccattctgcaaggtag

SEQ ID NO: 598797 - DNA, 533 bp, Homo sapiens
tggtggagggcaggtgcaaaatggaaaacaaatttgcttgttttgtttctcagatgtcttttctgtcagagtgcatgttttaaaattagctttaatcaagtataaacaaagaaatattagaaaataattaaaatttaactgtgaaacttaatctatgtgttgctactcttaaattatgggattgtaactaaaaagtgaaaaataatttaccttggcttaacataggacagaaacatgaaccagcaagctgaactctcagtgtctgtttggactaaacttaatgcatttgtgtaaaatctaccagaaatgaattcaaagatgataggtagtattataaaagcttcctctcttacaaagactttacctcagcataccagaaagagtgagcccctacagtgcatgtttatttctgaagatkaactagagcactaggcaaacactaaattattaagagctaaactgaacaccaataagaaagagaagcaaaattttaaattctaattcagatgatatactatgatagtgttatgtat

SEQ ID NO: 598798 - DNA, 598 bp, Homo sapiens
gagcccctacagtgcatgtttatttctgaagattaactagagcactaggcaaacactaaattattaagagctaaactgaacaccaataagaaagagaagcaaaattttaaattctaattcaratgatatactatgatagtgttatgtatctagatagaatttctgcttatatccgcttctaatatattttaagttccggtagtgatagggtttggattttttaaattttagtaatgtttactatgtatttatgttgaaataaagttattgttcacaccctgacaccaaagatcccattctgcaaggtaggattctcttaataggcaactgcattgacttttatgaccccattcactccctgaacacagacacagaagtcaactggtgaccacaaaacagaataaatctttaacctcggcactggtgaccagcaatataaaactgcaacatttgaagcactggcaatgatgactcctttaacactagtttaactcagtggccattgttgttaaactgttcataatttctattcctcagtaatatgacccaatacttcatgttaccttgtgtattatgagtaaggttatataaataaaac

SEQ ID NO: 598799 - DNA, 631 bp, Homo sapiens
tatgtgttgctactcttaaattatgggattgtaactaaaaagtgaaaaataatttaccttggcttaacataggacagaaacatgaaccagcaagctgaactctcagtgtctgtttggactaaacttaatgcatttgtgtaaaatctaccagaaatgaattcaaagatgataggtagtattataaaagcttcctctcttacaaagactttacctcagcataccagaaagagtgagcccctacagtgcatgtttatttctgaagattaactagagcactaggcaaacactaaattattaagagctaaactgaacaccaataagaaagagaagcaaaattttaaattctaattcagatgatatactatgatagtgttatgtatctagatagaatttctgcttatatcygcttctaatatattttaagttccggtagtgatagggtttggattttttaaattttagtaatgtttactatgtatttatgttgaaataaagttattgttcacaccctgacaccaaagatcccattctgcaaggtaggattctcttaataggcaactgcattgacttttatgaccccattcactccctgaacacagacacagaagtcaactggtgaccacaaaacaga

SEQ ID NO: 598800 - DNA, 603 bp, Homo sapiens
gtcttttctgtcagagtgcatgttttaaaattagctttaatcaagtataaacaaagaaatattagaaaataattaaaatttaactgtgaaacttaatctatgtgttgctactcttaaattatgggattgtaactaaaaagtgaaaaataatttaccttggcttaacataggacagaaacatgaaccagcaagctgaactctcagtgtctgtttggactaaacttaatgcatttgtgtaaaatctaccagaaatgaattcaaagatgataggtagtattataaaagcttcctctcttacaaagactttacctcagcataccagaaagagtgagcccctacagtgcatgtttatttctgaagattaactagagcactaggcaaacactaaattattaagagctaaactgaacaccaataagaaagagaagcaaaattttaaattctaattcagatgatatactatgatagtgttatgtatctagatagaatttctgcttatatccrcttctaatatattttaagttccggtagtgatagggtttggattttttaaattttagtaatgtttactatgtatttatgttgaaataaagttattgttca

SEQ ID NO: 598801 - DNA, 620 bp, Homo sapiens
ttaccttggcttaacataggacagaaacatgaaccagcaagctgaactctcagtgtctgtttggactaaacttaatgcatttgtgtaaaatctaccagaaatgaattcaaagatgataggtagtattataaaagcttcctctcttacaaagactttacctcagcataccagaaagagtgagcccctacagtgcatgtttatttctgaagattaactagagcactaggcaaacactaaattattaagagctaaactgaacaccaataagaaagagaagcaaaattttaaattctaattcagatgatatactatgatagtgttatgtatctagatagaatttctgcttatatccgcttctaatatattttaagttccrgtagtgatagggtttggattttttaaattttagtaatgtttactatgtatttatgttgaaataaagttattgttcacaccctgacaccaaagatcccattctgcaaggtaggattctcttaataggcaactgcattgacttttatgaccccattcactccctgaacacagacacagaagtcaactggtgaccacaaaacagaataaatctttaacctcggcactggtgaccagcaatataaaac

SEQ ID NO: 598802 - DNA, 644 bp, Homo sapiens
ctagtttaactcagtggccattgttgttaaactgttcataatttctattcctcagtaatatgacccaatacttcatgttaccttgtgtattatgagtaaggttatataaataaaacagcaagataattctgaaaatttcttgcctcaattccaagggtaaagacagctatgagttactagagatactaagaattactagaataactaatagttactagagatagtaagaatatcttaagtttcataactgrttaagatgttttaaaaattacatataaaattatgatctattgggttctaaaggtatagtctgaaaggtcatgtcatttggactatgctttgttagtaaagcaaaaaaaaaaacctaatattaaacaagaacttaaattttcatatacctgtgattgcttcttttcacttctttcacacctttcttgctcttcctctaaagccactggtaaggtttgttctgttgacaaattcattgatttagttcaaatgaactaagaagagttaaagactataatctttataaaaataaatagagaataacatttctttgtattttatattttgagagtttgaatgaaacaatgtttactgaaatatttacttctgtaagaaatacttctaattatccaaaa

SEQ ID NO: 598803 - DNA, 578 bp, Homo sapiens
ttctattcctcagtaatatgacccaatacttcatgttaccttgtgtattatgagtaaggttatataaataaaacagcaagataattctgaaaatttcttgcctcaattccaagggtaaagacagctatgagttactagagatactaagaattactagaataactaatagttactagagatagtaagaatatcttaagtttcataactggttaagatgttttaaaaattamatataaaattatgatctattgggttctaaaggtatagtctgaaaggtcatgtcatttggactatgctttgttagtaaagcaaaaaaaaaaacctaatattaaacaagaacttaaattttcatatacctgtgattgcttcttttcacttctttcacacctttcttgctcttcctctaaagccactggtaaggtttgttctgttgacaaattcattgatttagttcaaatgaactaagaagagttaaagactataatctttataaaaataaatagagaataacatttctttgtattttatattttgagagtttgaatgaaacaatgtttactgaaatatttacttctgta

SEQ ID NO: 598804 - DNA, 644 bp, Homo sapiens
ctagtttaactcagtggccattgttgttaaactgttcataatttctattcctcagtaatatgacccaatacttcatgttaccttgtgtattatgagtaaggttatataaataaaacagcaagataattctgaaaatttcttgcctcaattccaagggtaaagacagctatgagttactagagatactaagaattactagaataactaatagttactagagatagtaagaatatcttaagtttcataactggttaagatgttttaaaaattacatataaaattatgatctattggrttctaaaggtatagtctgaaaggtcatgtcatttggactatgctttgttagtaaagcaaaaaaaaaaacctaatattaaacaagaacttaaattttcatatacctgtgattgcttcttttcacttctttcacacctttcttgctcttcctctaaagccactggtaaggtttgttctgttgacaaattcattgatttagttcaaatgaactaagaagagttaaagactataatctttataaaaataaatagagaataacatttctttgtattttatattttgagagtttgaatgaaacaatgtttactgaaatatttacttctgtaagaaatacttctaattatccaaaa

SEQ ID NO: 598805 - DNA, 571 bp, Homo sapiens
ctgttcataatttctattcctcagtaatatgacccaatacttcatgttaccttgtgtattatgagtaaggttatataaataaaacagcaagataattctgaaaatttcttgcctcaattccaagggtaaagacagctatgagttactagagatactaagaattactagaataactaatagttactagagatagtaagaatatcttaagtttcataactggttaagatgttttaaaaattacatataaaattatgatctattgggttctaaaggtatagtctgaaaggtcatgtcatttggactatgctttgttagtaaagcaaaamaaaaaacctaatattaaacaagaacttaaattttcatatacctgtgattgcttcttttcacttctttcacacctttcttgctcttcctctaaagccactggtaaggtttgttctgttgacaaattcattgatttagttcaaatgaactaagaagagttaaagactataatctttataaaaataaatagagaataacatttctttgtattttatattttgagagtttgaatgaaacaatgtttact

SEQ ID NO: 598806 - DNA, 644 bp, Homo sapiens
ctagtttaactcagtggccattgttgttaaactgttcataatttctattcctcagtaatatgacccaatacttcatgttaccttgtgtattatgagtaaggttatataaataaaacagcaagataattctgaaaatttcttgcctcaattccaagggtaaagacagctatgagttactagagatactaagaattactagaataactaatagttactagagatagtaagaatatcttaagtttcataactggttaagatgttttaaaaattacatataaaattatgatctattgggttctaaaggtatagtctgaaaggtcatgtcatttggactatgctttgttagtaaagcaaaaaaaaaaacctaatattaaacaagaacttaaattttcatatacctgtgattgcttcttttcacttctttyacacctttcttgctcttcctctaaagccactggtaaggtttgttctgttgacaaattcattgatttagttcaaatgaactaagaagagttaaagactataatctttataaaaataaatagagaataacatttctttgtattttatattttgagagtttgaatgaaacaatgtttactgaaatatttacttctgtaagaaatacttctaattatccaaaa

SEQ ID NO: 598807 - DNA, 644 bp, Homo sapiens
ctagtttaactcagtggccattgttgttaaactgttcataatttctattcctcagtaatatgacccaatacttcatgttaccttgtgtattatgagtaaggttatataaataaaacagcaagataattctgaaaatttcttgcctcaattccaagggtaaagacagctatgagttactagagatactaagaattactagaataactaatagttactagagatagtaagaatatcttaagtttcataactggttaagatgttttaaaaattacatataaaattatgatctattgggttctaaaggtatagtctgaaaggtcatgtcatttggactatgctttgttagtaaagcaaaaaaaaaaacctaatattaaacaagaacttaaattttcatatacctgtgattgcttcttttcacttctttcrcacctttcttgctcttcctctaaagccactggtaaggtttgttctgttgacaaattcattgatttagttcaaatgaactaagaagagttaaagactataatctttataaaaataaatagagaataacatttctttgtattttatattttgagagtttgaatgaaacaatgtttactgaaatatttacttctgtaagaaatacttctaattatccaaaa

SEQ ID NO: 598808 - DNA, 591 bp, Homo sapiens
tgctcttcctctaaagccactggtaaggtttgttctgttgacaaattcattgatttagttcaaatgaactaagaagagttaaagactataatctttataaaaataaatagagaataacatttctttgtattttatattttgagagtttgaatgaaacaatgtttactgaaatatttacttctgtaagaaatacttctaattatccaaaacttcarcaaaccacttggggagacaccagatatcaccagattcaagccatgcaaaatctcagggtcactcacaaattgttccacccaacataagtcaacaaaactgttagaaacaaaacagaaatttgaaatacagtcaaaatatacaatgtaatgctttactatacttcataacagtatctttttaacaagacactaattgagttggcagttactaataatttgcaaaattattgttctttatacctcaattagtgtgcaccccattttttacatcacaaatgttttcccctgctattctgaaaaatttattttcatcttttaagactcagaaagtaggctgggcataatagctcacatctgtaatcccagcactttggaa

SEQ ID NO: 598809 - DNA, 591 bp, Homo sapiens
tgctcttcctctaaagccactggtaaggtttgttctgttgacaaattcattgatttagttcaaatgaactaagaagagttaaagactataatctttataaaaataaatagagaataacatttctttgtattttatattttgagagtttgaatgaaacaatgtttactgaaatatttacttctgtaagaaatacttctaattatccaaaacttcaacaaaccacttggggagacacyagatatcaccagattcaagccatgcaaaatctcagggtcactcacaaattgttccacccaacataagtcaacaaaactgttagaaacaaaacagaaatttgaaatacagtcaaaatatacaatgtaatgctttactatacttcataacagtatctttttaacaagacactaattgagttggcagttactaataatttgcaaaattattgttctttatacctcaattagtgtgcaccccattttttacatcacaaatgttttcccctgctattctgaaaaatttattttcatcttttaagactcagaaagtaggctgggcataatagctcacatctgtaatcccagcactttggaa

SEQ ID NO: 598810 - DNA, 591 bp, Homo sapiens
tgctcttcctctaaagccactggtaaggtttgttctgttgacaaattcattgatttagttcaaatgaactaagaagagttaaagactataatctttataaaaataaatagagaataacatttctttgtattttatattttgagagtttgaatgaaacaatgtttactgaaatatttacttctgtaagaaatacttctaattatccaaaacttcaacaaaccacttggggagacaccagatatcaccagattcaagccatgcaaaatcwcagggtcactcacaaattgttccacccaacataagtcaacaaaactgttagaaacaaaacagaaatttgaaatacagtcaaaatatacaatgtaatgctttactatacttcataacagtatctttttaacaagacactaattgagttggcagttactaataatttgcaaaattattgttctttatacctcaattagtgtgcaccccattttttacatcacaaatgttttcccctgctattctgaaaaatttattttcatcttttaagactcagaaagtaggctgggcataatagctcacatctgtaatcccagcactttggaa

SEQ ID NO: 598811 - DNA, 566 bp, Homo sapiens
tttgtattttatattttgagagtttgaatgaaacaatgtttactgaaatatttacttctgtaagaaatacttctaattatccaaaacttcaacaaaccacttggggagacaccagatatcaccagattcaagccatgcaaaatctcagggtcactcacaaattgttccacccaacataagtcaacaaaactgttrgaaacaaaacagaaatttgaaatacagtcaaaatatacaatgtaatgctttactatacttcataacagtatctttttaacaagacactaattgagttggcagttactaataatttgcaaaattattgttctttatacctcaattagtgtgcaccccattttttacatcacaaatgttttcccctgctattctgaaaaatttattttcatcttttaagactcagaaagtaggctgggcataatagctcacatctgtaatcccagcactttggaaggccaaaatgggagaattgctcaaggccaagagtttaagaccagcctgggaaccataggtaaccttgactctacaaaaaattagacaggtatggtgat

SEQ ID NO: 598812 - DNA, 573 bp, Homo sapiens
tgtgcaccccattttttacatcacaaatgttttcccctgctattctgaaaaatttattttcatcttttaagactcagaaagtaggctgggcataatagctcacatctgtaatcccagcactttggaaggccaaaatgggagaattgctcaaggccaagagtttaagaccagcctgggaaccataggtaaccttgactctacaaaaaattagacaggtatggtgatatgttcctgttgtccccgctactcaagaagcttagatgagaagatccctcgagcccaggagtctgaggtttcagtgagtctcaatcatgycattgcactccaatcctgggtgatagagtaagaacttgtctccaaaaagaggaaaaaaaaaaggctcagaatgctttgtgaaatcttccttgattctagctatctttctccacacacacaggtgtctgcttcgttggggtccttagtaccttgtcaatttttctagtgtcactttaccacctgacctgcacatcatgtctttacatgttgacccctttgctgctagactgtagaggacaatcttttgaatcatctttg

SEQ ID NO: 598813 - DNA, 390 bp, Homo sapiens
ccaggagtctgaggtttcagtgagtctcaatcatgtcattgcactccaatcctgggtgatagagtaagaacttgtctccaaaaagaggaaaaaaaaaaggctcagaatgctwtgtgaaatcttccttgattctagctatctttctccacacacacaggtgtctgcttcgttggggtccttagtaccttgtcaatttttctagtgtcactttaccacctgacctgcacatcatgtctttacatgttgacccctttgctgctagactgtagaggacaatcttttgaatcatctttgtataaacagtcttaattttgctaaataattacttattgagttcctgctaagtgttaggcactggggaataaggaaggaaaatagaagctgtcgggg

SEQ ID NO: 598814 - DNA, 291 bp, Homo sapiens
gtctgcttcgttggggtccttagtaccttgtcaatttttctagtgtcactttaccacctgacctgcacatcatgtctttacatgttgacccctttgctgctagactgtagaggacaatcttttgaatcatctttgtataaacagtcttaattttgctaaataattacttattgagttcctgctaagtgttaggcactggggaataaggaaggaaaatagaagctgtcrgggatggctttcctaaagatcatccatgagctgagacttaaagagtgaggttagccagattaa

SEQ ID NO: 598815 - DNA, 594 bp, Homo sapiens
tcactttaccacctgacctgcacatcatgtctttacatgttgacccctttgctgctagactgtagaggacaatcttttgaatcatctttgtataaacagtcttaattttgctaaataattacttattgagttcctgctaagtgttaggcactggggaataaggaaggaaaatagaagctgtcggggatggctttcctaaagatcatccatgagctgagacttaragagtgaggttagccagattaagcgaggcagagggcaggaaagggtgagcacatgccaggcagcaacaagagaagacaagaagcctccaagagagtatgtatttctctgcagaagaggaatggtgagggggccattaccagcagctcggtaattccagagaaaaaggcagatggggaaagggatacagatggagatttgggcagaaatcagtttccttttcttttcttttttgggacaaggttatactctgtctcccagactggagggcagtggcatgatctcagcttactgcaacccggcctcccaggttcaagtaattctcctgcctcagcctcctgagtagctgagattacaggtgcgtgccactac

SEQ ID NO: 598816 - DNA, 427 bp, Homo sapiens
tctgcagaagaggaatggtgagggggccattaccagcagctcggtaattccagagaaaaagrcagatggggaaagggatacagatggagatttgggcagaaatcagtttccttttcttttcttttttgggacaaggttatactctgtctcccagactggagggcagtggcatgatctcagcttactgcaacccggcctcccaggttcaagtaattctcctgcctcagcctcctgagtagctgagattacaggtgcgtgccactaccacctgctaatttttgtattttattagagatggggtttcaccttgttggccaggctggtcttgaactcctgacctcaaatgatccacttgcctcagcctcccaaagtgctgggatcacagacatgagccaccgtgccctacccagaagtcagtttctgaaat

SEQ ID NO: 598817 - DNA, 594 bp, Homo sapiens
tcactttaccacctgacctgcacatcatgtctttacatgttgacccctttgctgctagactgtagaggacaatcttttgaatcatctttgtataaacagtcttaattttgctaaataattacttattgagttcctgctaagtgttaggcactggggaataaggaaggaaaatagaagctgtcggggatggctttcctaaagatcatccatgagctgagacttaaagagtgaggttagccagattaagcgaggcagagggcaggaaagggtgagcacatgccaggcagcaacaagagaagacaagaagcctccaagagagtatgtatttctctgcagaagaggaatggtgagggggccattaccagcagctcggtaattccagagaaaaaggcagatggggaaagggatacagatggagatttgggcagaaatcagtttccttttcttttcttttttggracaaggttatactctgtctcccagactggagggcagtggcatgatctcagcttactgcaacccggcctcccaggttcaagtaattctcctgcctcagcctcctgagtagctgagattacaggtgcgtgccactac

SEQ ID NO: 598818 - DNA, 490 bp, Homo sapiens
atgtatttctctgcagaagaggaatggtgagggggccattaccagcagctcggtaattccagagaaaaaggcagatggggaaagggatacagatggagatttgggcagaaatcagtttccttttcttttcttttttgggacaaggttatactctgtctcccagactggagggcagtggcatgatctcagctyactgcaacccggcctcccaggttcaagtaattctcctgcctcagcctcctgagtagctgagattacaggtgcgtgccactaccacctgctaatttttgtattttattagagatggggtttcaccttgttggccaggctggtcttgaactcctgacctcaaatgatccacttgcctcagcctcccaaagtgctgggatcacagacatgagccaccgtgccctacccagaagtcagtttctgaaatccttatataaacctttaagatgcttggacattaggtattcaggaccggttcacg

SEQ ID NO: 598819 - DNA, 452 bp, Homo sapiens
ggtgagggggccattaccagcagctcggtaattccagagaaaaaggcagatggggaaagggatacagatggagatttgggcagaaatcagtttccttttcttttcttttttgggacaaggttatactctgtctcccagactggagggcagtggcatgatctcagcttactgcaacccggcctcccargttcaagtaattctcctgcctcagcctcctgagtagctgagattacaggtgcgtgccactaccacctgctaatttttgtattttattagagatggggtttcaccttgttggccaggctggtcttgaactcctgacctcaaatgatccacttgcctcagcctcccaaagtgctgggatcacagacatgagccaccgtgccctacccagaagtcagtttctgaaatccttatataaacctttaagatgcttggacattaggtattca

SEQ ID NO: 598820 - DNA, 481 bp, Homo sapiens
tgcgtgccactaccacctgctaatttttgtattttattagagatggggtttcaccttgttggccaggctggtcttgaactcctgayctcaaatgatccacttgcctcagcctcccaaagtgctgggatcacagacatgagccaccgtgccctacccagaagtcagtttctgaaatccttatataaacctttaagatgcttggacattaggtattcaggaccggttcacggatctatttgcattagggataattcactctaaatactatgaggagcataaaattctgaggcatataaatcaatgaacaaagataaaatataaggcaatgttgcaaagatgatgcaggcctgaggagatgttttcagaaatatttaggatataggtatcagtggccattataagaatgaatttctattgaataaataaatgtatatatctgggtccctggagaaatacactctgctcattactttacaaattt

SEQ ID NO: 598821 - DNA, 604 bp, Homo sapiens
tcagcttactgcaacccggcctcccaggttcaagtaattctcctgcctcagcctcctgagtagctgagattacaggtgcgtgccactaccacctgctaatttttgtattttattagagatggggtttcaccttgttggccaggctggtcttgaactcctgacctcaaatgatccacttgcctcagcctcccaaagtgctgggatcacagacatgagccaccgtgccctacccagaagtcagtttctgaaatccttatataaacctttaagatgcttggacattaggtattcaggamcggttcacggatctatttgcattagggataattcactctaaatactatgaggagcataaaattctgaggcatataaatcaatgaacaaagataaaatataaggcaatgttgcaaagatgatgcaggcctgaggagatgttttcagaaatatttaggatataggtatcagtggccattataagaatgaatttctattgaataaataaatgtatatatctgggtccctggagaaatacactctgctcattactttacaaattttatcaatcaaatgagaagtaaaataatatacataaactctttcagtt

SEQ ID NO: 598822 - DNA, 518 bp, Homo sapiens
tggagatttgggcagaaatcagtttccttttcttttcttttttgggacaaggttatactctgtctcccagactggagggcagtggcatgatctcagcttactgcaacccggcctcccaggttcaagtaattctcctgcctcagcctcctgagtagctgagattacaggtgcgtgccactaccacctgctaatttttgtattttattagagatggggtttcaccttgttggccaggctggtcttgaactcctgacctcaaatgatccacttgcctcagcctcccaaagtgctgggatcacagacatgagccaccgtgccctacccagaagtcagtttctgaaatccttatataaacctttaagatgcttggacattaggtattcaggaccggttcacggawctatttgcattagggataattcactctaaatactatgaggagcataaaattctgaggcatataaatcaatgaacaaagataaaatataaggcaatgttgcaaagatgatgcaggcctg

SEQ ID NO: 598823 - DNA, 604 bp, Homo sapiens
tcagcttactgcaacccggcctcccaggttcaagtaattctcctgcctcagcctcctgagtagctgagattacaggtgcgtgccactaccacctgctaatttttgtattttattagagatggggtttcaccttgttggccaggctggtcttgaactcctgacctcaaatgatccacttgcctcagcctcccaaagtgctgggatcacagacatgagccaccgtgccctacccagaagtcagtttctgaaatccttatataaacctttaagatgcttggacattaggtattcaggaccggttcacggatctatttgcattagggataattcactctaaatactrtgaggagcataaaattctgaggcatataaatcaatgaacaaagataaaatataaggcaatgttgcaaagatgatgcaggcctgaggagatgttttcagaaatatttaggatataggtatcagtggccattataagaatgaatttctattgaataaataaatgtatatatctgggtccctggagaaatacactctgctcattactttacaaattttatcaatcaaatgagaagtaaaataatatacataaactctttcagtt

SEQ ID NO: 598824 - DNA, 481 bp, Homo sapiens
tgcgtgccactaccacctgctaatttttgtattttattagagatggggtttcaccttgttggccaggctggtcttgaactcctgacctcaaatgatccacttgcctcagcctcccaaagtgctgggatcacagacatgagccaccgtgccctacccagaagtcagtttctgaaatccttatataaacctttaagatgcttggacattaggtattcaggaccggttcacggatctatttgcattagggataattcactctaaatactatgaggagcataaaattctgaggcatataaatcaatgaacaaagataaaatataaggcaatgttgcaaagatgatgcaggcctgaggagatgttttcagaaatatttaggatataggtatcagtggccattataagaatgaatttctattgaataaataaatgtatatatctsggtccctggagaaatacactctgctcattactttacaaattt

SEQ ID NO: 598825 - DNA, 578 bp, Homo sapiens
gtgcgtgccactaccacctgctaatttttgtattttattagagatggggtttcaccttgttggccaggctggtcttgaactcctgacctcaaatgatccacttgcctcagcctcccaaagtgctgggatcacagacatgagccaccgtgccctacccagaagtcagtttctgaaatccttatataaacctttaagatgcttggacattaggtattcaggaccggttcacggatctatttgcattagggataattcactctaaatactatgaggagcataaaattctgaggcatataaatcaatgaacaaagataaaatataaggcaatgttgcaaagatgatgcaggcctgaggagatgttttcagaaatatttaggatataggtatcagtggccattataagaatgaatttctattgaataaataaatgtatatatctgggtycctggagaaatacactctgctcattactttacaaattttatcaatcaaatgagaagtaaaataatatacataaactctttcagttacttgtatttactttaccctttttctgtttcagttttactgtgccaagg

SEQ ID NO: 598826 - DNA, 606 bp, Homo sapiens
cagtttctgaaatccttatataaacctttaagatgcttggacattaggtattcaggaccggttcacggatctatttgcattagggataattcactctaaatactatgaggagcataaaattctgaggcatataaatcaatgaacaaagataaaatataaggcaatgttgcaaagatgatgcaggcctgaggagatgttttcagaaatatttaggatataggtatcagtggccattataagaatgaatttctattgaataaataaatgtatatatctgggtccctggagaaatacactctgctcattactttacaaattttatcaatcaaatgagaagtaaaataatatacataaactctttcagttacttgtatttactttamcctttttctgtttcagttttactgtgccaaggaaatgcatttgggttttgtggtggttgttgtggttgtggttgtggttgtttttgttttttgagatggaatttcactcttcctgcccagtctgaagtgcaatggtgtgatctcagctcatggcaacctctgcctcctgggttcaagcgattctcctgcctcagcctcccaagtagctggaattacaggcatg

SEQ ID NO: 598827 - DNA, 635 bp, Homo sapiens
ataaaattctgaggcatataaatcaatgaacaaagataaaatataaggcaatgttgcaaagatgatgcaggcctgaggagatgttttcagaaatatttaggatataggtatcagtggccattataagaatgaatttctattgaataaataaatgtatatatctgggtccctggagaaatacactctgctcattactttacaaattttatcaatcaaatgagaagtaaaataatatacataaactctttcagttacttgtatttactttaccctttttctgtttcagttttactgtgccaaggaaatgcatttgkgttttgtggtggttgttgtggttgtggttgtggttgtttttgttttttgagatggaatttcactcttcctgcccagtctgaagtgcaatggtgtgatctcagctcatggcaacctctgcctcctgggttcaagcgattctcctgcctcagcctcccaagtagctggaattacaggcatgtgccaccatgaacagctattttgtgtttttagtagagatgggtttctccatgttggtcaggccggtctcaaactcccaacctcaggttatctgcccgcctcagcctcccaacgtgctgggattacaggcattagccaccgca

SEQ ID NO: 598828 - DNA, 635 bp, Homo sapiens
ataaaattctgaggcatataaatcaatgaacaaagataaaatataaggcaatgttgcaaagatgatgcaggcctgaggagatgttttcagaaatatttaggatataggtatcagtggccattataagaatgaatttctattgaataaataaatgtatatatctgggtccctggagaaatacactctgctcattactttacaaattttatcaatcaaatgagaagtaaaataatatacataaactctttcagttacttgtatttactttaccctttttctgtttcagttttactgtgccaaggaaatgcatttgggttttgtggtggttgttgtggttgtggttgtggttgtttttgttttttgagatggaatttcactcttcctgcccagtctgaagtgcartggtgtgatctcagctcatggcaacctctgcctcctgggttcaagcgattctcctgcctcagcctcccaagtagctggaattacaggcatgtgccaccatgaacagctattttgtgtttttagtagagatgggtttctccatgttggtcaggccggtctcaaactcccaacctcaggttatctgcccgcctcagcctcccaacgtgctgggattacaggcattagccaccgca

SEQ ID NO: 598829 - DNA, 606 bp, Homo sapiens
cagtttctgaaatccttatataaacctttaagatgcttggacattaggtattcaggaccggttcacggatctatttgcattagggataattcactctaaatactatgaggagcataaaattctgaggcatataaatcaatgaacaaagataaaatataaggcaatgttgcaaagatgatgcaggcctgaggagatgttttcagaaatatttaggatataggtatcagtggccattataagaatgaatttctattgaataaataaatgtatatatctgggtccctggagaaatacactctgctcattactttacaaattttatcaatcaaatgagaagtaaaataatatacataaactctttcagttacttgtatttactttaccctttttctgtttcagttttactgtgccaaggaaatgcatttgggttttgtggtggttgttgtggttgtggttgtggttgtttttgttttttgagatggaatttcactcttcctgcccagtctgaagtgcaatggtgtgatctcagctcatggcaacctctgcctcctgggttcaagygattctcctgcctcagcctcccaagtagctggaattacaggcatg

SEQ ID NO: 598830 - DNA, 657 bp, Homo sapiens
tcttcctgcccagtctgaagtgcaatggtgtgatctcagctcatggcaacctctgcctcctgggttcaagcgattctcctgcctcagcctcccaagtagctggaattacaggcatgtgccaccatgaacagctattttgtgtttttagtagagatgggtttctccatgttggtcaggcyggtctcaaactcccaacctcaggttatctgcccgcctcagcctcccaacgtgctgggattacaggcattagccaccgcacccagcaacatatggtgattttgttttaaaagttctgtttcctggatctaccaagctcatgagaaaatagagcaaacaagtcatttgcataggtaagaaactttggatttatagcttgtcctcactactctagaagattatcatcatgttttgcaaagcaaaatgttaaacacagacacaaggggaaaaagaaattaaaactataggggtgggtgaaaaaatattgcataatttattactgttgacctcatcatatgactgattaagggcactgaatttaacttggatgtgaagtagacctcatattagctgcagttaatcagtagaccaggcgtcctagcagaattaaatttgatgctcctgtgttatctttaaatgacacagcttttctgaaaaccc

SEQ ID NO: 598831 - DNA, 657 bp, Homo sapiens
tcttcctgcccagtctgaagtgcaatggtgtgatctcagctcatggcaacctctgcctcctgggttcaagcgattctcctgcctcagcctcccaagtagctggaattacaggcatgtgccaccatgaacagctattttgtgtttttagtagagatgggtttctccatgttggtcaggccgstctcaaactcccaacctcaggttatctgcccgcctcagcctcccaacgtgctgggattacaggcattagccaccgcacccagcaacatatggtgattttgttttaaaagttctgtttcctggatctaccaagctcatgagaaaatagagcaaacaagtcatttgcataggtaagaaactttggatttatagcttgtcctcactactctagaagattatcatcatgttttgcaaagcaaaatgttaaacacagacacaaggggaaaaagaaattaaaactataggggtgggtgaaaaaatattgcataatttattactgttgacctcatcatatgactgattaagggcactgaatttaacttggatgtgaagtagacctcatattagctgcagttaatcagtagaccaggcgtcctagcagaattaaatttgatgctcctgtgttatctttaaatgacacagcttttctgaaaaccc

SEQ ID NO: 598832 - DNA, 657 bp, Homo sapiens
tcttcctgcccagtctgaagtgcaatggtgtgatctcagctcatggcaacctctgcctcctgggttcaagcgattctcctgcctcagcctcccaagtagctggaattacaggcatgtgccaccatgaacagctattttgtgtttttagtagagatgggtttctccatgttggtcaggccggtctcaaactcccaacctcaggttatctgcccgcctcagcctcccaamgtgctgggattacaggcattagccaccgcacccagcaacatatggtgattttgttttaaaagttctgtttcctggatctaccaagctcatgagaaaatagagcaaacaagtcatttgcataggtaagaaactttggatttatagcttgtcctcactactctagaagattatcatcatgttttgcaaagcaaaatgttaaacacagacacaaggggaaaaagaaattaaaactataggggtgggtgaaaaaatattgcataatttattactgttgacctcatcatatgactgattaagggcactgaatttaacttggatgtgaagtagacctcatattagctgcagttaatcagtagaccaggcgtcctagcagaattaaatttgatgctcctgtgttatctttaaatgacacagcttttctgaaaaccc

SEQ ID NO: 598833 - DNA, 657 bp, Homo sapiens
tcttcctgcccagtctgaagtgcaatggtgtgatctcagctcatggcaacctctgcctcctgggttcaagcgattctcctgcctcagcctcccaagtagctggaattacaggcatgtgccaccatgaacagctattttgtgtttttagtagagatgggtttctccatgttggtcaggccggtctcaaactcccaacctcaggttatctgcccgcctcagcctcccaacgtgctgggattacaggcaytagccaccgcacccagcaacatatggtgattttgttttaaaagttctgtttcctggatctaccaagctcatgagaaaatagagcaaacaagtcatttgcataggtaagaaactttggatttatagcttgtcctcactactctagaagattatcatcatgttttgcaaagcaaaatgttaaacacagacacaaggggaaaaagaaattaaaactataggggtgggtgaaaaaatattgcataatttattactgttgacctcatcatatgactgattaagggcactgaatttaacttggatgtgaagtagacctcatattagctgcagttaatcagtagaccaggcgtcctagcagaattaaatttgatgctcctgtgttatctttaaatgacacagcttttctgaaaaccc

SEQ ID NO: 598834 - DNA, 455 bp, Homo sapiens
catgttggtcaggccggtctcaaactcccaacctcaggttatctgcccgcctcagcctcccaacgtgctgggattacaggcattagccaccgcacccagcaacatatggkgattttgttttaaaagttctgtttcctggatctaccaagctcatgagaaaatagagcaaacaagtcatttgcataggtaagaaactttggatttatagcttgtcctcactactctagaagattatcatcatgttttgcaaagcaaaatgttaaacacagacacaaggggaaaaagaaattaaaactataggggtgggtgaaaaaatattgcataatttattactgttgacctcatcatatgactgattaagggcactgaatttaacttggatgtgaagtagacctcatattagctgcagttaatcagtagaccaggcgtcctagcagaattaaatttgatgctcc

SEQ ID NO: 598835 - DNA, 569 bp, Homo sapiens
aacaagtcatttgcataggtaagaaactttggatttatagcttgtcctcactactctagaagattatcatcatgttttgcaaagcaaaatgttaaacacagacayaaggggaaaaagaaattaaaactataggggtgggtgaaaaaatattgcataatttattactgttgacctcatcatatgactgattaagggcactgaatttaacttggatgtgaagtagacctcatattagctgcagttaatcagtagaccaggcgtcctagcagaattaaatttgatgctcctgtgttatctttaaatgacacagcttttctgaaaacccttactcatagcgcatgattatccattaagaaaaggtgatggaatatgtgaatacagcggaggagacaccacaaggcaaatgctcagtggttcccattaatattgggaaaatcaacactataaaacagaaagccatagacattatttaatatttggttttgggaggtatttttagtgacactgcatacagttgtacctaataattgctaaattagagacgtaaaagtaaaacaaaggcacattgt

SEQ ID NO: 598836 - DNA, 569 bp, Homo sapiens
aacaagtcatttgcataggtaagaaactttggatttatagcttgtcctcactactctagaagattatcatcatgttttgcaaagcaaaatgttaaacacagacacaaggggaaaaagaaattaaaactataggggtgggtgaaaaaatattgcataatttattactgttgacctcatcatatgactgattaagggcactgaatttaacttggatgtgaagtagacctcatattagctgcagttaatcagtagaccaggcgtcctagcagaattaaatttgatgctcctgtgttatctttaaatgacacagcttttctgaaaacccttactcatagygcatgattatccattaagaaaaggtgatggaatatgtgaatacagcggaggagacaccacaaggcaaatgctcagtggttcccattaatattgggaaaatcaacactataaaacagaaagccatagacattatttaatatttggttttgggaggtatttttagtgacactgcatacagttgtacctaataattgctaaattagagacgtaaaagtaaaacaaaggcacattgt

SEQ ID NO: 598837 - DNA, 569 bp, Homo sapiens
aacaagtcatttgcataggtaagaaactttggatttatagcttgtcctcactactctagaagattatcatcatgttttgcaaagcaaaatgttaaacacagacacaaggggaaaaagaaattaaaactataggggtgggtgaaaaaatattgcataatttattactgttgacctcatcatatgactgattaagggcactgaatttaacttggatgtgaagtagacctcatattagctgcagttaatcagtagaccaggcgtcctagcagaattaaatttgatgctcctgtgttatctttaaatgacacagcttttctgaaaacccttactcatagcgcrtgattatccattaagaaaaggtgatggaatatgtgaatacagcggaggagacaccacaaggcaaatgctcagtggttcccattaatattgggaaaatcaacactataaaacagaaagccatagacattatttaatatttggttttgggaggtatttttagtgacactgcatacagttgtacctaataattgctaaattagagacgtaaaagtaaaacaaaggcacattgt

SEQ ID NO: 598838 - DNA, 640 bp, Homo sapiens
caaaatgttaaacacagacacaaggggaaaaagaaattaaaactataggggtgggtgaaaaaatattgcataatttattactgttgacctcatcatatgactgattaagggcactgaatttaacttggatgtgaagtagacctcatattagctgcagttaatcagtagaccaggcgtcctagcagaattaaatttgatgctcctgtgttatctttaaatgacacagcttttctgaaaacccttactcatagcgcatgattatccattaagaaaaggtgatggaatatgtgaatacagckgaggagacaccacaaggcaaatgctcagtggttcccattaatattgggaaaatcaacactataaaacagaaagccatagacattatttaatatttggttttgggaggtatttttagtgacactgcatacagttgtacctaataattgctaaattagagacgtaaaagtaaaacaaaggcacattgtgtttgagtaggaaatctatagacatctagctggttttcccatccagccacaaaattctaaatataatcatggaacctgcactcaaatttatgttaaataccaacctcaatgaaatcactctttcttctcattctctttgttatttatatgttgct

SEQ ID NO: 598839 - DNA, 573 bp, Homo sapiens
attaatattgggaaaatcaacactataaaacagaaagccatagacattatttaatatttggttttgggaggtatttttagtgacactgcatacagttgtacctaataattgctaaattagagasgtaaaagtaaaacaaaggcacattgtgtttgagtaggaaatctatagacatctagctggttttcccatccagccacaaaattctaaatataatcatggaacctgcactcaaatttatgttaaataccaacctcaatgaaatcactctttcttctcattctctttgttatttatatgttgctttccttaagggaagaatacaaatgccttgctaagaaccattctgtttggttgtaggctgcataaggggagtgaacacaaagtacatttgaccacaaaatgactctttaaaagtcagaactacggtagcatgaagccaaacgaggtaatctacaataaaattttctatgcttcttttccttctttgctctctttctactctaataactgcgattcacacaggtaatgaagagtgtaattccttgatagaaacacagctccaagattaat

SEQ ID NO: 598840 - DNA, 509 bp, Homo sapiens
cctcatattagctgcagttaatcagtagaccaggcgtcctagcagaattaaatttgatgctcctgtgttatctttaaatgacacagcttttctgaaaacccttactcatagcgcatgattatccattaagaaaaggtgatggaatatgtgaatacagcggaggagacaccacaaggcaaatgctcagtggttcccattaatattgggaaaatcaacactataaaacagaaagccatagacattatttaatatttggttttgggaggtatttttagtgacactgcatacagttgtacctaataattgctaaattagagacgtaaaagtaaaacaaaggcacattgtgtttgartaggaaatctatagacatctagctggttttcccatccagccacaaaattctaaatataatcatggaacctgcactcaaatttatgttaaataccaacctcaatgaaatcactctttcttctcattctctttgttatttatatgttgctttccttaag

SEQ ID NO: 598841 - DNA, 509 bp, Homo sapiens
cctcatattagctgcagttaatcagtagaccaggcgtcctagcagaattaaatttgatgctcctgtgttatctttaaatgacacagcttttctgaaaacccttactcatagcgcatgattatccattaagaaaaggtgatggaatatgtgaatacagcggaggagacaccacaaggcaaatgctcagtggttcccattaatattgggaaaatcaacactataaaacagaaagccatagacattatttaatatttggttttgggaggtatttttagtgacactgcatacagttgtacctaataattgctaaattagagacgtaaaagtaaaacaaaggcacattgtgtttgagtaggaaatctatagacatctagctggttttcccatccagccacaaaattctaartataatcatggaacctgcactcaaatttatgttaaataccaacctcaatgaaatcactctttcttctcattctctttgttatttatatgttgctttccttaag

SEQ ID NO: 598842 - DNA, 595 bp, Homo sapiens
taggaaatctatagacatctagctggttttcccatccagccacaaaattctaaatataatcatggaacctgcactcaaatttatgttaaataccaacctcaatgaaatcactctttcttctcattctctttgttatttatatgttgctttccttaagggaagaatacaaatgccttgctaagaaccattctgtttggttgtaggctgcataaggggagtgaacacaaagtacatttgaccacawaatgactctttaaaagtcagaactacggtagcatgaagccaaacgaggtaatctacaataaaattttctatgcttcttttccttctttgctctctttctactctaataactgcgattcacacaggtaatgaagagtgtaattccttgatagaaacacagctccaagattaatcctttctttaactatgaagttcgcgtgtccaaaatctgtggtagttgctgtctgatttttgatcactgatggtgatacagatatttatcatcaactcacaacttcccaaatctttgaaaagtcttactattggtggttcaactagtagaaacatgatgtaaaatatctgaaaataaagt

SEQ ID NO: 598843 - DNA, 592 bp, Homo sapiens
acaaaatgactctttaaaagtcagaactacggtagcatgaagccaaacgaggtaatctacaataaaattttctatgcttctttyccttctttgctctctttctactctaataactgcgattcacacaggtaatgaagagtgtaattccttgatagaaacacagctccaagattaatcctttctttaactatgaagttcgcgtgtccaaaatctgtggtagttgctgtctgatttttgatcactgatggtgatacagatatttatcatcaactcacaacttcccaaatctttgaaaagtcttactattggtggttcaactagtagaaacatgatgtaaaatatctgaaaataaagtttttatttattagaatgtaaataataatacaaattgtaataaggtgtaaaagttctttcttcactgaagcagtaccatgttgtcctctaccccacaaatgcactactcccccgtggtctaatgtattttaaaagtcttgtaattgctattaactcagacaagtttacttaacttgttctaagcttctggtatttactacagtttactttcaatcactcaaccatctctgttatatat

SEQ ID NO: 598844 - DNA, 328 bp, Homo sapiens
ctttctttaactatgaagttcgcgtgtccaaaatctgtggtagttgctgtctgatttttgatcactgatggtgatacagatatttatcatcaactcacaacttcccaaatctttgaaaagtcttactattgrtggttcaactagtagaaacatgatgtaaaatatctgaaaataaagtttttatttattagaatgtaaataataatacaaattgtaataaggtgtaaaagttctttcttcactgaagcagtaccatgttgtcctctaccccacaaatgcactactcccccgtggtctaatgtattttaaaagtcttgtaattgctatt

SEQ ID NO: 598845 - DNA, 605 bp, Homo sapiens
gtcttactattggtggttcaactagtagaaacatgatgtaaaatatctgaaaataaagtttttatttattagaatgtaaataataatacaaattgtaataaggtgtaaaagttctttcttcactgaagcagtaccatgttgtcctctaccccacaaatgcactactcccccgtggtctaatgtattttaaaagtcttgtaattgctattaactcagacaagtttacttaacttgttctaagcttytggtatttactacagtttactttcaatcactcaaccatctctgttatatatgttgttttccatgagaaatttgtttattagtaattaagattcttcagggataagaaaatatttgaataactaagtttgtgcataaacacattaaggtcaaatacccatgacattattgtgtgtttctgtgtactagagacaaaaacttcaaaaaaaatttaatgaatatacgttaaattaaaaactgctttcattaaactgagataatcttccctcaatgcatgaataccttcagaattcacatagaccaaagaattgtataaaatataatagccttaaaaatcttatttgtagctagcacagtggctc

SEQ ID NO: 598846 - DNA, 644 bp, Homo sapiens
aatgaagagtgtaattccttgatagaaacacagctccaagattaatcctttctttaactatgaagttcgcgtgtccaaaatctgtggtagttgctgtctgatttttgatcactgatggtgatacagatatttatcatcaactcacaacttcccaaatctttgaaaagtcttactattggtggttcaactagtagaaacatgatgtaaaatatctgaaaataaagtttttatttattagaatgtaaataataatacaaattgtaataaggtgtaaaagttctttcttcactgaagcagtaccatgttgtcctctaccccacaaatgcactactcccccgtggtctaatgtattttaaaagtcttgtaattgctattaactcagacaagtttacttaacttgttctaagcttctggyatttactacagtttactttcaatcactcaaccatctctgttatatatgttgttttccatgagaaatttgtttattagtaattaagattcttcagggataagaaaatatttgaataactaagtttgtgcataaacacattaaggtcaaatacccatgacattattgtgtgtttctgtgtactagagacaaaaacttcaaaaaaaatttaatgaatatacgttaaattaaa

SEQ ID NO: 598847 - DNA, 565 bp, Homo sapiens
tgtttattagtaattaagattcttcagggataagaaaatatttgaataactaagtttgtgcataaacacattaaggtcaaatacccatgacattattgtgtgtttctgtgtactagagacaaaaacttcaaaaaaaatttaatgaatatacgttaaattaaaaactgctttcattaaactgagataatcttccctcaatgcatgaataccttcagaattcacatagaccaaagaattgtataaaatataatagccttaaaaatcttatttgtagctrgcacagtggctcccacctgtaatcccagcacattggcaagccgaggtgggcagatcacctgaggtcaggagttcaagagcagcctggccaaactggtgaaaccccatctctactaaaaatagaaaaattagcagggtatggtagcacgtgcatgtagtatcagctactcgaggggctgaggcaggagaattgcttgaacccgagaggcagaggtggtaatgagccaagactgagccactgaactccagccttggtgacagagcaagactctgcctcaaaaacacaaac

SEQ ID NO: 598848 - DNA, 576 bp, Homo sapiens
tttcattaaactgagataatcttccctcaatgcatgaataccttcagaattcacatagaccaaagaattgtataaaatataatagccttaaaaatcttatttgtagctagcacagtggctcccacctgtaatcccagcacattggcaagccgaggtgggcagatcacctgaggtcaggagttcaagagcagcctggccaaactggtgaaaccccatctctactaaaaatagaaaaattagcagggtatggtagcacgtgcatgtagtatcagctactcgaggggctgaggcaggagaattgcttgaaccygagaggcagaggtggtaatgagccaagactgagccactgaactccagccttggtgacagagcaagactctgcctcaaaaacacaaacaaacaaacaaaaaacctaattgttcccatataagtctatgttcatacaagatctgaagagtacacaacaccgtgagacaggacagacatatattttaaaagttatattcctggtttctgtaaaaataaaatagttgaatttaagctttcaagacaagtcaacgaaaagagcaaaaaatg

SEQ ID NO: 598849 - DNA, 576 bp, Homo sapiens
tttcattaaactgagataatcttccctcaatgcatgaataccttcagaattcacatagaccaaagaattgtataaaatataatagccttaaaaatcttatttgtagctagcacagtggctcccacctgtaatcccagcacattggcaagccgaggtgggcagatcacctgaggtcaggagttcaagagcagcctggccaaactggtgaaaccccatctctactaaaaatagaaaaattagcagggtatggtagcacgtgcatgtagtatcagctactcgaggggctgaggcaggagaattgcttgaacccgagaggcagaggtggtaatgagccaagactgagccactgmactccagccttggtgacagagcaagactctgcctcaaaaacacaaacaaacaaacaaaaaacctaattgttcccatataagtctatgttcatacaagatctgaagagtacacaacaccgtgagacaggacagacatatattttaaaagttatattcctggtttctgtaaaaataaaatagttgaatttaagctttcaagacaagtcaacgaaaagagcaaaaaatg

SEQ ID NO: 598850 - DNA, 576 bp, Homo sapiens
tttcattaaactgagataatcttccctcaatgcatgaataccttcagaattcacatagaccaaagaattgtataaaatataatagccttaaaaatcttatttgtagctagcacagtggctcccacctgtaatcccagcacattggcaagccgaggtgggcagatcacctgaggtcaggagttcaagagcagcctggccaaactggtgaaaccccatctctactaaaaatagaaaaattagcagggtatggtagcacgtgcatgtagtatcagctactcgaggggctgaggcaggagaattgcttgaacccgagaggcagaggtggtaatgagccaagactgagccactgaactccagccttggtgacagagcaagactctgyctcaaaaacacaaacaaacaaacaaaaaacctaattgttcccatataagtctatgttcatacaagatctgaagagtacacaacaccgtgagacaggacagacatatattttaaaagttatattcctggtttctgtaaaaataaaatagttgaatttaagctttcaagacaagtcaacgaaaagagcaaaaaatg

SEQ ID NO: 598851 - DNA, 391 bp, Homo sapiens
agctttcaagacaagtcaacgaaaagagcaaaaaatgcaaaagtgaaactcgaaaggtcatttccccatcaagggctcatgatcactggacattcacaaactatactgttcaaaacattagatctgaattttgatccgagtatccctttagtagcagtttcattcaaggatgtccaagaggtaaaataagacaatatcatttgctattttcagttttcttttctgagaacagcycagcattcttcttcagagaaatgaattgtcctaacttcataggctaaaggctcatgagtcatagttctaaggacattaataaaatatggtggtgcatgcttgtattctgaacttttcaggtttaaactctcatatagtaaatgctaatagatacaaa

SEQ ID NO: 598852 - DNA, 539 bp, Homo sapiens
tcgaaaggtcatttccccatcaagggctcatgatcactggacattcacaaactatactgttcaaaacattagatctgaattttgatccgagtatccctttagtagcagtttcattcaaggatgtccaagaggtaaaataagacaatatcatttgctattttcagttttcttttctgagaacagctcagcattcttcttcagagaaatgaattgtcctaacttcataggctaaaggctcatgagtcatagttctaaggrcattaataaaatatggtggtgcatgcttgtattctgaacttttcaggtttaaactctcatatagtaaatgctaatagatacaaaccgattaaagaaaagccctcttaatctgacattatttttctttttatttcttcatttatcagcaacaggagagtctaactaaatgtggtaaagtggtatgagggaatacaatgaacagtgtaaaatgaattaaaccagagataatcacaccaatgtgggtacaagtggaaagtataatacaaaacacaccaaagaaa

SEQ ID NO: 598853 - DNA, 539 bp, Homo sapiens
tcgaaaggtcatttccccatcaagggctcatgatcactggacattcacaaactatactgttcaaaacattagatctgaattttgatccgagtatccctttagtagcagtttcattcaaggatgtccaagaggtaaaataagacaatatcatttgctattttcagttttcttttctgagaacagctcagcattcttcttcagagaaatgaattgtcctaacttcataggctaaaggctcatgagtcatagttctaaggacattaataaaatatggtggtgcatgcttgtattctgaacttttcaggtttaaactctcatatagtaaatgctaatagatacaaacygattaaagaaaagccctcttaatctgacattatttttctttttatttcttcatttatcagcaacaggagagtctaactaaatgtggtaaagtggtatgagggaatacaatgaacagtgtaaaatgaattaaaccagagataatcacaccaatgtgggtacaagtggaaagtataatacaaaacacaccaaagaaa

SEQ ID NO: 598854 - DNA, 539 bp, Homo sapiens
tcgaaaggtcatttccccatcaagggctcatgatcactggacattcacaaactatactgttcaaaacattagatctgaattttgatccgagtatccctttagtagcagtttcattcaaggatgtccaagaggtaaaataagacaatatcatttgctattttcagttttcttttctgagaacagctcagcattcttcttcagagaaatgaattgtcctaacttcataggctaaaggctcatgagtcatagttctaaggacattaataaaatatggtggtgcatgcttgtattctgaacttttcaggtttaaactctcatatagtaaatgctaatagatacaaaccgattaaagaaaagccctcttaawctgacattatttttctttttatttcttcatttatcagcaacaggagagtctaactaaatgtggtaaagtggtatgagggaatacaatgaacagtgtaaaatgaattaaaccagagataatcacaccaatgtgggtacaagtggaaagtataatacaaaacacaccaaagaaa

SEQ ID NO: 598855 - DNA, 543 bp, Homo sapiens
taaaataagacaatatcatttgctattttcagttttcttttctgagaacagctcagcattcttcttcagagaaatgaattgtcctaacttcataggctaaaggctcatgagtcatagttctaaggacattaataaaatatggtggtgcatgcttgtattctgaacttttcaggtttaaactctcatatagtaaatgctaatagatacaaaccgattaaagaaaagccctcttaatctgacattatttttctttttatttcttcatttatcagcaacaggagagtctaactaaatgtggtaaagtggtatgagggaatacaatgaacagtgtaaaatgaattaaaccagagataatcacaccaatgtgggtacaagtggaaagtataatacaaaacacaccaaagaaagtggcagaaaggtatataaactgtataaccactcacataccattttaggacmcaaaaaattctgcatattatttctgagcatcacaatgtagttaaagatttcaaaagggcattgaaatgaaaaacaaccaactta

SEQ ID NO: 598856 - DNA, 530 bp, Homo sapiens
accaatgtgggtacaagtggaaagtataatacaaaacacaccaaagaaagtggcagaaaggtatataaactgtataaccactcacataccattttaggacccaaaaaattctgcatattatttctgagcatcacaatgtagttaaagatttcaaaagggcattgaaatgaaaaacaaccracttatgatgttggtagcctctatgcaatcatgttttaaaaactttaacaccaaaaaggctcaaaatcaccattttaaaaggctgtgtctaccagtcataaatgaatcattactttcatcatttgtagtagtcaaagatgccacaagcgcacgcatacacacatctatatatacacctacacacacagtcttactcattagaacatctgataggcttcagatcatcagtgtaataacactagcagcaagcctctgaagttaaaacagaaactgacactttaataagtaaagctttcctctaggtaaagatcagaactccaactagcacttaactcactggaaatatctta

SEQ ID NO: 598857 - DNA, 530 bp, Homo sapiens
accaatgtgggtacaagtggaaagtataatacaaaacacaccaaagaaagtggcagaaaggtatataaactgtataaccactcacataccattttaggacccaaaaaattctgcatattatttctgagcatcacaatgtagttaaagatttcaaaagggcattgaaatgaaaaacaaccaacttatgatgttggtagcctctatgcaatcatgttttaaaaactttracaccaaaaaggctcaaaatcaccattttaaaaggctgtgtctaccagtcataaatgaatcattactttcatcatttgtagtagtcaaagatgccacaagcgcacgcatacacacatctatatatacacctacacacacagtcttactcattagaacatctgataggcttcagatcatcagtgtaataacactagcagcaagcctctgaagttaaaacagaaactgacactttaataagtaaagctttcctctaggtaaagatcagaactccaactagcacttaactcactggaaatatctta

SEQ ID NO: 598858 - DNA, 407 bp, Homo sapiens
aaaacaaccaacttatgatgttggtagcctctatgcaatcatgttttaaaaactttaacaccaaaaaggctcaaaatcaccattttaaaaggctgtgtctaccagtcataaatgaatcattactttcatcatttgtagtagtcaaagatgccmcaagcgcacgcatacacacatctatatatacacctacacacacagtcttactcattagaacatctgataggcttcagatcatcagtgtaataacactagcagcaagcctctgaagttaaaacagaaactgacactttaataagtaaagctttcctctaggtaaagatcagaactccaactagcacttaactcactggaaatatcttaagagtctcaaaattcactgctttgaatccctgacaagtataaaaatt

SEQ ID NO: 598859 - DNA, 407 bp, Homo sapiens
aaaacaaccaacttatgatgttggtagcctctatgcaatcatgttttaaaaactttaacaccaaaaaggctcaaaatcaccattttaaaaggctgtgtctaccagtcataaatgaatcattactttcatcatttgtagtagtcaaagatgccacaagcgcacgcatacacacatctatatatacacctacacacacagtyttactcattagaacatctgataggcttcagatcatcagtgtaataacactagcagcaagcctctgaagttaaaacagaaactgacactttaataagtaaagctttcctctaggtaaagatcagaactccaactagcacttaactcactggaaatatcttaagagtctcaaaattcactgctttgaatccctgacaagtataaaaatt

SEQ ID NO: 598860 - DNA, 407 bp, Homo sapiens
aaaacaaccaacttatgatgttggtagcctctatgcaatcatgttttaaaaactttaacaccaaaaaggctcaaaatcaccattttaaaaggctgtgtctaccagtcataaatgaatcattactttcatcatttgtagtagtcaaagatgccacaagcgcacgcatacacacatctatatatacacctacacacacagtcttactcattagaacatctgataggcttcagatcatcagtgtaataacactagcagcaagcctctgaagttaaaacagaaactgacactttaataagtaaagctttcctctaggtaaagatcagaactccaactagcacttaactcwctggaaatatcttaagagtctcaaaattcactgctttgaatccctgacaagtataaaaatt

SEQ ID NO: 598861 - DNA, 596 bp, Homo sapiens
tcattagaacatctgataggcttcagatcatcagtgtaataacactagcagcaagcctctgaagttaaaacagaaactgacactttaataagtaaagctttcctctaggtaaagatcagaactccaactagcacttaactcactggaaatatcttaagagtctcaaaattcactgctttgaatccctgacaagtataaaaattttatactgaaaacttcatgctattcaaaacattaawacagaaacatctgacctaaagcttacatttttaaaatcttttttatgcttctaaatttgtttttattcaaatatggataccaacaataacatttatgtcaaagccttctgttcaatattgaacaaatagaattaggaataagaataatatgagtacatccaatcattgaatgtactttatttccagtattccattaaatgtacctgctctcaatgtctgtacattctttctttgtactgctcctttcacagcaggatcttccacttcagtgctaggctgaatgggttttaaaagaaaacgattcataaatcatatatattttatacaacatggagttagtgattcaaaaatatacat

SEQ ID NO: 598862 - DNA, 596 bp, Homo sapiens
tcattagaacatctgataggcttcagatcatcagtgtaataacactagcagcaagcctctgaagttaaaacagaaactgacactttaataagtaaagctttcctctaggtaaagatcagaactccaactagcacttaactcactggaaatatcttaagagtctcaaaattcactgctttgaatccctgacaagtataaaaattttatactgaaaacttcatgctattcaaaacattaaaacagaaacatctgacctaaagcttacatttttaaaatcttttttatgcttctaaatttgtttttattcaaatatggataccaacaataacatttatgtcaaagccttctgttcaatattgaacaaatagaattaggaataagaataatatgagtacatccaatcattgaatgtactttatttmcagtattccattaaatgtacctgctctcaatgtctgtacattctttctttgtactgctcctttcacagcaggatcttccacttcagtgctaggctgaatgggttttaaaagaaaacgattcataaatcatatatattttatacaacatggagttagtgattcaaaaatatacat

SEQ ID NO: 598863 - DNA, 562 bp, Homo sapiens
ataacatttatgtcaaagccttctgttcaatattgaacaaatagaattaggaataagaataatatgagtacatccaatcattgaatgtactttatttccagtattccattaaatgtacctgctctcaatgtctgtacattctttctttgtactgctcctttcacagcaggatcttccacttcagtgctaggctgaatgggttttaaaagawaacgattcataaatcatatatattttatacaacatggagttagtgattcaaaaatatacataattaattaccttcaaggaaggatgttttgcaggaggccctacaaagcaaaggggatatgtcatcaattatatgtaagtatgacagggccaaccaaacattcatgcagtgttactgttgagctgaattctcaggcctggctataaaaataattacttaaggttttgagggttcttcttggcttcttcttttcattgcctaggacagcaacatgacagaaacacaatgaggaaaataggaatataggattcccaaaatgcacagtttacatttcggtagtgagattatgtt

SEQ ID NO: 598864 - DNA, 562 bp, Homo sapiens
ataacatttatgtcaaagccttctgttcaatattgaacaaatagaattaggaataagaataatatgagtacatccaatcattgaatgtactttatttccagtattccattaaatgtacctgctctcaatgtctgtacattctttctttgtactgctcctttcacagcaggatcttccacttcagtgctaggctgaatgggttttaaaagaaaacgattcataaatcatatatattttatacaacatggagttagtgattcaaaaatatacataattaattaccttcaaggaaggatgttttgcaggaggccctacaaagcaaaggggatatgtcatcaattatatgtaagtatgacarggccaaccaaacattcatgcagtgttactgttgagctgaattctcaggcctggctataaaaataattacttaaggttttgagggttcttcttggcttcttcttttcattgcctaggacagcaacatgacagaaacacaatgaggaaaataggaatataggattcccaaaatgcacagtttacatttcggtagtgagattatgtt

SEQ ID NO: 598865 - DNA, 410 bp, Homo sapiens
caattatatgtaagtatgacagggccaaccaaacattcatgcagtgttactgtygagctgaattctcaggcctggctataaaaataattacttaaggttttgagggttcttcttggcttcttcttttcattgcctaggacagcaacatgacagaaacacaatgaggaaaataggaatataggattcccaaaatgcacagtttacatttcggtagtgagattatgtttcaaatgcctatacttaaaatagaaaagcattgatataaccgtgaacacgtggactgatgaggagaaaagggaccattaaacagaggggcaaatcaaacctgagagaatcaatgtcaaagctgatggtgaatgtacagagtattttaactccacacaccagaggcattgctgccagcacagcac

SEQ ID NO: 598866 - DNA, 357 bp, Homo sapiens
catgcagtgttactgttgagctgaattctcaggcctggctataaaaataattacttaaggttttgagggttcttcttggcttcttcttttcattgcctaggacagcaacatgacagaaacacaatgaggaaaataggaatataggattcccaaaatgcacagtttacatttcrgtagtgagattatgtttcaaatgcctatacttaaaatagaaaagcattgatataaccgtgaacacgtggactgatgaggagaaaagggaccattaaacagaggggcaaatcaaacctgagagaatcaatgtcaaagctgatggtgaatgtacagagtattttaactccacacaccagaggcatt

SEQ ID NO: 598867 - DNA, 559 bp, Homo sapiens
tgtcatcaattatatgtaagtatgacagggccaaccaaacattcatgcagtgttactgttgagctgaattctcaggcctggctataaaaataattacttaaggttttgagggttcttcttggcttcttcttttcattgcctaggacagcaacatgacagaaacacaatgaggaaaataggaatataggattcccaaaatgcacagtttacatttcggtagtgagattatgtttcaaatgcctatacttaaaatagaaaagcattgatataacygtgaacacgtggactgatgaggagaaaagggaccattaaacagaggggcaaatcaaacctgagagaatcaatgtcaaagctgatggtgaatgtacagagtattttaactccacacaccagaggcattgctgccagcacagcacaaataaattccccttgtcttgtcactgaggaaatacgcagttgggatgacagttcagatgaatgtgggattcacctctcatcaaagaaagggttctacattgatcagctaggatacacacttatgaaataacagctaatcaaa

SEQ ID NO: 598868 - DNA, 594 bp, Homo sapiens
aatgtacagagtattttaactccacacaccagaggcattgctgccagcacagcacaaataaattccccttgtcttgtcactgaggaaatacgcagttgggatgacagttcagrtgaatgtgggattcacctctcatcaaagaaagggttctacattgatcagctaggatacacacttatgaaataacagctaatcaaactactcatttttcccatgatcacatgggctactgcagcacctacatttctcctatcccctcatttggccttgaattagagctccttgatccactcatgcaaggtggtccataaaacacatcaaataaaccatgtcgaataagcttctgatatcaaaatatttatcaaaaaagaaaacattgaatgaccacagacttgctggatattaatacatatttatatttcaaaatcagtgcagtatttattgaaaatgataattttggttttcatggaatgaattttatgattacttctaaaattaactaagtttggtatattatcttacactgtaaaggacttttataaaacagctatcatatcaaagaactggctgtctcaaaaaaatttcgccaaagca

SEQ ID NO: 598869 - DNA, 576 bp, Homo sapiens
aataggaatataggattcccaaaatgcacagtttacatttcggtagtgagattatgtttcaaatgcctatacttaaaatagaaaagcattgatataaccgtgaacacgtggactgatgaggagaaaagggaccattaaacagaggggcaaatcaaacctgagagaatcaatgtcaaagctgatggtgaatgtacagagtattttaactccacacaccagaggcattgctgccagcacagcacaaataaattccccttgtcttgtcactgaggaaatacgcagttgggatgacagttcagatgaatgtgggattcacctctcatcaaagaaagggttctacattgatcagctaggatacacacttatgaaayaacagctaatcaaactactcatttttcccatgatcacatgggctactgcagcacctacatttctcctatcccctcatttggccttgaattagagctccttgatccactcatgcaaggtggtccataaaacacatcaaataaaccatgtcgaataagcttctgatatcaaaatatttatcaaaaaagaaaacattgaatgaccaca

SEQ ID NO: 598870 - DNA, 576 bp, Homo sapiens
aataggaatataggattcccaaaatgcacagtttacatttcggtagtgagattatgtttcaaatgcctatacttaaaatagaaaagcattgatataaccgtgaacacgtggactgatgaggagaaaagggaccattaaacagaggggcaaatcaaacctgagagaatcaatgtcaaagctgatggtgaatgtacagagtattttaactccacacaccagaggcattgctgccagcacagcacaaataaattccccttgtcttgtcactgaggaaatacgcagttgggatgacagttcagatgaatgtgggattcacctctcatcaaagaaagggttctacattgatcagctaggatacacacttatgaaataacagctaatcaaactactcatttttcccatgatcacatgggctactgcagcacctacatttctcctatcccctcatttggccttgaattagagctccttgatccactcatgcaaggtggtccataaaacacatcaaataaaccatgtcraataagcttctgatatcaaaatatttatcaaaaaagaaaacattgaatgaccaca

SEQ ID NO: 598871 - DNA, 612 bp, Homo sapiens
catgcaaggtggtccataaaacacatcaaataaaccatgtcgaataagcttctgatatcaaaatatttatcaaaaaagaaaacattgaatgaccacagacttgctggatattaatacatatttatatttcaaaatcagtgcagtatttattgaaaatgataattttggttttcatggaatgaattttatgattacttctaaaattaactaagtttggtatattatcttacactgtaaaggacttttataaaacagctatcatatcaaagaactggctgtctcaaaaaaatttcgccaaagcatctatatgcaasttaatcatatcttattcactcatgtcagtgaaacttctctccctgaggcctgacagttatcaagtgaaatgagctgctgtggtttaccccaactctagcactccctcctgtctccagtactctccacagcaataacctcttttgtgagactgggcatatgctgaagcaactggaagtgagttgtctcaagtttacttggctttaactcccaagaccccagcaaatgtccttctttcctccttttgtgtcctttcaccatccctcttcctttgaaaaaatgattatcagaactgtcatc

SEQ ID NO: 598872 - DNA, 622 bp, Homo sapiens
gatccactcatgcaaggtggtccataaaacacatcaaataaaccatgtcgaataagcttctgatatcaaaatatttatcaaaaaagaaaacattgaatgaccacagacttgctggatattaatacatatttatatttcaaaatcagtgcagtatttattgaaaatgataattttggttttcatggaatgaattttatgattacttctaaaattaactaagtttggtatattatcttacactgtaaaggacttttataaaacagctatcatatcaaagaactggctgtctcaaaaaaatttcgccaaagcatctatatgcaagttaatcatatcttattcactcatgtcagtgaaacttctctccctgaggcctgacagttatcaagtgaaatgagctgctgtggtttaccccaactctagcactccctcctgtctccagtactctccacagcaataacctcttttgtgagactgggcatatgctgaagcaactggaagtgagttgtctcaagtttacttggctttaactcccaagaccccagcaaatgtcyttctttcctccttttgtgtcctttcaccatccctcttcctttgaaaaaatgattatcagaactgtcatcct

SEQ ID NO: 598873 - DNA, 356 bp, Homo sapiens
tcatatcaaagaactggctgtctcaaaaaaatttcgccaaagcatctatatgcaagttaatcatatcttattcactcatgtcagtgaaacttctctccctgaggcctgacagttatcaagtgaaatgagctgctgtggtttaccccaactctagcactccctcctgtctccagtactctccacagcaataacctcttttgtgagactgggcatatgctgaagcaactggaagtgagttgtctcaagtttacttggctttaactcccaagaccccagcaaatgtccttctttcctccttttgtgtcctttcaccatccctcttcctttgaaaaartgattatcagaactgtcatcct

SEQ ID NO: 598874 - DNA, 497 bp, Homo sapiens
caactggaagtgagttgtctcaagtttacttggctttaactcccaagaccccagcaaatgtccttctttcctccttttgtgtcctttcaccatccctcttcctttgaaaaaatgattatcagaactgtcatcctgatgcttcccttcctaactgctttttatggatgattgtgaccacttttttcatctgtattcagcagtagtatacacctgtaatctctcttttttcatctcattttccttcccctgtggctagaatcatgctcagaaataaaaggaaattaaagctttccctggattctgttattttttaaattgctctccagtggttctttttccagatttctctaaaggaargctattcccttgctattcagagctgtgtccaaggaccagcacaaacatcacctgagtgctcatgagaaatgcagactccaatacctgctgagtcagaatgtgcactttccagaagctcctcaacgaattcatgacaattt

SEQ ID NO: 598875 - DNA, 556 bp, Homo sapiens
gtggttctttttccagatttctctaaaggaaagctattcccttgctattcagagctgtgtccaaggaccagcacaaacatcacctgagtgctcatgaraaatgcagactccaatacctgctgagtcagaatgtgcactttccagaagctcctcaacgaattcatgacaatttgaatgccctgttccacactggtgtgcttccatattggtttaccctaactggcctttttggcctagcctcaacttctttcctattatgtccctgaatttaatactacgttataaaccataatgtttctaatgaacttttaatcaggcaaagcttctctaattaatttcttcccaataaatcacccaacactattcttttcattttctataaaaacaaattatagccatacatggctgaccatttacggtgatgttcatctatggtagataaaacacaggtctgcatggtaaagtacctcaatccttaatgcctccccagtagcgagaatgacagcaagagaaggaaaatgttactgtaattatatgacacattttggtactggaa

SEQ ID NO: 598876 - DNA, 564 bp, Homo sapiens
tgttattttttaaattgctctccagtggttctttttccagatttctctaaaggaaagctattcccttgctattcagagctgtgtccaaggaccagcacaaacatcacctgagtgctcatgagaaatgcagactccaatacctgctgagtcagaatgtgcactttccagaagctcctcaacgaattcatgacaatttgaatgccctgttcyacactggtgtgcttccatattggtttaccctaactggcctttttggcctagcctcaacttctttcctattatgtccctgaatttaatactacgttataaaccataatgtttctaatgaacttttaatcaggcaaagcttctctaattaatttcttcccaataaatcacccaacactattcttttcattttctataaaaacaaattatagccatacatggctgaccatttacggtgatgttcatctatggtagataaaacacaggtctgcatggtaaagtacctcaatccttaatgcctccccagtagcgagaatgacagcaagagaaggaaaatgttactgtaattatatgaca

SEQ ID NO: 598877 - DNA, 564 bp, Homo sapiens
tgttattttttaaattgctctccagtggttctttttccagatttctctaaaggaaagctattcccttgctattcagagctgtgtccaaggaccagcacaaacatcacctgagtgctcatgagaaatgcagactccaatacctgctgagtcagaatgtgcactttccagaagctcctcaacgaattcatgacaatttgaatgccctgttccacactggtgtgcttccatattggtttaccctaaytggcctttttggcctagcctcaacttctttcctattatgtccctgaatttaatactacgttataaaccataatgtttctaatgaacttttaatcaggcaaagcttctctaattaatttcttcccaataaatcacccaacactattcttttcattttctataaaaacaaattatagccatacatggctgaccatttacggtgatgttcatctatggtagataaaacacaggtctgcatggtaaagtacctcaatccttaatgcctccccagtagcgagaatgacagcaagagaaggaaaatgttactgtaattatatgaca

SEQ ID NO: 598878 - DNA, 556 bp, Homo sapiens
gtggttctttttccagatttctctaaaggaaagctattcccttgctattcagagctgtgtccaaggaccagcacaaacatcacctgagtgctcatgagaaatgcagactccaatacctgctgagtcagaatgtgcactttccagaagctcctcaacgaattcatgacaatttgaatgccctgttccacactggtgtgcttccatattggtttaccctaactggcctttttggcctagcctcaacttctttcytattatgtccctgaatttaatactacgttataaaccataatgtttctaatgaacttttaatcaggcaaagcttctctaattaatttcttcccaataaatcacccaacactattcttttcattttctataaaaacaaattatagccatacatggctgaccatttacggtgatgttcatctatggtagataaaacacaggtctgcatggtaaagtacctcaatccttaatgcctccccagtagcgagaatgacagcaagagaaggaaaatgttactgtaattatatgacacattttggtactggaa

SEQ ID NO: 598879 - DNA, 564 bp, Homo sapiens
tgttattttttaaattgctctccagtggttctttttccagatttctctaaaggaaagctattcccttgctattcagagctgtgtccaaggaccagcacaaacatcacctgagtgctcatgagaaatgcagactccaatacctgctgagtcagaatgtgcactttccagaagctcctcaacgaattcatgacaatttgaatgccctgttccacactggtgtgcttccatattggtttaccctaactggcctttttggcctagcctcaacttctttcctattatgtccctgaatttaatactacgttataarccataatgtttctaatgaacttttaatcaggcaaagcttctctaattaatttcttcccaataaatcacccaacactattcttttcattttctataaaaacaaattatagccatacatggctgaccatttacggtgatgttcatctatggtagataaaacacaggtctgcatggtaaagtacctcaatccttaatgcctccccagtagcgagaatgacagcaagagaaggaaaatgttactgtaattatatgaca

SEQ ID NO: 598880 - DNA, 556 bp, Homo sapiens
gtggttctttttccagatttctctaaaggaaagctattcccttgctattcagagctgtgtccaaggaccagcacaaacatcacctgagtgctcatgagaaatgcagactccaatacctgctgagtcagaatgtgcactttccagaagctcctcaacgaattcatgacaatttgaatgccctgttccacactggtgtgcttccatattggtttaccctaactggcctttttggcctagcctcaacttctttcctattatgtccctgaatttaatactacgttataaaccataatgtttctaatgaacttttaatcaggcaaagcttctctaattaatttcttcccaataaatcacccaacactattcttttcattttctataaaaacaaattatagccatacatggctgaccatttacrgtgatgttcatctatggtagataaaacacaggtctgcatggtaaagtacctcaatccttaatgcctccccagtagcgagaatgacagcaagagaaggaaaatgttactgtaattatatgacacattttggtactggaa

SEQ ID NO: 598881 - DNA, 564 bp, Homo sapiens
tgttattttttaaattgctctccagtggttctttttccagatttctctaaaggaaagctattcccttgctattcagagctgtgtccaaggaccagcacaaacatcacctgagtgctcatgagaaatgcagactccaatacctgctgagtcagaatgtgcactttccagaagctcctcaacgaattcatgacaatttgaatgccctgttccacactggtgtgcttccatattggtttaccctaactggcctttttggcctagcctcaacttctttcctattatgtccctgaatttaatactacgttataaaccataatgtttctaatgaacttttaatcaggcaaagcttctctaattaatttcttcccaataaatcacccaacactattcttttcattttctataaaaacaaattatagccatacatggctgaccatttacggtgatgttcatctatggtagataaaacacaggtctgcatggtaaagtacctcaatccttaatgcctccccagtagcragaatgacagcaagagaaggaaaatgttactgtaattatatgaca

SEQ ID NO: 598882 - DNA, 560 bp, Homo sapiens
catacatggctgaccatttacggtgatgttcatctatggtagataaaacacaggtctgcatggtaaagtacctcaatccttaatgcctccccagtagcgagaatgacagcaagagaaggaaaatgttactgtaattatatgacacattttggtactggaagctcactttatcttccttcctatttctaacaccctgttcttccttcttctacagatcaatttgactttactaccctccattacatacatccactcttttttatttattccatgtacactctkccctcctcattctttctttctcttttattcatttcctcttccctctctcctgacttgcctcaggtcttagagtatgttaaaatggaactcataactcagctcctttagtggtacttccaatagaatcaactgctgacccttggttagagacaccacttatcaccatttcatttctcttttacttatgatacagttaataggacattttctttagctattaaactctattagtgctcatattttaaaagaaacattccatcaatgcctttttttttttt

SEQ ID NO: 598883 - DNA, 533 bp, Homo sapiens
catccactcttttttatttattccatgtacactcttccctcctcattctttctttctcttttattcatttcctcttccctctctcctgacttgcctcaggtcttagagtatgttaaaatggarctcataactcagctcctttagtggtacttccaatagaatcaactgctgacccttggttagagacaccacttatcaccatttcatttctcttttacttatgatacagttaataggacattttctttagctattaaactctattagtgctcatattttaaaagaaacattccatcaatgccttttttttttttgagatggagtctcactctgtcacccaggctggagtgcagtggcacgatctccgctcactgcaagctccacctcccaggtgcacaccatcctcctgcctcagcctcccgagttgctgggactacaggcacccgccaccatgcccggctaattttttgtgtttttagtagagatggggtttcaccatgttagccaggatggtcttgatctcctgacctcat

SEQ ID NO: 598884 - DNA, 533 bp, Homo sapiens
catccactcttttttatttattccatgtacactcttccctcctcattctttctttctcttttattcatttcctcttccctctctcctgacttgcctcaggtcttagagtatgttaaaatggaactcataactcagctcctttagtggtacttccaatagaatcaactgctgacccttggttagagacaccacttatcaccatttcatttctcttttacttatgatacagttaataggacattttctttagctattaaactctattagtgctcatattttaaaagmaacattccatcaatgccttttttttttttgagatggagtctcactctgtcacccaggctggagtgcagtggcacgatctccgctcactgcaagctccacctcccaggtgcacaccatcctcctgcctcagcctcccgagttgctgggactacaggcacccgccaccatgcccggctaattttttgtgtttttagtagagatggggtttcaccatgttagccaggatggtcttgatctcctgacctcat

SEQ ID NO: 598885 - DNA, 547 bp, Homo sapiens
gtggtacttccaatagaatcaactgctgacccttggttagagacaccacttatcaccatttcatttctcttttacttatgatacagttaataggacattttctttagctattaaactctattagtgctcatattttaaaagaaacattccatcaatgccttttttttttttgagatggagtctcactctgtcacccaggctggagtgcagtggcacgatctccgctcactgcaagctccacctccyaggtgcacaccatcctcctgcctcagcctcccgagttgctgggactacaggcacccgccaccatgcccggctaattttttgtgtttttagtagagatggggtttcaccatgttagccaggatggtcttgatctcctgacctcattacccgcccaccttgggctcccaaagtgctggaattacaggcgtgagccaccgcgcctggtctccatcaaatgactttttaaataaaatacggttctcaccttttccttttccattgactattctgtttcctttttcatgagaaggtccacgtaaag

SEQ ID NO: 598886 - DNA, 416 bp, Homo sapiens
ccatttaaaattataatgagttgcatcaagagtttcttatcaatctctttttatgaaactgggtctcactctgtcaacccagggctagaatgcaggggcctgattatggctcactgtggtctcaaactcctgacctcaagcaatcttcccacctcaacttcctgratagctggaactacaggtgcataccatcatgtcatgctaatgtttttattgttatctttgtagagacaaggcctcattatacctcccaggctggtctcaagctcctgggctcaagcaaatcttccacttctgcctcccaaagtgttgagataagcagtgtgcaccaccacacccagccctaatcaatttctttaaatcaatctcaatgttgcccaggcatggtggctcacacctgtaatctcagccctttg

SEQ ID NO: 598887 - DNA, 617 bp, Homo sapiens
gtttcttatcaatctctttttatgaaactgggtctcactctgtcaacccagggctagaatgcaggggcctgattatggctcactgtggtctcaaactcctgacctcaagcaatcttcccacctcaacttcctggatagctggaactacaggtgcataycatcatgtcatgctaatgtttttattgttatctttgtagagacaaggcctcattatacctcccaggctggtctcaagctcctgggctcaagcaaatcttccacttctgcctcccaaagtgttgagataagcagtgtgcaccaccacacccagccctaatcaatttctttaaatcaatctcaatgttgcccaggcatggtggctcacacctgtaatctcagccctttgcaaggccaaggtgggtggattgcttgagttcaggagttggagaccagcctgggcaacataatgagaacacatctctacacaaaaaaataccaaaaggagtcaggcatgatggtgtgtgcctgtagtcccagctgcttgggaagctgatgtgggaggatcacttgagcctgagaggtggatacagcagtgagccaagatcatgccactacactgcagcatgtacaacagagca

SEQ ID NO: 598888 - DNA, 617 bp, Homo sapiens
gtttcttatcaatctctttttatgaaactgggtctcactctgtcaacccagggctagaatgcaggggcctgattatggctcactgtggtctcaaactcctgacctcaagcaatcttcccacctcaacttcctggatagctggaactacaggtgcataccatcatgtcatgctaatgtttttattgttatctttgtagagacaaggcctcattwtacctcccaggctggtctcaagctcctgggctcaagcaaatcttccacttctgcctcccaaagtgttgagataagcagtgtgcaccaccacacccagccctaatcaatttctttaaatcaatctcaatgttgcccaggcatggtggctcacacctgtaatctcagccctttgcaaggccaaggtgggtggattgcttgagttcaggagttggagaccagcctgggcaacataatgagaacacatctctacacaaaaaaataccaaaaggagtcaggcatgatggtgtgtgcctgtagtcccagctgcttgggaagctgatgtgggaggatcacttgagcctgagaggtggatacagcagtgagccaagatcatgccactacactgcagcatgtacaacagagca

SEQ ID NO: 598889 - DNA, 416 bp, Homo sapiens
ccatttaaaattataatgagttgcatcaagagtttcttatcaatctctttttatgaaactgggtctcactctgtcaacccagggctagaatgcaggggcctgattatggctcactgtggtctcaaactcctgacctcaagcaatcttcccacctcaacttcctggatagctggaactacaggtgcataccatcatgtcatgctaatgtttttattgttatctttgtagagacaaggcctcattatacctcccaggctggtctcaagctcctgggctcaagcaaatcttccacttctgcctcccaaartgttgagataagcagtgtgcaccaccacacccagccctaatcaatttctttaaatcaatctcaatgttgcccaggcatggtggctcacacctgtaatctcagccctttg

SEQ ID NO: 598890 - DNA, 617 bp, Homo sapiens
gtttcttatcaatctctttttatgaaactgggtctcactctgtcaacccagggctagaatgcaggggcctgattatggctcactgtggtctcaaactcctgacctcaagcaatcttcccacctcaacttcctggatagctggaactacaggtgcataccatcatgtcatgctaatgtttttattgttatctttgtagagacaaggcctcattatacctcccaggctggtctcaagctcctgggctcaagcaaatcttccacttctgcctcccaaagtgttgagataagcagtgtgcaccaccacacccagccctaatcaatttctttaaatcaatctcaatgttgcccaggcatggtggctcacacctgtaatctcagccctttgcaaggccaaggtgggtggattgyttgagttcaggagttggagaccagcctgggcaacataatgagaacacatctctacacaaaaaaataccaaaaggagtcaggcatgatggtgtgtgcctgtagtcccagctgcttgggaagctgatgtgggaggatcacttgagcctgagaggtggatacagcagtgagccaagatcatgccactacactgcagcatgtacaacagagca

SEQ ID NO: 598891 - DNA, 617 bp, Homo sapiens
gtttcttatcaatctctttttatgaaactgggtctcactctgtcaacccagggctagaatgcaggggcctgattatggctcactgtggtctcaaactcctgacctcaagcaatcttcccacctcaacttcctggatagctggaactacaggtgcataccatcatgtcatgctaatgtttttattgttatctttgtagagacaaggcctcattatacctcccaggctggtctcaagctcctgggctcaagcaaatcttccacttctgcctcccaaagtgttgagataagcagtgtgcaccaccacacccagccctaatcaatttctttaaatcaatctcaatgttgcccaggcatggtggctcacacctgtaatctcagccctttgcaaggccaaggtgggtggattgcttgagttcaggagttggagaccagcctgrgcaacataatgagaacacatctctacacaaaaaaataccaaaaggagtcaggcatgatggtgtgtgcctgtagtcccagctgcttgggaagctgatgtgggaggatcacttgagcctgagaggtggatacagcagtgagccaagatcatgccactacactgcagcatgtacaacagagca

SEQ ID NO: 598892 - DNA, 655 bp, Homo sapiens
gctggaactacaggtgcataccatcatgtcatgctaatgtttttattgttatctttgtagagacaaggcctcattatacctcccaggctggtctcaagctcctgggctcaagcaaatcttccacttctgcctcccaaagtgttgagataagcagtgtgcaccaccacacccagccctaatcaatttctttaaatcaatctcaatgttgcccaggcatggtggctcacacctgtaatctcagccctttgcaaggccaaggtgggtggattgcttgagttcaggagttggagaccagcctgggcaacataatgagaacacatctctacacaaaaaaataccaaaaggagtcaggcatgatggtgtgtgcctgtagtcccagctgcttgggaagctgatgtgggaggatcacttgagcctgagaggtggatacagcagtgagccaagatcatgccactacactgcagcatgkacaacagagcaagaccctgcctccccaaaaatttcaatttaaaatgtgagaacaaagagagatacaaagaaaaaacaagcctaattagtcaatgaaatatgagcttaagccaagaaagaaaacgaaaagcatgaagtataataaagtacatggggaaatagatctataacagagccttcggtcttt

SEQ ID NO: 598893 - DNA, 369 bp, Homo sapiens
tcaatttaaaatgtgagaacaaagagagatacaaasaaaaaacaagcctaattagtcaatgaaatatgagcttaagccaagaaagaaaacgaaaagcatgaagtataataaagtacatggggaaatagatctataacagagccttcggtctttcataactctgataatactaattaatatttatgctgcaattagttttttgtaagtacttctgtgatagtgtttcttactataagacattcaattagctaaatatggtcatctaccattacctgaaagaacattattataacagagagagaaaactggaactttccatcaactttccacccagaaaaagaattggtcaccagaattctaaagagtaat

SEQ ID NO: 598894 - DNA, 655 bp, Homo sapiens
gctggaactacaggtgcataccatcatgtcatgctaatgtttttattgttatctttgtagagacaaggcctcattatacctcccaggctggtctcaagctcctgggctcaagcaaatcttccacttctgcctcccaaagtgttgagataagcagtgtgcaccaccacacccagccctaatcaatttctttaaatcaatctcaatgttgcccaggcatggtggctcacacctgtaatctcagccctttgcaaggccaaggtgggtggattgcttgagttcaggagttggagaccagcctgggcaacataatgagaacacatctctacacaaaaaaataccaaaaggagtcaggcatgatggtgtgtgcctgtagtcccagctgcttgggaagctgatgtgggaggatcacttgagcctgagaggtggatacagcagtgagccaagatcatgccactacactgcagcatgtacaacagagcaagaccctgcctccccaaaaatttcaatttaaaatgtgagaacaaagagagatacaaagaaaaaacaagcctaattagtcaatgaaatatgagcttaagccaagaaagaaaacgaaaarcatgaagtataataaagtacatggggaaatagatctataacagagccttcggtcttt

SEQ ID NO: 598895 - DNA, 376 bp, Homo sapiens
ggatcatgaggtcaggagatcgtgaccatcctggctaacacggtgaaatccatctttactaaaaatacaaaaattagcctggcatggtggtgggtgcctgtagtcccagctactcgggaggctgaggcaggagaatggcatgaaccygggaggcggaagttgcagtgagccgagattgcaccacagtactccagcctgggtgacggagcaagactccatctcagaaaaaaaaaaaaatacaagaattttagaaatcctacacaattttagaatggattgatgacacacactaaatataacctgaggaaggttccacattattttttattttgacagtgctacccatgtgacttaacatgttaaatagtcctgttta

SEQ ID NO: 598896 - DNA, 376 bp, Homo sapiens
ggatcatgaggtcaggagatcgtgaccatcctggctaacacggtgaaatccatctttactaaaaatacaaaaattagcctggcatggtggtgggtgcctgtagtcccagctactcgggaggctgaggcaggagaatggcatgaacctgggaggcggaagttgcagtgagccgagattgcrccacagtactccagcctgggtgacggagcaagactccatctcagaaaaaaaaaaaaatacaagaattttagaaatcctacacaattttagaatggattgatgacacacactaaatataacctgaggaaggttccacattattttttattttgacagtgctacccatgtgacttaacatgttaaatagtcctgttta

SEQ ID NO: 598897 - DNA, 376 bp, Homo sapiens
ggatcatgaggtcaggagatcgtgaccatcctggctaacacggtgaaatccatctttactaaaaatacaaaaattagcctggcatggtggtgggtgcctgtagtcccagctactcgggaggctgaggcaggagaatggcatgaacctgggaggcggaagttgcagtgagccgagattgcaccacwgtactccagcctgggtgacggagcaagactccatctcagaaaaaaaaaaaaatacaagaattttagaaatcctacacaattttagaatggattgatgacacacactaaatataacctgaggaaggttccacattattttttattttgacagtgctacccatgtgacttaacatgttaaatagtcctgttta

SEQ ID NO: 598898 - DNA, 376 bp, Homo sapiens
ggatcatgaggtcaggagatcgtgaccatcctggctaacacggtgaaatccatctttactaaaaatacaaaaattagcctggcatggtggtgggtgcctgtagtcccagctactcgggaggctgaggcaggagaatggcatgaacctgggaggcggaagttgcagtgagccgagattgcaccacagtactccagcctgggtgacrgagcaagactccatctcagaaaaaaaaaaaaatacaagaattttagaaatcctacacaattttagaatggattgatgacacacactaaatataacctgaggaaggttccacattattttttattttgacagtgctacccatgtgacttaacatgttaaatagtcctgttta

SEQ ID NO: 598899 - DNA, 645 bp, Homo sapiens
gcaaatctattattcttttcttttttgagatggattttccctcttgttgcccaggctggagtgcaatggtgcgatctcggtttactgcaaccccctgcctcccaggttcaagtgattctccsgccccagcctcctgagtagctgggattagaggcatgccccaccatgcccagctaattttgtgtttttagtagagacggggtttttccttgttggtcaggctggccttgaactcctgacctcatgtgatccacctgcctcggcctccccaagtgttgggattacagctgtgagccactgccccgggccatttttttttaaagatagcgtcttgctctgtcaccctcctcaccacattatagctctgggggccaagctgcatcacaatggaaatcatggagccacaggaagaatccacttagctttgcaagatgctgcccaaggggttgcttggagtaaccaaattaacatttttcattctgctcagagcaaaatatatgtgacaaaacatagacacgagccactttgcttagcacccagtgtcaaactggtaagactcaaacttgctcccagataggccgtgccatctctaaatctttttagaagcttctgcatgttaataggcatccctagatgagactaatt

SEQ ID NO: 598900 - DNA, 645 bp, Homo sapiens
gcaaatctattattcttttcttttttgagatggattttccctcttgttgcccaggctggagtgcaatggtgcgatctcggtttactgcaaccccctgcctcccaggttcaagtgattctcccgccccagcctcctgagtagctgggattagaggcatgccccaccatgcccagctaattttgtgtttttagtagagacggggtttttccttgttggtcaggctggccttgaactcctgacctcatgtgatccacctgcctcggcctccccaagtgttgrgattacagctgtgagccactgccccgggccatttttttttaaagatagcgtcttgctctgtcaccctcctcaccacattatagctctgggggccaagctgcatcacaatggaaatcatggagccacaggaagaatccacttagctttgcaagatgctgcccaaggggttgcttggagtaaccaaattaacatttttcattctgctcagagcaaaatatatgtgacaaaacatagacacgagccactttgcttagcacccagtgtcaaactggtaagactcaaacttgctcccagataggccgtgccatctctaaatctttttagaagcttctgcatgttaataggcatccctagatgagactaatt

SEQ ID NO: 598901 - DNA, 564 bp, Homo sapiens
ttcctattcggccatcttggctcctcctcccattattttttaatattttctgaaaatcttctttaaagagagaaagccaaatgtcacccactttttcataaaaccttacaggcaaatctattattcttttcttttttgagatggattttccctcttgttgcccaggctggagtgcaatggtgcgatctcggtttactgcaaccccctgcctcccaggttcaagtgattctcccgccccagcctcctgagtagctgggattagaggcatgccccaccatgcccagctaattttgtgtttttagtagagacggggtttttccttgttggtcaggctggccttgaactcctgacctcatgtgatccacctgcctcggcctccccaagtgttgggattacagctgtgagccactgcccygggccatttttttttaaagatagcgtcttgctctgtcaccctcctcaccacattatagctctgggggccaagctgcatcacaatggaaatcatggagccacaggaagaatccacttagctttgcaagatgctgcccaaggggttgcttg

SEQ ID NO: 598902 - DNA, 578 bp, Homo sapiens
gcatcacaatggaaatcatggagccacaggaagaatccacttagctttgcaagatgctgcccaaggggttgcttggagtaaccaaattaacatttttcattctgctcagagcaaaatatatgtgacaaaacatagacacgagccactttgcttagcacccagtgtcaaactggtaagactcaaacttgctcccagataggccrtgccatctctaaatctttttagaagcttctgcatgttaataggcatccctagatgagactaatttgggagccatcatttttaaatgcacttcagggcattattcatttggaatgttacactataagttatctttagtaagattttgccatttctgtaagactttgctgcttcccaggcctaatgaattagccagaaagaacttagttttccagaaattaaggatcctatttttacctaatatattggctttactctcaggttcccttgattgacttagccaatgattttttttcctacctaagcgtgtgaggaaaatgaaacaaaggggcagaacacaaaaatccccatgaatttccaaaagccaaattttacaa

SEQ ID NO: 598903 - DNA, 578 bp, Homo sapiens
gcatcacaatggaaatcatggagccacaggaagaatccacttagctttgcaagatgctgcccaaggggttgcttggagtaaccaaattaacatttttcattctgctcagagcaaaatatatgtgacaaaacatagacacgagccactttgcttagcacccagtgtcaaactggtaagactcaaacttgctcccagataggccgtgccatctctaaatctttttagaagcttctgcatgttaataggcatccctagatgagactaatttgggagccatcatttttaaatgcacttcagggcattattcatttggaatgttacactataagttatctttagtaagattttgccatttctstaagactttgctgcttcccaggcctaatgaattagccagaaagaacttagttttccagaaattaaggatcctatttttacctaatatattggctttactctcaggttcccttgattgacttagccaatgattttttttcctacctaagcgtgtgaggaaaatgaaacaaaggggcagaacacaaaaatccccatgaatttccaaaagccaaattttacaa

SEQ ID NO: 598904 - DNA, 570 bp, Homo sapiens
tactaccactttccttctgacccattcagatgtaggaggcctctaactggaactggattcaagccagttaattactggatcaaatctgatcctggacccgggtccgtttctgtcataacttctaacacatccagcyagtcatggctggatagcagtttgggacagaaatttgctcagagaaactcagctcaaaacacaaattcatggagctctgaaatccgagagagaatttaccacgatccccagatgctctgagaggtcaaagggcacaagtgttacagaatcctgaggcgtcacttttctgcctgaaacctctggctggtggcgcctttacctgtgttttgctcgggcccactgggttcgttctgtccactcggctcatgctagtggtctggtatcccacacctgccaagggtgagctgggtacagagcagtgaagggtgtgtgagcaagcgagcatgggatctggccactgcacagagccaagcatgccagctgcagtggggtgggcagctccaggcaccgccacaggtgccagctccctgtgaggctgcagctggaccaggctga

SEQ ID NO: 598905 - DNA, 570 bp, Homo sapiens
tactaccactttccttctgacccattcagatgtaggaggcctctaactggaactggattcaagccagttaattactggatcaaatctgatcctggacccgggtccgtttctgtcataacttctaacacatccagccagtcatggctggatagcagtttgggacagaaatttgctcagagaaactcagctcaaaacacaaattcatggagctctgaaatccgagagagaatttaccacgatccccagatgctctgagaggtcaaagggcacaagtgttacagaatcctgaggcgtcacttttctgcctgaaacctctggctggtggcgcctttacctgtgttttgctcgggcccactgggttcgttctgtccactyggctcatgctagtggtctggtatcccacacctgccaagggtgagctgggtacagagcagtgaagggtgtgtgagcaagcgagcatgggatctggccactgcacagagccaagcatgccagctgcagtggggtgggcagctccaggcaccgccacaggtgccagctccctgtgaggctgcagctggaccaggctga

SEQ ID NO: 598906 - DNA, 570 bp, Homo sapiens
tactaccactttccttctgacccattcagatgtaggaggcctctaactggaactggattcaagccagttaattactggatcaaatctgatcctggacccgggtccgtttctgtcataacttctaacacatccagccagtcatggctggatagcagtttgggacagaaatttgctcagagaaactcagctcaaaacacaaattcatggagctctgaaatccgagagagaatttaccacgatccccagatgctctgagaggtcaaagggcacaagtgttacagaatcctgaggcgtcacttttctgcctgaaacctctggctggtggcgcctttacctgtgttttgctcgggcccactgggttcgttctgtccactcggctcatgctagtggtctggtatcccacacctgccaagggtgagctgggtacagagcagtgaagggtgtgtgagcaagcgagcatgggatctggccactgcacasagccaagcatgccagctgcagtggggtgggcagctccaggcaccgccacaggtgccagctccctgtgaggctgcagctggaccaggctga

SEQ ID NO: 598907 - DNA, 608 bp, Homo sapiens
agcagtttgggacagaaatttgctcagagaaactcagctcaaaacacaaattcatggagctctgaaatccgagagagaatttaccacgatccccagatgctctgagaggtcaaagggcacaagtgttacagaatcctgaggcgtcacttttctgcctgaaacctctggctggtggcgcctttacctgtgttttgctcgggcccactgggttcgttctgtccactcggctcatgctagtggtctggtatcccacacctgccaagggtgagctgggtacagagcagtgaagggtgtgtgagcaagcgagcatgggatctggccactgcacagagccaagcatgccagctgcagtggggtgggcagctccaggcaccgccacaggtgccagctccctgtgaggctgcagctggaccaggctgactgcaaacagcttccactgtrggtatcagggaatgcagcggtgcctggaagcttcaagatgcaggaactgcagagccccaaataaggtgtcacagccctggcttggggagctcctaggtctgggctccctgaagggccacagctcttctctccttctctcttctcttcttcttgcctgcaatttggca

SEQ ID NO: 598908 - DNA, 608 bp, Homo sapiens
agcagtttgggacagaaatttgctcagagaaactcagctcaaaacacaaattcatggagctctgaaatccgagagagaatttaccacgatccccagatgctctgagaggtcaaagggcacaagtgttacagaatcctgaggcgtcacttttctgcctgaaacctctggctggtggcgcctttacctgtgttttgctcgggcccactgggttcgttctgtccactcggctcatgctagtggtctggtatcccacacctgccaagggtgagctgggtacagagcagtgaagggtgtgtgagcaagcgagcatgggatctggccactgcacagagccaagcatgccagctgcagtggggtgggcagctccaggcaccgccacaggtgccagctccctgtgaggctgcagctggaccaggctgactgcaaacagcttccactgtaggtatcagggaatgcagcggtgcctggaagcttcragatgcaggaactgcagagccccaaataaggtgtcacagccctggcttggggagctcctaggtctgggctccctgaagggccacagctcttctctccttctctcttctcttcttcttgcctgcaatttggca

SEQ ID NO: 598909 - DNA, 534 bp, Homo sapiens
gagccccaaataaggtgtcacagccctggcttggggagctcctaggtctgggctccctgaagggccacagctcttctctccttctctcttctcttcttcttgcctgcaatttggcaagcaaggggtgcgtttcagccctgtttatgttacacctctttcagccctgctagttggcaggtcccgagttcttgtcctgagtccaggaagaatgaggtatgtgggcaagtagaaggtgagcaaggtgaagaggtgctttattgagcaacagtacagctcagaggagacgtgcagtgggtagctcctttcggcaggcaggtcatcccaatgtctgttcagctctcagcagctgagagagatgcatggtkgttagctatgcccacagtgcccaggcttttcgagctgaggagtggcttcaagccagtgctgagccactcttagccccacctcaacgtccctcctgtgctcatcagttcccaaagtgtggagggggccgaggtggcagggggctggcatgtcagcactgccctgagcttg

SEQ ID NO: 598910 - DNA, 571 bp, Homo sapiens
cagccctgtttatgttacacctctttcagccctgctagttggcaggtcccgagttcttgtcctgagtccaggaagaatgaggtatgtgggcaagtagaaggtgagcaaggtgaagaggtgctttattgagcaacagtacagctcagaggagacgtgcagtgggtagctcctttcggcaggcaggtcatcccaatgtctgttcagctctcagcagctgagagagatgcatggttgttagctatgcccacagtgcccaggyttttcgagctgaggagtggcttcaagccagtgctgagccactcttagccccacctcaacgtccctcctgtgctcatcagttcccaaagtgtggagggggccgaggtggcagggggctggcatgtcagcactgccctgagcttgcacaaactgggctgggttgcgactgtgcctgggttcaacctcaatttggatccgaagttggagtgggctctgggagcggagacatgccaggtggtgagagcaggtatgactgggcctgcgggggcaggggggcttgctgggcctctgagagtgcaaagatgcccgggtt

SEQ ID NO: 598911 - DNA, 578 bp, Homo sapiens
ctctcttctcttcttcttgcctgcaatttggcaagcaaggggtgcgtttcagccctgtttatgttacacctctttcagccctgctagttggcaggtcccgagttcttgtcctgagtccaggaagaatgaggtatgtgggcaagtagaaggtgagcaaggtgaagaggtgctttattgagcaacagtacagctcagaggagacgtgcagtgggtagctcctttcggcaggcaggtcatcccaatgtctgttcagctctcagcagctgagagagatgcatggttgttagctatgcccacagtgcccaggcttttcgagctgaggagtgscttcaagccagtgctgagccactcttagccccacctcaacgtccctcctgtgctcatcagttcccaaagtgtggagggggccgaggtggcagggggctggcatgtcagcactgccctgagcttgcacaaactgggctgggttgcgactgtgcctgggttcaacctcaatttggatccgaagttggagtgggctctgggagcggagacatgccaggtggtgagagcaggtatgactgggcctgcgggggcag

SEQ ID NO: 598912 - DNA, 578 bp, Homo sapiens
ctctcttctcttcttcttgcctgcaatttggcaagcaaggggtgcgtttcagccctgtttatgttacacctctttcagccctgctagttggcaggtcccgagttcttgtcctgagtccaggaagaatgaggtatgtgggcaagtagaaggtgagcaaggtgaagaggtgctttattgagcaacagtacagctcagaggagacgtgcagtgggtagctcctttcggcaggcaggtcatcccaatgtctgttcagctctcagcagctgagagagatgcatggttgttagctatgcccacagtgcccaggcttttcgagctgaggagtggcttcaagccagtgctgagccactcttagccccacctcaacgtccctcctgtgctcatcagttcccaaagtgtggagggggccgaggtggcagggggctggcatgtcagcactgccctgagcttgcacaaactgggctgggttgcractgtgcctgggttcaacctcaatttggatccgaagttggagtgggctctgggagcggagacatgccaggtggtgagagcaggtatgactgggcctgcgggggcag

SEQ ID NO: 598913 - DNA, 578 bp, Homo sapiens
ctctcttctcttcttcttgcctgcaatttggcaagcaaggggtgcgtttcagccctgtttatgttacacctctttcagccctgctagttggcaggtcccgagttcttgtcctgagtccaggaagaatgaggtatgtgggcaagtagaaggtgagcaaggtgaagaggtgctttattgagcaacagtacagctcagaggagacgtgcagtgggtagctcctttcggcaggcaggtcatcccaatgtctgttcagctctcagcagctgagagagatgcatggttgttagctatgcccacagtgcccaggcttttcgagctgaggagtggcttcaagccagtgctgagccactcttagccccacctcaacgtccctcctgtgctcatcagttcccaaagtgtggagggggccgaggtggcagggggctggcatgtcagcactgccctgagcttgcacaaactgggctgggttgcgactgtgcctgggttcaacctcaatttggatccgaagttggagtgggctctgggagcggagacatgccaggtggtgrgagcaggtatgactgggcctgcgggggcag

SEQ ID NO: 598914 - DNA, 545 bp, Homo sapiens
tggatggctgtagctgtgcctgggagggtggggctcctgcctgccaatttagaaggggtgggtctcycacctgttcctggctcccactaactttgaggagttcacagccccagccactcctccccactgcagccagtgtctccgtagcaactgctccacatgggccactgctgccatcatagagcggtccttgcaggtgcctttcttgtacctcagcactcctgggggtcattagaagccctagcaacactgctcaccacactatagctccggaggccctagcagtcctgctcccacagatcccacttctgacaccatctattaaaagaaaatcttcagctgaattaaatttaaaggaacttaattgagcaatgaatgattcacgaatcaggcagcccccagaatcacagcagattcggtgagactccagcacagctacatggtggaagatttatagacaataaagggaacgtgatgtacagaaatctgaagtgaggagtgaggtccagaagcaactgggtctgttacagttctcagcagtgagg

SEQ ID NO: 598915 - DNA, 545 bp, Homo sapiens
tggatggctgtagctgtgcctgggagggtggggctcctgcctgccaatttagaaggggtgggtctcccacctgttcctggctcccactaactttgaggagttcacagccccagccactcctccccactgcagccagtgtctccgtagcaactgctccacatgggccactgctgccatcatagagcggtccttgcaggtgcctttcttgtacctcagcactcctgggggtcattagaagccctagcaacactgctcaccacactatagctccrgaggccctagcagtcctgctcccacagatcccacttctgacaccatctattaaaagaaaatcttcagctgaattaaatttaaaggaacttaattgagcaatgaatgattcacgaatcaggcagcccccagaatcacagcagattcggtgagactccagcacagctacatggtggaagatttatagacaataaagggaacgtgatgtacagaaatctgaagtgaggagtgaggtccagaagcaactgggtctgttacagttctcagcagtgagg

SEQ ID NO: 598916 - DNA, 545 bp, Homo sapiens
tggatggctgtagctgtgcctgggagggtggggctcctgcctgccaatttagaaggggtgggtctcccacctgttcctggctcccactaactttgaggagttcacagccccagccactcctccccactgcagccagtgtctccgtagcaactgctccacatgggccactgctgccatcatagagcggtccttgcaggtgcctttcttgtacctcagcactcctgggggtcattagaagccctagcaacactgctcaccacactatagctccggaggccctagcagtcctgctcccacagatcccacttctgacaccatctattaaaagaaaatcttcagctgaattaaatttaaaggaacttaattgagcaatgaatgattcacgaatcaggcagcccccagaatcacagcagattcrgtgagactccagcacagctacatggtggaagatttatagacaataaagggaacgtgatgtacagaaatctgaagtgaggagtgaggtccagaagcaactgggtctgttacagttctcagcagtgagg

SEQ ID NO: 598917 - DNA, 300 bp, Homo sapiens
ctgaagtgaggagtgaggtccagaagcaactgggtcygttacagttctcagcagtgaggtccagaaacaactggactggttacagtgctcagcatttgccttatttgaacacagctgaacactcagcagtgtgtgagtggcagaagtttggctgttgggattggccaggactcagctatagttacaggtgcatactccaaagttaggttatcagtctttctacctattaagttaggttgcagtttgtccacagggactcaaatctagaagtacagagtccttcccaggccatatttagtt

SEQ ID NO: 598918 - DNA, 537 bp, Homo sapiens
ctggttacagtgctcagcatttgccttatttgaacacagctgaacactcagcagtgtgtgagtggcagaagtttggctgttgggattggccaggactcagctatagttacaggtgcatactccaaagttaggttatcagtctttctacctattaagttaggttgcagtttgtccacagggactcaaatctagaagtacagagtccttcccaggccatatttagttcactgtaacagttcctattatkacctaactgacagttctttttctctgaattttcctttcttctcaacagcttgtccaaatgttccattggtccctgttcatcccgccctgcagctctccttgactgattctgccctttgtggtttgcagtcctgtttctctacagcttggaccccttcaatctttccatcataggtttaactctctgttgaattcttatttgtagctacgcaaatgttaccttaagctaaaaaaattcaaagtgaaagccacatcctcctctcttcccttatgtgtatgtattactaccat

SEQ ID NO: 598919 - DNA, 517 bp, Homo sapiens
ttgccttatttgaacacagctgaacactcagcagtgtgtgagtggcagaagtttggctgttgggattggccaggactcagctatagttacaggtgcatactccaaagttaggttatcagtctttctacctattaagttaggttgcagtttgtccacagggactcaaatctagaagtacagagtccttcccaggccatatttagttcactgtaacagttcctattatgacctaactgacagttctttttctctgaattttcctttcttctcaacagcttgtccaaatgttccattggtccctgttcatcycgccctgcagctctccttgactgattctgccctttgtggtttgcagtcctgtttctctacagcttggaccccttcaatctttccatcataggtttaactctctgttgaattcttatttgtagctacgcaaatgttaccttaagctaaaaaaattcaaagtgaaagccacatcctcctctcttcccttatgtgtatgtattactaccat

SEQ ID NO: 598920 - DNA, 517 bp, Homo sapiens
ttgccttatttgaacacagctgaacactcagcagtgtgtgagtggcagaagtttggctgttgggattggccaggactcagctatagttacaggtgcatactccaaagttaggttatcagtctttctacctattaagttaggttgcagtttgtccacagggactcaaatctagaagtacagagtccttcccaggccatatttagttcactgtaacagttcctattatgacctaactgacagttctttttctctgaattttcctttcttctcaacagcttgtccaaatgttccattggtccctgttcatccygccctgcagctctccttgactgattctgccctttgtggtttgcagtcctgtttctctacagcttggaccccttcaatctttccatcataggtttaactctctgttgaattcttatttgtagctacgcaaatgttaccttaagctaaaaaaattcaaagtgaaagccacatcctcctctcttcccttatgtgtatgtattactaccat

SEQ ID NO: 598921 - DNA, 537 bp, Homo sapiens
ctggttacagtgctcagcatttgccttatttgaacacagctgaacactcagcagtgtgtgagtggcagaagtttggctgttgggattggccaggactcagctatagttacaggtgcatactccaaagttaggttatcagtctttctacctattaagttaggttgcagtttgtccacagggactcaaatctagaagtacagagtccttcccaggccatatttagttcactgtaacagttcctattatgacctaactgacagttctttttctctgaattttcctttcttctcaacagcttgtccaaatgttccattggtccctgttcatcccgccctgcagctctccttgactgattctgcyctttgtggtttgcagtcctgtttctctacagcttggaccccttcaatctttccatcataggtttaactctctgttgaattcttatttgtagctacgcaaatgttaccttaagctaaaaaaattcaaagtgaaagccacatcctcctctcttcccttatgtgtatgtattactaccat

SEQ ID NO: 598922 - DNA, 622 bp, Homo sapiens
  misc_feature 134: n = A,T,C or G
aggtttaactctctgttgaattcttatttgtagctacgcaaatgttaccttaagctaaaaaaattcaaagtgaaagccacatcctcctctcttcccttatgtgtatgtattactaccatgcagccagtgacccnaaaatgggatgttttctgggcttttcttgcttagattcaggctcatctggtgtcaagccttgttacttttgtttccttgttcttttatttttaattttttttcttttgagacagagtttcactcttgttgcccaggctagagygcagtggtgtgatcccggctcactgcagcctccacctcccgggttcaagcaattctcctgcctcagctcctgagtagctggtattacaggcatttgccaccacgcctggctaattttgtatttttagtagagatggggtttctctgttttgatcagggtggtctcgagctcctgacctcaggtgatctgcccacctcggcctcccaaagtgctgggattacaggcgtgagccaccatgcctggcctgcttgttgttttcatctcatcctgatttctgaatacaggagaggagctgagttggtgttcactaacaagcacagaagctttgttacatttacagtgtca

SEQ ID NO: 598923 - DNA, 558 bp, Homo sapiens
  misc_feature 70: n = A,T,C or G
tcaaagtgaaagccacatcctcctctcttcccttatgtgtatgtattactaccatgcagccagtgacccnaaaatgggatgttttctgggcttttcttgcttagattcaggctcatctggtgtcaagccttgttacttttgtttccttgttcttttatttttaattttttttcttttgagacagagtttcactcttgttgcccaggctagagcgcagtggtgtgatcccggctcactgcagcctccacctcccgggttcaagcaattctcctgcctcagctcctgagtagctggtattacaggcatttgccaccacgcctggctaattttgtatttttagtagagatggggtttctctgttttgatcagggtggtctcgagctccygacctcaggtgatctgcccacctcggcctcccaaagtgctgggattacaggcgtgagccaccatgcctggcctgcttgttgttttcatctcatcctgatttctgaatacaggagaggagctgagttggtgttcactaacaagcacagaagctttgttacatttacagtgtca

SEQ ID NO: 598924 - DNA, 558 bp, Homo sapiens
  misc_feature 70: n = A,T,C or G
tcaaagtgaaagccacatcctcctctcttcccttatgtgtatgtattactaccatgcagccagtgacccnaaaatgggatgttttctgggcttttcttgcttagattcaggctcatctggtgtcaagccttgttacttttgtttccttgttcttttatttttaattttttttcttttgagacagagtttcactcttgttgcccaggctagagcgcagtggtgtgatcccggctcactgcagcctccacctcccgggttcaagcaattctcctgcctcagctcctgagtagctggtattacaggcatttgccaccacgcctggctaattttgtatttttagtagagatggggtttctctgttttgatcagggtggtctcgagctcctgacctcaggtgatctgcccacctcggcctcccaaagtgctgggattacaggcstgagccaccatgcctggcctgcttgttgttttcatctcatcctgatttctgaatacaggagaggagctgagttggtgttcactaacaagcacagaagctttgttacatttacagtgtca

SEQ ID NO: 598925 - DNA, 558 bp, Homo sapiens
  misc_feature 70: n = A,T,C or G
tcaaagtgaaagccacatcctcctctcttcccttatgtgtatgtattactaccatgcagccagtgacccnaaaatgggatgttttctgggcttttcttgcttagattcaggctcatctggtgtcaagccttgttacttttgtttccttgttcttttatttttaattttttttcttttgagacagagtttcactcttgttgcccaggctagagcgcagtggtgtgatcccggctcactgcagcctccacctcccgggttcaagcaattctcctgcctcagctcctgagtagctggtattacaggcatttgccaccacgcctggctaattttgtatttttagtagagatggggtttctctgttttgatcagggtggtctcgagctcctgacctcaggtgatctgcccacctcggcctcccaaagtgctgggattacaggcgtsagccaccatgcctggcctgcttgttgttttcatctcatcctgatttctgaatacaggagaggagctgagttggtgttcactaacaagcacagaagctttgttacatttacagtgtca

SEQ ID NO: 598926 - DNA, 552 bp, Homo sapiens
  misc_feature 64: n = A,T,C or G
tgaaagccacatcctcctctcttcccttatgtgtatgtattactaccatgcagccagtgacccnaaaatgggatgttttctgggcttttcttgcttagattcaggctcatctggtgtcaagccttgttacttttgtttccttgttcttttatttttaattttttttcttttgagacagagtttcactcttgttgcccaggctagagcgcagtggtgtgatcccggctcactgcagcctccacctcccgggttcaagcaattctcctgcctcagctcctgagtagctggtattacaggcatttgccaccacgcctggctaattttgtatttttagtagagatggggtttctctgttttgatcagggtggtctcgagctcctgacctcaggtgatctgcccacctcggcctcccaaagtgctgggattacaggcgtgagccaccrtgcctggcctgcttgttgttttcatctcatcctgatttctgaatacaggagaggagctgagttggtgttcactaacaagcacagaagctttgttacatttacagtgtca

SEQ ID NO: 598927 - DNA, 586 bp, Homo sapiens
tcccctgtgacctgtgcatctggccaacactgtggtgacatccttaggaatccatggggagagacaaagcattcaggagttagtgggtcacktttgacaagggccaataaagaaatatgcaaagacaaaaaacaagaagaacattatcatattttataccttttgtttatataaatttatgtcaatgattctagcttatgttaatatgcaatgtatataatatgctaacatatacaatatatgtttatagtttaaacatttctgtcatgttttcagattctttaaagattatattacacttcctatttcagatagctgtttaaaatgagtaaggaaaaacggatgtgtgcatcagttctaactgtttatggactaaaactagttgatttcttggttaagaacaaaaagtgacaacctaattaactgaaaattttaagtaggcaattatggttttagctttaatgtaaaatattaactatgctccattcttgcatttttaacctaatactcaatataaatcgccacatgccatgtttcagatcaaggttctacttgtgatctctcatgagtttttcaaggttttaat

SEQ ID NO: 598928 - DNA, 586 bp, Homo sapiens
tcccctgtgacctgtgcatctggccaacactgtggtgacatccttaggaatccatggggagagacaaagcattcaggagttagtgggtcacgtttgacaagggccaataaagaaatatgcaaagacaaaaaacaagaagaacattrtcatattttataccttttgtttatataaatttatgtcaatgattctagcttatgttaatatgcaatgtatataatatgctaacatatacaatatatgtttatagtttaaacatttctgtcatgttttcagattctttaaagattatattacacttcctatttcagatagctgtttaaaatgagtaaggaaaaacggatgtgtgcatcagttctaactgtttatggactaaaactagttgatttcttggttaagaacaaaaagtgacaacctaattaactgaaaattttaagtaggcaattatggttttagctttaatgtaaaatattaactatgctccattcttgcatttttaacctaatactcaatataaatcgccacatgccatgtttcagatcaaggttctacttgtgatctctcatgagtttttcaaggttttaat

SEQ ID NO: 598929 - DNA, 531 bp, Homo sapiens
tttgacaagggccaataaagaaatatgcaaagacaaaaaacaagaagaacattatcatattttayaccttttgtttatataaatttatgtcaatgattctagcttatgttaatatgcaatgtatataatatgctaacatatacaatatatgtttatagtttaaacatttctgtcatgttttcagattctttaaagattatattacacttcctatttcagatagctgtttaaaatgagtaaggaaaaacggatgtgtgcatcagttctaactgtttatggactaaaactagttgatttcttggttaagaacaaaaagtgacaacctaattaactgaaaattttaagtaggcaattatggttttagctttaatgtaaaatattaactatgctccattcttgcatttttaacctaatactcaatataaatcgccacatgccatgtttcagatcaaggttctacttgtgatctctcatgagtttttcaaggttttaattatctgagatgtaacaatgtacctgtaaccttactgg

SEQ ID NO: 598930 - DNA, 646 bp, Homo sapiens
tgtggggtgatgaggttcagtcccctgtgacctgtgcatctggccaacactgtggtgacatccttaggaatccatggggagagacaaagcattcaggagttagtgggtcacgtttgacaagggccaataaagaaatatgcaaagacaaaaaacaagaagaacattatcatattttataccttttgtttatataaatttatgtcaatgattctagcttatgttaatatrcaatgtatataatatgctaacatatacaatatatgtttatagtttaaacatttctgtcatgttttcagattctttaaagattatattacacttcctatttcagatagctgtttaaaatgagtaaggaaaaacggatgtgtgcatcagttctaactgtttatggactaaaactagttgatttcttggttaagaacaaaaagtgacaacctaattaactgaaaattttaagtaggcaattatggttttagctttaatgtaaaatattaactatgctccattcttgcatttttaacctaatactcaatataaatcgccacatgccatgtttcagatcaaggttctacttgtgatctctcatgagtttttcaaggttttaattatctgagatgtaacaatgtacctgtaaccttactggctt

SEQ ID NO: 598931 - DNA, 646 bp, Homo sapiens
tgtggggtgatgaggttcagtcccctgtgacctgtgcatctggccaacactgtggtgacatccttaggaatccatggggagagacaaagcattcaggagttagtgggtcacgtttgacaagggccaataaagaaatatgcaaagacaaaaaacaagaagaacattatcatattttataccttttgtttatataaatttatgtcaatgattctagcttatgttaatatgcaatgtatayaatatgctaacatatacaatatatgtttatagtttaaacatttctgtcatgttttcagattctttaaagattatattacacttcctatttcagatagctgtttaaaatgagtaaggaaaaacggatgtgtgcatcagttctaactgtttatggactaaaactagttgatttcttggttaagaacaaaaagtgacaacctaattaactgaaaattttaagtaggcaattatggttttagctttaatgtaaaatattaactatgctccattcttgcatttttaacctaatactcaatataaatcgccacatgccatgtttcagatcaaggttctacttgtgatctctcatgagtttttcaaggttttaattatctgagatgtaacaatgtacctgtaaccttactggctt

SEQ ID NO: 598932 - DNA, 624 bp, Homo sapiens
cccctgtgacctgtgcatctggccaacactgtggtgacatccttaggaatccatggggagagacaaagcattcaggagttagtgggtcacgtttgacaagggccaataaagaaatatgcaaagacaaaaaacaagaagaacattatcatattttataccttttgtttatataaatttatgtcaatgattctagcttatgttaatatgcaatgtatataatatgctaacatatacaatatatgtttatagtttaaacatttctgtcatgttttcagattctttaaagattayattacacttcctatttcagatagctgtttaaaatgagtaaggaaaaacggatgtgtgcatcagttctaactgtttatggactaaaactagttgatttcttggttaagaacaaaaagtgacaacctaattaactgaaaattttaagtaggcaattatggttttagctttaatgtaaaatattaactatgctccattcttgcatttttaacctaatactcaatataaatcgccacatgccatgtttcagatcaaggttctacttgtgatctctcatgagtttttcaaggttttaattatctgagatgtaacaatgtacctgtaaccttactggct

SEQ ID NO: 598933 - DNA, 597 bp, Homo sapiens
attacacttcctatttcagatagctgtttaaaatgagtaaggaaaaacggatgtgtgcatcagttctaactgtttatggactaaaactagttgawttcttggttaagaacaaaaagtgacaacctaattaactgaaaattttaagtaggcaattatggttttagctttaatgtaaaatattaactatgctccattcttgcatttttaacctaatactcaatataaatcgccacatgccatgtttcagatcaaggttctacttgtgatctctcatgagtttttcaaggttttaattatctgagatgtaacaatgtacctgtaaccttactggcttaaaccaggaatttattctttttacatgtcacaattttctgggtcaagacactggacagagcggtgtgggttggttgcttcatgatgtccctggtctcatctggaaggactctagtggctggggacgtgaagcaggcacccagaaggactctagtggctggggacacggagcaggcacccagccctctctttgtggccagcacggacttccttccagtctggtagcatcaggtagtcaggtttgtctggcttctcccagggtgt

SEQ ID NO: 598934 - DNA, 477 bp, Homo sapiens
attacacttcctatttcagatagctgtttaaaatgagtaaggaaaaacggatgtgtgcatcagttctaactgtttatggactaaaactagttgatttcttggttaagaacaaaaagtgacaacctaattaactgaaaattttaagtaggcaattatggttttagctttaatgtaaaatattaactatgctccattcttgcatttttaacctaatactcaatataaatcgccacatgccatgtttcagatcaaggttctacttgtgatctctcatgagtttttcaaggttttaattatctgagatgtaacaatgtaccygtaaccttactggcttaaaccaggaatttattctttttacatgtcacaattttctgggtcaagacactggacagagcggtgtgggttggttgcttcatgatgtccctggtctcatctggaaggactctagtggctggggacgtgaagcaggcacccaga

SEQ ID NO: 598935 - DNA, 597 bp, Homo sapiens
atgtaaaatattaactatgctccattcttgcatttttaacctaatactcaatataaatcgccacatgccatgtttcagatcaaggttctacttgtgatctctcatgagtttttcaaggttttaattatctgagatgtaacaatgtacctgtaaccttactggcttaaaccaggaatttattctttttacatgtcacaattttctgggtcaagacactggacagagcggtgtgggttggttgcttcatgatgtccctggtctcatctggaaggactctagtggctggggaygtgaagcaggcacccagaaggactctagtggctggggacacggagcaggcacccagccctctctttgtggccagcacggacttccttccagtctggtagcatcaggtagtcaggtttgtctggcttctcccagggtgtgtgtccaagaggcccaggcagaagctgtaaggtctctcatgatcatccctcagaagtcccagagcatctctcctgccacactgtccagttgtactcatcactgagaccagccatgattcaagggggaaaggtgattagattccacctcttgatgagaagcatagtagga

SEQ ID NO: 598936 - DNA, 632 bp, Homo sapiens
aggcaattatggttttagctttaatgtaaaatattaactatgctccattcttgcatttttaacctaatactcaatataaatcgccacatgccatgtttcagatcaaggttctacttgtgatctctcatgagtttttcaaggttttaattatctgagatgtaacaatgtacctgtaaccttactggcttaaaccaggaatttattctttttacatgtcacaattttctgggtcaagacactggacagagcggtgtgggttggttgcttcatgatgtccctggtctcatctggaaggactctagtggctggggacrtgaagcaggcacccagaaggactctagtggctggggacacggagcaggcacccagccctctctttgtggccagcacggacttccttccagtctggtagcatcaggtagtcaggtttgtctggcttctcccagggtgtgtgtccaagaggcccaggcagaagctgtaaggtctctcatgatcatccctcagaagtcccagagcatctctcctgccacactgtccagttgtactcatcactgagaccagccatgattcaagggggaaaggtgattagattccacctcttgatgagaagcatagtaggaacctgcagcagt

SEQ ID NO: 598937 - DNA, 621 bp, Homo sapiens
agccctctctttgtggccagcacggacttccttccagtctggtagcatcaggtagtcaggtttgtctggcttctcccagggtgtgtgtccaagaggcccaggcagaagctgtaaggtctctcatgatcatccctcagaagtcccagagcatctctcctgccacactgtccagttgtactcatcactgagaccagccatgattcaagggggaaaggtgattagattycacctcttgatgagaagcatagtaggaacctgcagcagtctttaataaaccacagcttgtcctctggccacaaactattaacgtttctcccacatgcaaattatgctttgcccctctcaagagccccagaatggttttccttatggcactggctagtagcccaactgaatcctgaatcaggttgtggtggcttgtcatctgcacccacacacactcagctgcagtgaggactgaatcaggttgtggtggcctgtcatctgaccccccacacacagccacagtggggactgaatcaggttgttgtgagctatcatctgagcccacaaactcagccgcagtgaggggactgctgtgaaaacagtcgacatttccctttagaagctttggtgggaggc

SEQ ID NO: 598938 - DNA, 494 bp, Homo sapiens
ggttgcttcatgatgtccctggtctcatctggaaggactctagtggctggggacgtgaagcaggcacccagaaggactctagtggctggggacacggagcaggcacccagccctctctttgtggccagcacggacttccttccagtctggtagcatcaggtagtcaggtttgtctggcttctcccagggtgtgtgtccaagaggcccaggcagaagctgtaaggtctctcatgatcatccctcagaagtcccagagcatctctcctgccacactgtccagttgtactcatcactgagaccagccatgattcaagggggaaaggtgattagattccacctcttgatgagaagcatagtaggaacctgcagcagtctttaataaacyacagcttgtcctctggccacaaactattaacgtttctcccacatgcaaattatgctttgcccctctcaagagccccagaatggttttccttatggcactggctagtagc

SEQ ID NO: 598939 - DNA, 603 bp, Homo sapiens
cctcttgatgagaagcatagtaggaacctgcagcagtctttaataaaccacagcttgtcctctggccacaaactattaacgtttctcccacatgcaaattatgctttgcccctctcaagagcccmagaatggttttccttatggcactggctagtagcccaactgaatcctgaatcaggttgtggtggcttgtcatctgcacccacacacactcagctgcagtgaggactgaatcaggttgtggtggcctgtcatctgaccccccacacacagccacagtggggactgaatcaggttgttgtgagctatcatctgagcccacaaactcagccgcagtgaggggactgctgtgaaaacagtcgacatttccctttagaagctttggtgggaggcaagagggaagtgctgccctgcaggccccgtctaacagttggtcattcccatggggcgcctgttacagttctgtgattagtgcccagtcctggtccctgaaaacggcgcccagtcctggtccctgagaatggtgtttgtgtccttttactcctccctctgggcttttgtcattctccatgttctttttccttcagtgtctgggttgccgtt

SEQ ID NO: 598940 - DNA, 494 bp, Homo sapiens
ttagaagctttggtgggaggcaagagggaagtgctgccctgcaggccccgtctaacagttggtcattcccatggggcgcctgttacagttctgtgattagtgcccagtcctggtccctgaaaacggcgcccagtcctggtccctgagaatggtgtttgtgtccttttactcctccctctgggcttttgtcattctccatgttctttttccttcagtgyctgggttgccgttgaccagctttgccctgctttttcttatggtcaatagggtattcaatggcttctttttcattttttttccttttcttttcttttcttttcttttttttttactttggccttttgagacaagaaattatttctttatattttctctaaattctgtttgaaaactgaaccttcttctttagatcatgtccctctcctgtcatatttattcagtgacagttaggggaggctggtagcactttccatgttcttcccagatgtctcctt

SEQ ID NO: 598941 - DNA, 636 bp, Homo sapiens
cagttctgtgattagtgcccagtcctggtccctgaaaacggcgcccagtcctggtccctgagaatggtgtttgtgtccttttactcctccctctgggcttttgtcattctccatgttctttttccttcagtgtctgggttgccgttgaccagctttgccctgctttttcttatggtcaatagggtattcaatggcttctttttcattttttttccttttcttttcttttcttttcttttttttttactttggccttttgagacaagaaattatttctttatattttctctaaattctgtttgaaaactgaaccttcttctttagatcatgtccctctcctgtcatatttattcagtgacagttaggggaggctggtagcactttccatgttcttcccagatgtctccttaggcagatccctgagatggtgcagtgccctttcagtttccatgttgtggccatagttttcccacagtccctcagcaagwaactctcagaccttttctccagtttccaatgacattttctcaccatccttcaggccctgaccaagagtcttgatgcccttccaggttgcatgaatggtctccttgaggcccagttacaggtcagcctcacagtcgtgtcacatattgt

SEQ ID NO: 598942 - DNA, 547 bp, Homo sapiens
tttcttttttttttactttggccttttgagacaagaaattatttctttatattttctctaaattctgtttgaaaactgaaccttcttctttagatcatgtccctctcctgtcatatttattcagtgacagttaggggaggctggtagcactttccatgttcttcccagatgtctccttaggcagatccctgagatggtgcagtgccctttcagtttccatgttgtggccatagttttcccacagtccctcagcaagtaactctcagaccttttctccagtttccaatgacattttctcaccrtccttcaggccctgaccaagagtcttgatgcccttccaggttgcatgaatggtctccttgaggcccagttacaggtcagcctcacagtcgtgtcacatattgtagcttctgattaccacagcagctcatttccagctgccatattctgttccagttatctattctgaagtaaaacaactcattattacttgttttttggcttagagagtcttggtggccagctcatctcacacacagttgcagcc

SEQ ID NO: 598943 - DNA, 594 bp, Homo sapiens
tgttgtggccatagttttcccacagtccctcagcaagtaactctcagaccttttctccagtttccaatgacattttctcaccatccttcaggccctgaccaagagtcttgatgcccttccaggttgcatgaatggtcyccttgaggcccagttacaggtcagcctcacagtcgtgtcacatattgtagcttctgattaccacagcagctcatttccagctgccatattctgttccagttatctattctgaagtaaaacaactcattattacttgttttttggcttagagagtcttggtggccagctcatctcacacacagttgcagccaagctggattgtgtgaaagcacagtggggtggtgtgcagggtggctcactagtggttgggagtggatgttgctggaggctcactagttgttgggagtcggtgttgctggaggctcagtgggggatgtcaatgcgtgtagctagtcatggactggccttgtggtttccatcatgaggtctcaggggagtgggatttcctgcctggtgactggctttctcctgggtaagtgttctgttttctcagcctggcttctgaagtccccaaat

SEQ ID NO: 598944 - DNA, 497 bp, Homo sapiens
gtggatgttgctggaggctcactagttgttgggagtcggtgttgctggaggctcagtgggggatgtcaatgcgtgtagctagtcatggactggccttgtggtttccatcatgaggtctcaggggagtgggatttcctgcctggtgactggctttctcctgggtaagtgttctgttttctcagcctggcttctgaagtccccaaataccagctttgtcaccttctgttggccaaataagtcagtagtctggtcaaggtttaaggggaattggttctcacagagagaggagcaggaaagaatttgtcacctttagtctaccagaaatgagatttytataacaagtttattccaaatacattccagttccccttgtgaatacttttttgactcacagggtatttcaaagtttattacttggttttcagacatttgaggcttttctggatatcaatttgttgttggtttctaatttaatttcaagtgttcagacaacatcc

SEQ ID NO: 598945 - DNA, 582 bp, Homo sapiens
tgtcacatattgtagcttctgattaccacagcagctcatttccagctgccatattctgttccagttatctattctgaagtaaaacaactcattattacttgttttttggcttagagagtcttggtggccagctcatctcacacacagttgcagccaagctggattgtgtgaaagcacagtggggtggtgtgcagggtggctcactagtggttgggagtggatgttgctggaggctcactagttgttgggagtcggtgttgctggaggctcagtgggggatgtcaatgcgtgtagctagtcatggactggccttgtggtttccatcatgaggtctcaggggagtgggatttcctgcctggtgactggctttctcctgggtaagtgttctgttttctcagcctggcttctgaagtccccaaataccagctttgtcaccttctgttggccaaataagtcagtagtctggtcaaggtttaaggggaattggttctcacagagagaggagcaggaaagaatttgtcacctttagtctaccagaaatgagatttttatarcaagtttattccaaatacattccagttc

SEQ ID NO: 598946 - DNA, 572 bp, Homo sapiens
tcaatttctcattctgacctttttaaaaaatgagaccgggagtggtggctcacgcctgtaatcccagcattttgcgaggccgaggcgggtggatcacgaggtcaggagatcaagaccatcctggctaacacagtgaaaccccgtttctactaaaaatacagaaaattagctgggcgtgatggcgggcacctgtagtcccagctacttgggagactgaggcaggatagtggtatgaactcgggaggcagagcttgcagtgagctgagatygtgccactgcactccagcctgggcaacagagtgagactccgtctcaaaaaaaaaaaatgagatgaccatttcacctaaaatataccctcttaagttttattttaagtgtacaatacaggacggccatgcatcagagatatatgtgggtttggttccagaccactgcaataaagtgagttatacaatttcttttggttttccagtgcatgtaaaagtatgtttatactgtgctgtataaagtgtgcaatagcatatgtctacaaagtgttcacactttaatttacaaatactttattgttaaca

SEQ ID NO: 598947 - DNA, 532 bp, Homo sapiens
agtagatttcatctcaagaaaccactttctttgctcatccktgggagcaactcatcctctcacgttttctccagaggctgctgcagtctcgccagatcttcaggctctttctctgattctagtgctcttgttatttccaccatatctgcagttacttcctccacagaagtcgtgaacccctgtgtcatctgtgagggttggaataatcttcccaacttctctctcttttttttttttttttttgagatgaagtcttgcctgggctggagtgcagtgatgcgatctcagctcactgcaacctccacttcccgtgttcaagcaattctcctgcctcagcctcccaagtgtttgggattacagtcacccccgaccaggcccagctaattttttttgtgtttttagtacagacaggatttcactatgttggccaggctggtctcaaattcctgacctcgtgatccacgtgccttggcctcccaaagtgctgggattacaggcgtgagccaccaagcccggccccaacttctcctaa

SEQ ID NO: 598948 - DNA, 542 bp, Homo sapiens
gtagatttcatctcaagaaaccactttctttgctcatccgtggaagcaactcatccactcacgttttctccggaggctgctgcagtctcgccagatcttcaggctctgtctctgattctagtgctcttgttatttccaccatatctgcagttacctcctccacagaagtcgtgaacccctgtgtcatctgtgagggttggaataatcttcccaacttctctctcgtctttttttttttttttttgagatgaagtcttgcctgggctggagtgcagtgatgcgatcccagctcactgcaacctccacctcccaggttcaagcaattctgcctcagcctcccaagtgtttgggattacagtcacccccgaccaggcccagctaattttttgtgtgtttttagtacagacaggatttcactatgttggccaggctggtctcaaattcctgacctcgtgayccacgtgccttggcctgccaacatgctgggattacaagtgtgagccaccacgcccggccccaacttctcctaatgttgctatttt

SEQ ID NO: 598949 - DNA, 515 bp, Homo sapiens
tatttttaagtgataagacttgaaagttgaaattattctttgatccaagggcaccagaatgaatgttgggttagtaggcatgaaaacaatattcasctctttgtacatctctgtaaaagcccttgagtaccaggggcattgtcagtgagcggtaatactttgaaaggaatcttatttcttgagcagtaggtgtcaacagtgggcttcagatattcagtaaaccatatttgtaagccgatagtctgtcatccaggctttgttcccatttgtagagtacagacagagctgtgttttatcataattcttcagggcccttggattttcagaatagtaaatcatcattggtttcaagttaacatcaccaactgcattagcccttaacaaaagagtcagcatgtcctttgaagccttaaagccaggcatcaactcctctctagctgggaacatcctagatggcatctccttctagtagaaggctgttttgtctccattgcaaatctatttagtgttgccat

SEQ ID NO: 598950 - DNA, 173 bp, Homo sapiens
gaaatatatttttaagtgataagacttgaaagttgaaattattctttgatccaagggcaccagaatgaatgttgggttagtaggcatgaaaacaatattcagctctttrtacatctctgtaaaagcccttgagtaccaggggcattgtcagtgagcggtaatactttgaaagg

SEQ ID NO: 598951 - DNA, 515 bp, Homo sapiens
tatttttaagtgataagacttgaaagttgaaattattctttgatccaagggcaccagaatgaatgttgggttagtaggcatgaaaacaatattcagctctttgtacatctctgtaaaagcccttgagtaccagrggcattgtcagtgagcggtaatactttgaaaggaatcttatttcttgagcagtaggtgtcaacagtgggcttcagatattcagtaaaccatatttgtaagccgatagtctgtcatccaggctttgttcccatttgtagagtacagacagagctgtgttttatcataattcttcagggcccttggattttcagaatagtaaatcatcattggtttcaagttaacatcaccaactgcattagcccttaacaaaagagtcagcatgtcctttgaagccttaaagccaggcatcaactcctctctagctgggaacatcctagatggcatctccttctagtagaaggctgttttgtctccattgcaaatctatttagtgttgccat

SEQ ID NO: 598952 - DNA, 526 bp, Homo sapiens
agctttatgaaatatatttttaagtgataagacttgaaagttgaaattattctttgatccaagggcaccagaatgaatgttgggttagtaggcatgaaaacaatattcagctctttgtacatctctgtaaaagcccttgagtaccaggggcattgtcagtgagyggtaatactttgaaaggaatcttatttcttgagcagtaggtgtcaacagtgggcttcagatattcagtaaaccatatttgtaagccgatagtctgtcatccaggctttgttcccatttgtagagtacagacagagctgtgttttatcataattcttcagggcccttggattttcagaatagtaaatcatcattggtttcaagttaacatcaccaactgcattagcccttaacaaaagagtcagcatgtcctttgaagccttaaagccaggcatcaactcctctctagctgggaacatcctagatggcatctccttctagtagaaggctgttttgtctccattgcaaatctatttagtgttgc

SEQ ID NO: 598953 - DNA, 488 bp, Homo sapiens
aaagttgaaattattctttgatccaagggcaccagaatgaatgttgggttagtaggcatgaaaacaatattcagctctttgtacatctctgtaaaagcccttgagtaccaggggcattgtcagtgagcggtaatactttgaaaggaatcttatttcttgagcagtaggtgtcaacagtgggcttmagatattcagtaaaccatatttgtaagccgatagtctgtcatccaggctttgttcccatttgtagagtacagacagagctgtgttttatcataattcttcagggcccttggattttcagaatagtaaatcatcattggtttcaagttaacatcaccaactgcattagcccttaacaaaagagtcagcatgtcctttgaagccttaaagccaggcatcaactcctctctagctgggaacatcctagatggcatctccttctagtagaaggctgttttgtctccattgcaaatctatttagtgtt

SEQ ID NO: 598954 - DNA, 488 bp, Homo sapiens
aaagttgaaattattctttgatccaagggcaccagaatgaatgttgggttagtaggcatgaaaacaatattcagctctttgtacatctctgtaaaagcccttgagtaccaggggcattgtcagtgagcggtaatactttgaaaggaatcttatttcttgagcagtaggtgtcaacagtgggcttcagatattcagtaaaccatatttgtaarccgatagtctgtcatccaggctttgttcccatttgtagagtacagacagagctgtgttttatcataattcttcagggcccttggattttcagaatagtaaatcatcattggtttcaagttaacatcaccaactgcattagcccttaacaaaagagtcagcatgtcctttgaagccttaaagccaggcatcaactcctctctagctgggaacatcctagatggcatctccttctagtagaaggctgttttgtctccattgcaaatctatttagtgtt

SEQ ID NO: 598955 - DNA, 526 bp, Homo sapiens
agctttatgaaatatatttttaagtgataagacttgaaagttgaaattattctttgatccaagggcaccagaatgaatgttgggttagtaggcatgaaaacaatattcagctctttgtacatctctgtaaaagcccttgagtaccaggggcattgtcagtgagcggtaatactttgaaaggaatcttatttcttgagcagtaggtgtcaacagtgggcttcagatattcagtaaaccatatttgtaagccgayagtctgtcatccaggctttgttcccatttgtagagtacagacagagctgtgttttatcataattcttcagggcccttggattttcagaatagtaaatcatcattggtttcaagttaacatcaccaactgcattagcccttaacaaaagagtcagcatgtcctttgaagccttaaagccaggcatcaactcctctctagctgggaacatcctagatggcatctccttctagtagaaggctgttttgtctccattgcaaatctatttagtgttgc

SEQ ID NO: 598956 - DNA, 513 bp, Homo sapiens
tagctttatgaaatatatttttaagtgataagacttgaaagttgaaattattctttgatccaagggcaccagaatgaatgttgggttagtaggcatgaaaacaatattcagctctttgtacatctctgtaaaagcccttgagtaccaggggcattgtcagtgagcggtaatactttgaaaggaatcttatttcttgagcagtaggtgtcaacagtgggcttcagatattcagtaaaccatatttgtaagccgatagtctgtcatccaggctttgttcccawttgtagagtacagacagagctgtgttttatcataattcttcagggcccttggattttcagaatagtaaatcatcattggtttcaagttaacatcaccaactgcattagcccttaacaaaagagtcagcatgtcctttgaagccttaaagccaggcatcaactcctctctagctgggaacatcctagatggcatctccttctagtagaaggctgttttgtctccattgcaaat

SEQ ID NO: 598957 - DNA, 526 bp, Homo sapiens
agctttatgaaatatatttttaagtgataagacttgaaagttgaaattattctttgatccaagggcaccagaatgaatgttgggttagtaggcatgaaaacaatattcagctctttgtacatctctgtaaaagcccttgagtaccaggggcattgtcagtgagcggtaatactttgaaaggaatcttatttcttgagcagtaggtgtcaacagtgggcttcagatattcagtaaaccatatttgtaagccgatagtctgtcatccaggctttgttcccatttgtagagtacagrcagagctgtgttttatcataattcttcagggcccttggattttcagaatagtaaatcatcattggtttcaagttaacatcaccaactgcattagcccttaacaaaagagtcagcatgtcctttgaagccttaaagccaggcatcaactcctctctagctgggaacatcctagatggcatctccttctagtagaaggctgttttgtctccattgcaaatctatttagtgttgc

SEQ ID NO: 598958 - DNA, 526 bp, Homo sapiens
agctttatgaaatatatttttaagtgataagacttgaaagttgaaattattctttgatccaagggcaccagaatgaatgttgggttagtaggcatgaaaacaatattcagctctttgtacatctctgtaaaagcccttgagtaccaggggcattgtcagtgagcggtaatactttgaaaggaatcttatttcttgagcagtaggtgtcaacagtgggcttcagatattcagtaaaccatatttgtaagccgatagtctgtcatccaggctttgttcccatttgtagagtacagacagrgctgtgttttatcataattcttcagggcccttggattttcagaatagtaaatcatcattggtttcaagttaacatcaccaactgcattagcccttaacaaaagagtcagcatgtcctttgaagccttaaagccaggcatcaactcctctctagctgggaacatcctagatggcatctccttctagtagaaggctgttttgtctccattgcaaatctatttagtgttgc

SEQ ID NO: 598959 - DNA, 526 bp, Homo sapiens
agctttatgaaatatatttttaagtgataagacttgaaagttgaaattattctttgatccaagggcaccagaatgaatgttgggttagtaggcatgaaaacaatattcagctctttgtacatctctgtaaaagcccttgagtaccaggggcattgtcagtgagcggtaatactttgaaaggaatcttatttcttgagcagtaggtgtcaacagtgggcttcagatattcagtaaaccatatttgtaagccgatagtctgtcatccaggctttgttcccatttgtagagtacagacagagctgtgttttatcataattcttsagggcccttggattttcagaatagtaaatcatcattggtttcaagttaacatcaccaactgcattagcccttaacaaaagagtcagcatgtcctttgaagccttaaagccaggcatcaactcctctctagctgggaacatcctagatggcatctccttctagtagaaggctgttttgtctccattgcaaatctatttagtgttgc

SEQ ID NO: 598960 - DNA, 515 bp, Homo sapiens
tatttttaagtgataagacttgaaagttgaaattattctttgatccaagggcaccagaatgaatgttgggttagtaggcatgaaaacaatattcagctctttgtacatctctgtaaaagcccttgagtaccaggggcattgtcagtgagcggtaatactttgaaaggaatcttatttcttgagcagtaggtgtcaacagtgggcttcagatattcagtaaaccatatttgtaagccgatagtctgtcatccaggctttgttcccatttgtagagtacagacagagctgtgttttatcataattcttcagggcccttggattttcagwatagtaaatcatcattggtttcaagttaacatcaccaactgcattagcccttaacaaaagagtcagcatgtcctttgaagccttaaagccaggcatcaactcctctctagctgggaacatcctagatggcatctccttctagtagaaggctgttttgtctccattgcaaatctatttagtgttgccat

SEQ ID NO: 598961 - DNA, 516 bp, Homo sapiens
tatatttttaagtgataagacttgaaagttgaaattattctttgatccaagggcaccagaatgaatgttgggttagtaggcatgaaaacaatattcagctctttgtacatctctgtaaaagcccttgagtaccaggggcattgtcagtgagcggtaatactttgaaaggaatcttatttcttgagcagtaggtgtcaacagtgggcttcagatattcagtaaaccatatttgtaagccgatagtctgtcatccaggctttgttcccatttgtagagtacagacagagctgtgttttatcataattcttcagggcccttggattttcagaatagtaaatcatcattggtttcaagttaacatcaccaactgcattagccyttaacaaaagagtcagcatgtcctttgaagccttaaagccaggcatcaactcctctctagctgggaacatcctagatggcatctccttctagtagaaggctgttttgtctccattgcaaatctatttagtgttgcca

SEQ ID NO: 598962 - DNA, 471 bp, Homo sapiens
cagtacttgctgctttatcttgcgcttttatgttatggagatgacttttttccttaaacctcaagaaacaagctcttctagcttcagactttccttctgcagctgcctcaccactctaagtcttcatagaattgaagagaggccgggtgcggtggctgtcacacctgtaatcctagcactttgggaggccgaggcgggcasatcacctgaggtcgggagttcgacaccagtctgaccaacgtggagaaaccccgtctctactaaaaatacaaaaaaaaatagccaggtgtggtggtgcttgcctgtaatcccagctacttgggatgctgaggcagggagaatggcttgaacttgggaggcagaggttgcgatgagccaagatcacgccattgcactccagcttgggcaagaagaatgaaactctgtctcaaaaaaaaagaaaaaaaagtaaaaagagagttaggcttaggc

SEQ ID NO: 598963 - DNA, 470 bp, Homo sapiens
cagtacttgctgctttatcttgcgcttttatgttatggagatgacttttttccttaaacctcaagaaacaagctcttctagcttcagactttccttctgcagctgcctcaccactctaagtcttcatagaattgaagagaggccgggtgcggtggctgtcacacctgtaatcctagcactttgggaggccgaggcgggcagatcacctgaggtcgggagttcgacaccagtctgaccaaygtggagaaaccccgtctctactaaaaatacaaaaaaaaatagccaggtgtggtggtgcttgcctgtaatcccagctacttgggatgctgaggcagggagaatggcttgaacttgggaggcagaggttgcgatgagccaagatcacgccattgcactccagcttgggcaagaagaatgaaactctgtctcaaaaaaaaagaaaaaaaagtaaaaagagagttaggcttagg

SEQ ID NO: 598964 - DNA, 491 bp, Homo sapiens
tacttgctgctttatcttgcgcttttatgttatggagatgacttttttccttaaacctcaagaaacaagctcttctagcttcagactttccttctgcagctgcctcaccactctaagtcttcatagaattgaagagaggccgggtgcggtggctgtcacacctgtaatcctagcactttgggaggccgaggcgggcagatcacctgaggtcgggagttcgacaccagtctgaccaacrtggagaaaccccgtctctactaaaaatacaaaaaaaaatagccaggtgtggtggtgcttgcctgtaatcccagctacttgggatgctgaggcagggagaatggcttgaacttgggaggcagaggttgcgatgagccaagatcacgccattgcactccagcttgggcaagaagaatgaaactctgtctcaaaaaaaaagaaaaaaaagtaaaaagagagttaggcttaggcttaatggaatgttttttgttttt

SEQ ID NO: 598965 - DNA, 491 bp, Homo sapiens
tacttgctgctttatcttgcgcttttatgttatggagatgacttttttccttaaacctcaagaaacaagctcttctagcttcagactttccttctgcagctgcctcaccactctaagtcttcatagaattgaagagaggccgggtgcggtggctgtcacacctgtaatcctagcactttgggaggccgaggcgggcagatcacctgaggtcgggagttcgacaccagtctgaccaacgtggagaaaccccgtctctactaaaaatacaaaaaaaaatagccaggtgtggtggtgcwtgcctgtaatcccagctacttgggatgctgaggcagggagaatggcttgaacttgggaggcagaggttgcgatgagccaagatcacgccattgcactccagcttgggcaagaagaatgaaactctgtctcaaaaaaaaagaaaaaaaagtaaaaagagagttaggcttaggcttaatggaatgttttttgttttt

SEQ ID NO: 598966 - DNA, 491 bp, Homo sapiens
tacttgctgctttatcttgcgcttttatgttatggagatgacttttttccttaaacctcaagaaacaagctcttctagcttcagactttccttctgcagctgcctcaccactctaagtcttcatagaattgaagagaggccgggtgcggtggctgtcacacctgtaatcctagcactttgggaggccgaggcgggcagatcacctgaggtcgggagttcgacaccagtctgaccaacgtggagaaaccccgtctctactaaaaatacaaaaaaaaatagccaggtgtggtggtgcttgcctgtaatcccagctacttgggatgctgaggcagggagaatggcttgaacttgggaggcagaggttgcgatgagccaagatcacgccattgcactcyagcttgggcaagaagaatgaaactctgtctcaaaaaaaaagaaaaaaaagtaaaaagagagttaggcttaggcttaatggaatgttttttgttttt

SEQ ID NO: 598967 - DNA, 578 bp, Homo sapiens
  misc_feature 195: n = A,T,C or G
agaatgaaactctgtctcaaaaaaaaagaaaaaaaagtaaaaagagagttaggcttaggcttaatggaatgttttttgtttttttttcatcttctatctagaccaattaaactttcttcataacagcagcaagattgtttagctttttatcattcatgtgttcactggagcagtactttaaatttctttccagancacttcgtttgcattcacaacttggstaagtgtttgttgcatgaggtctagctactggcctgtcttgttacagcatgccttcctcactaagcttaattatttcttccttttggtttaaagtgacagacatgcaactcttctttcatgaacatatagaggctattgtagggttattaattggccacattttaatattaataaaaagaagcctgagaaaaagagaaagagaaatggcccgttggttgggcagtcagaacaaacgcatttgtcaattgtttgctgtcttatcctggtgtgatttgtggttcccaaaacaatgacaacagtagcattaaagattactgattacagatcaccacaacagattcaataataaaaatctt

SEQ ID NO: 598968 - DNA, 408 bp, Homo sapiens
  misc_feature 133: n = A,T,C or G
aatggaatgttttttgtttttttttcatcttctatctagaccaattaaactttcttcataacagcagcaagattgtttagctttttatcattcatgtgttcactggagcagtactttaaatttctttccagancacttcgtttgcattcacaacttggctaagtgtttgttgcatgaggtctagctactggcctgtcttgttacagcatgccttcctcactaagcttaattatttcttccttttggtttaaagtgacagacatrcaactcttctttcatgaacatatagaggctattgtagggttattaattggccacattttaatattaataaaaagaagcctgagaaaaagagaaagagaaatggcccgttggttgggcagtcagaacaaacgcatttgtcaattg

SEQ ID NO: 598969 - DNA, 578 bp, Homo sapiens
  misc_feature 195: n = A,T,C or G
agaatgaaactctgtctcaaaaaaaaagaaaaaaaagtaaaaagagagttaggcttaggcttaatggaatgttttttgtttttttttcatcttctatctagaccaattaaactttcttcataacagcagcaagattgtttagctttttatcattcatgtgttcactggagcagtactttaaatttctttccagancacttcgtttgcattcacaacttggctaagtgtttgttgcatgaggtctagctactggcctgtcttgttacagcatgccttcctcactaagcttaattatttcttccttttggtttaaagtgacagacatgcaactcttctttcatgaacatatagaggctattgtagggttattaattggccacattttaatattaataaaaagaagcctgagaaaaagagaaagagaaatgrcccgttggttgggcagtcagaacaaacgcatttgtcaattgtttgctgtcttatcctggtgtgatttgtggttcccaaaacaatgacaacagtagcattaaagattactgattacagatcaccacaacagattcaataataaaaatctt

SEQ ID NO: 598970 - DNA, 481 bp, Homo sapiens
agaggctattgtagggttattaattggccacattttaatattaataaaaagaagcctgagaaaaagagaaagagaaatggcccgttggttgggcagtcagaacaaacgcatttgtcaattgtttgctgtcttatcctggtgtgatttgtggttcccaaaacaatgacaacagtagcattaaagatyactgattacagatcaccacaacagattcaataataaaaatcttaaaatactgtgagaatgaccgaaatgtgacacagagacgtgaagtgagcacgtgctgtaggaacaatggtgccagtgagacctgcttattgcagggtggccgcaaaccttcaatacgtaaaacacatggtcacaaaacacaataaagcaaagtgcagtgaaacaagatgtgtctgtcttttgatagactctgacaatctctacctttgaattggtacattcataccattaacattcaaagtgattattgata

SEQ ID NO: 598971 - DNA, 492 bp, Homo sapiens
  misc_feature 61: n = A,T,C or G
ttgtttagctttttatcattcatgtgttcactggagcagtactttaaatttctttccagancacttcgtttgcattcacaacttggctaagtgtttgttgcatgaggtctagctactggcctgtcttgttacagcatgccttcctcactaagcttaattatttcttccttttggtttaaagtgacagacatgcaactcttctttcatgaacatatagaggctattgtagggttattaattggccacattttaatattaataaaaagaagcctgagaaaaagagaaagagaaatggcccgttggttgggcagtcagaacaaacgcatttgtcaattgtttgctgtcttatcctggtgtgatttgtggttcccaaaacaatgacaacagtagcattaaagattactgattacagatcaccacaacagaktcaataataaaaatcttaaaatactgtgagaatgaccgaaatgtgacacagagacgtgaagtgag

SEQ ID NO: 598972 - DNA, 524 bp, Homo sapiens
tgggcagtcagaacaaacgcatttgtcaattgtttgctgtcttatcctggtgtgatttgtggttcccaaaacaatgacaacagtagcattaaagattactgattacagatcaccacaacagattcaataataaaaatcttaaaatactgtgagaatgaccgaaatgtgacacagagacgtgaagtgagcacgtgctgtaggaacaatggtgccagtgagacctgcttattgcagggtggccgcaaaccttcaatacgtaaaacacatggtcacaaaacacaataaagcaaagtgcagtgaaacaagatgtgtctgtcttttgatagactctgamaatctctacctttgaattggtacattcataccattaacattcaaagtgattattgatatcattggattaatatctactacatttgttactgttttctattcattctcctcagtcttcattcttttgtctaccactctttttctgccttttgcagttttcattgatgattttagatgactccattttccct

SEQ ID NO: 598973 - DNA, 537 bp, Homo sapiens
gaattggtacattcataccattaacattcaaagtgattattgatatcattggattaatatctactacatttgttactgttttctattcattctcctcagtcttcattcttttgtctaccactctttttctgccttttgcagttttcattgatgattttagatgactccattttccctgtctttcttagtacrtacttctctttttaaaacttttttttaactagttgccacagaatttgcaatatacatttacaaccaattcaagtccactttcaaataacactatccaactatcccacaaataagactacctgcttaacaaacaaaacacctaattcctcagtaacatttacaaccaattcaagtccactttcaaataacactatcccactatcccacaaataagactacctgcttaacaaagaacacacctaattcctcaatatacatttacaaccaattcaagtccactttcagataacactatcccacttcacgggtgactacctgcttaacaaagaaaacacctgattcctc

SEQ ID NO: 598974 - DNA, 286 bp, Homo sapiens
tgttgaatgcagttcttatctttgtgtctctgtaggtaaggtgttttctgccccacctctggtttctttcagagttttcctttatcttttatttcatatagtttgaaaattatatgtccaagtgtaggttgttggyatttattctgcctggtgttctcagagcttcctggatctttggtttggtgtctgacattaatactggaagttctcagacatggttgttgcagaactttcttctatttcttctcctcttggtattctcattactgtttcaccttttgtagtt

SEQ ID NO: 598975 - DNA, 286 bp, Homo sapiens
tgttgaatgcagttcttatctttgtgtctctgtaggtaaggtgttttctgccccacctctggtttctttcagagttttcctttatcttttatttcatatagtttgaaaattatatgtccaagtgtaggttgttggtatttattctgcctggtgttctcagagcttcctggatctttggtttggtgtctgacattaatactggaagttctcagacatggttgttgcagaactttcttctatttcttctcctcytggtattctcattactgtttcaccttttgtagtt

SEQ ID NO: 598976 - DNA, 214 bp, Homo sapiens
gtattctcattactctgtttcactttttgtagttgtcccacrgtcttgaatatcatcttctgttcttttcagtgtttcttttctttagtttttgaagtttctgatgataaatcctcaagctcagagatttttactgagctgagtccagtctactaataagccatcagaggtattcttcagttatttaccacgtttttcatcactacattatgtt

SEQ ID NO: 598977 - DNA, 654 bp, Homo sapiens
ggcaacaagtttcttgaatttttatttttctgaggaaggccttaattctccttcacttttgaagggtggtttcagtgggtacagaaacttaggttggtgggttttttctgtcaacattttgaatttttcatttcactgtcttcttactttcacagtttctgaaatgttgaatgcagttcttatctttgtgtctctgtaggtaaggtgttttctgccccacctctggtttctttcagagttttcctttatcttttatttcatatagtttgaaaattatatgtccaagtgtaggttgttggtatttattctgcctggtgttctcagagcttcctggatctttggtttggtgtctgacattaatactggaagttctcagacatggttgttgcagaactttcttctatttcttctcctcttggtattctcattactgtttcaccttttgtagttgtcccacagtcttgaatatcatcttctgttcttttcagtgtttcttttctttagttttyaaagtttctgatgataaatcctcaagctcagagatttttactcagctgagtccagtctactaataagccatcagaggtattcttcagttatttaccacgtttttcatcactacattatgttgaaagttcttacgatgtctgtctt

SEQ ID NO: 598978 - DNA, 654 bp, Homo sapiens
ggcaacaagtttcttgaatttttatttttctgaggaaggccttaattctccttcacttttgaagggtggtttcagtgggtacagaaacttaggttggtgggttttttctgtcaacattttgaatttttcatttcactgtcttcttactttcacagtttctgaaatgttgaatgcagttcttatctttgtgtctctgtaggtaaggtgttttctgccccacctctggtttctttcagagttttcctttatcttttatttcatatagtttgaaaattatatgtccaagtgtaggttgttggtatttattctgcctggtgttctcagagcttcctggatctttggtttggtgtctgacattaatactggaagttctcagacatggttgttgcagaactttcttctatttcttctcctcttggtattctcattactgtttcaccttttgtagttgtcccacagtcttgaatatcatcttctgttcttttcagtgtttcttttctttagttttcraagtttctgatgataaatcctcaagctcagagatttttactcagctgagtccagtctactaataagccatcagaggtattcttcagttatttaccacgtttttcatcactacattatgttgaaagttcttacgatgtctgtctt

SEQ ID NO: 598979 - DNA, 327 bp, Homo sapiens
cttttctttagttttcaaagtttctgatgataaatcctcaagctcagagatttttactcagctgagtccagtctactaataagccatcagaggtattcttcagttatttaccacgtttttcatcactacattatgttgaaagttcttacgatgtctgtctttctcattacattacccatctacacttgaatactgtctacttcattcattaggtccttagcatattctccagaggtttaaaraaaaattccaagatcatatctttgtctgcttctgaagcttgctctgttgacacaaattgtatttttttctttttttggattttag

SEQ ID NO: 598980 - DNA, 478 bp, Homo sapiens
aggtccttagcatattctccagaggtttaaagaaaaattccaagatcatatctttgtctgcttctgaagcttgctctgttgacacaaattgtatttttttctttttttggattttagtawgccttgcaattttttccctttattctgatgcatgaagtacccactaaaagtgactgctgttagtatagcttcagtaatgcggtgatgaggtgacagggcaggtgatgctcttttagtctctttaggctactataacaaaatacttcagactgagtaattcataaacaacagagattattgttcacagatctggaggctggaaagtacaagactaaagggccaggatatttggtgtttggtgaaggtcaaacattcagacactctcaacgactatagcgacagcagcagtcttcaggaatcctatgtgagggacaaacactcagaagccagctggagtgttctagaatcctatgtgagg

SEQ ID NO: 598981 - DNA, 478 bp, Homo sapiens
aggtccttagcatattctccagaggtttaaagaaaaattccaagatcatatctttgtctgcttctgaagcttgctctgttgacacaaattgtatttttttctttttttggattttagtatgccttgcaattttttccctttattctgatgcatgaagtacccactaaaagtgactgytgttagtatagcttcagtaatgcggtgatgaggtgacagggcaggtgatgctcttttagtctctttaggctactataacaaaatacttcagactgagtaattcataaacaacagagattattgttcacagatctggaggctggaaagtacaagactaaagggccaggatatttggtgtttggtgaaggtcaaacattcagacactctcaacgactatagcgacagcagcagtcttcaggaatcctatgtgagggacaaacactcagaagccagctggagtgttctagaatcctatgtgagg

SEQ ID NO: 598982 - DNA, 594 bp, Homo sapiens
cagttatttaccacgtttttcatcactacattatgttgaaagttcttacgatgtctgtctttctcattacattacccatctacacttgaatactgtctacttcattcattaggtccttagcatattctccagaggtttaaagaaaaattccaagatcatatctttgtctgcttctgaagcttgctctgttgacacaaattgtatttttttctttttttggattttagtatgccttgcaattttttccctttattctgatgcatgaagtacccactaaaagtgactgctgttagtatagcttcagtaatgmggtgatgaggtgacagggcaggtgatgctcttttagtctctttaggctactataacaaaatacttcagactgagtaattcataaacaacagagattattgttcacagatctggaggctggaaagtacaagactaaagggccaggatatttggtgtttggtgaaggtcaaacattcagacactctcaacgactatagcgacagcagcagtcttcaggaatcctatgtgagggacaaacactcagaagccagctggagtgttctagaatcctatgtgagggccaaa

SEQ ID NO: 598983 - DNA, 590 bp, Homo sapiens
cttgctctgttgacacaaattgtatttttttctttttttggattttagtatgccttgcaattttttccctttattctgatgcatgaagtacccactaaaagtgactgctgttagtatagcttcagtaatgcggtgatgaggtgacagggcaggtgatgctctyttagtctctttaggctactataacaaaatacttcagactgagtaattcataaacaacagagattattgttcacagatctggaggctggaaagtacaagactaaagggccaggatatttggtgtttggtgaaggtcaaacattcagacactctcaacgactatagcgacagcagcagtcttcaggaatcctatgtgagggacaaacactcagaagccagctggagtgttctagaatcctatgtgagggccaaacattcagaccccagcagtagtgttgtggaatcctatgtgagggacaaactttcaaacccttgtagcagtgttctggaatgctatgtgagggacaaacattcagaccacgggagcagtgttctggaattctatgtgaaggacaaacattaagactctcatagcagtgtcctggaat

SEQ ID NO: 598984 - DNA, 594 bp, Homo sapiens
cagttatttaccacgtttttcatcactacattatgttgaaagttcttacgatgtctgtctttctcattacattacccatctacacttgaatactgtctacttcattcattaggtccttagcatattctccagaggtttaaagaaaaattccaagatcatatctttgtctgcttctgaagcttgctctgttgacacaaattgtatttttttctttttttggattttagtatgccttgcaattttttccctttattctgatgcatgaagtacccactaaaagtgactgctgttagtatagcttcagtaatgcggtgatgaggtgacagggcaggtgatgctcttttagtctctttaggctactatwacaaaatacttcagactgagtaattcataaacaacagagattattgttcacagatctggaggctggaaagtacaagactaaagggccaggatatttggtgtttggtgaaggtcaaacattcagacactctcaacgactatagcgacagcagcagtcttcaggaatcctatgtgagggacaaacactcagaagccagctggagtgttctagaatcctatgtgagggccaaa

SEQ ID NO: 598985 - DNA, 590 bp, Homo sapiens
cttgctctgttgacacaaattgtatttttttctttttttggattttagtatgccttgcaattttttccctttattctgatgcatgaagtacccactaaaagtgactgctgttagtatagcttcagtaatgcggtgatgaggtgacagggcaggtgatgctcttttagtctctttaggctactataacaaaatacttcagactgagtaattcataaacaacagagattattgttcacagayctggaggctggaaagtacaagactaaagggccaggatatttggtgtttggtgaaggtcaaacattcagacactctcaacgactatagcgacagcagcagtcttcaggaatcctatgtgagggacaaacactcagaagccagctggagtgttctagaatcctatgtgagggccaaacattcagaccccagcagtagtgttgtggaatcctatgtgagggacaaactttcaaacccttgtagcagtgttctggaatgctatgtgagggacaaacattcagaccacgggagcagtgttctggaattctatgtgaaggacaaacattaagactctcatagcagtgtcctggaat

SEQ ID NO: 598986 - DNA, 492 bp, Homo sapiens
aattcataaacaacagagattattgttcacagatctggaggctggaaagtacaagactaaagggccaggatatttggtgtttggtgaaggtcaaacattcagacactctcaacgactatagcgacagcagcagtcttcaggaatcctatgtgagggacaaacactcagaagccagctggagtgttctagaatcctatgtgagggccaaacattcagaccccagcagtagtgttgtggaatcctatgtgagggacaaactttcaaacccttgtagcagtgttctggaatgctatgtgagggacaaacattcagaccacgggagcagtgttctggaattctatgtgaaggacaaacattaagactctcatagcagtgtcctggaatcatatgtgagggacaaccattcagacaccagcagaagtgttctggaatcctargtgtgggaaaaacattcagaacctagtagcagtgttctggaatcctatgtgaggg

SEQ ID NO: 598987 - DNA, 460 bp, Homo sapiens
gaattctatgtgactgacaaacattcagactccagcagcagtgttctgtaatcctatgtgagggacaaacatkcagaccccaagagcagtgttctgaaatcctatgttaagggaaacattgagaccccagcatgaatgttctggaatcctatgtgagggacaaacattcagaccacggcaggagtgttctggaatcctatgtgaggaacaaacattcagaccacagcaggagtgttctggaatcctatatgaggtataagcattcagaccctcatagcagtgttctggaatcctatgtgagggaaaagcattcagagcacagcaggagtgctctggaatcctatgttagggacaaacattcagaacctcgtaacattgtgctggaaacctatgtgagggacagacatttagaccctcgcagcagtgttctggaatcccatgtgagggtcaaacattcaga

SEQ ID NO: 598988 - DNA, 460 bp, Homo sapiens
gaattctatgtgactgacaaacattcagactccagcagcagtgttctgtaatcctatgtgagggacaaacattcagaccccaagagcagtgttctgaaatcctatgttaagggaaacattgagaccccagcatgaatgttctggaatcctatgtgagkgacaaacattcagaccacggcaggagtgttctggaatcctatgtgaggaacaaacattcagaccacagcaggagtgttctggaatcctatatgaggtataagcattcagaccctcatagcagtgttctggaatcctatgtgagggaaaagcattcagagcacagcaggagtgctctggaatcctatgttagggacaaacattcagaacctcgtaacattgtgctggaaacctatgtgagggacagacatttagaccctcgcagcagtgttctggaatcccatgtgagggtcaaacattcaga

SEQ ID NO: 598989 - DNA, 446 bp, Homo sapiens
agtgttctgtaatcctatgtgagggacaaacattcagaccccaagagcagtgttctgaaatcctatgttaagggaaacattgagaccccagcatgaatgttctggaatcctatgtgagggacaaacattcagaccacggcaggagtgttctggaatcctatgtgaggaacaaacattcagaccacagcaggagtrttctggaatcctatatgaggtataagcattcagaccctcatagcagtgttctggaatcctatgtgagggaaaagcattcagagcacagcaggagtgctctggaatcctatgttagggacaaacattcagaacctcgtaacattgtgctggaaacctatgtgagggacagacatttagaccctcgcagcagtgttctggaatcccatgtgagggtcaaacattcagatcctcgcagcagtgttctggaattc

SEQ ID NO: 598990 - DNA, 446 bp, Homo sapiens
agtgttctgtaatcctatgtgagggacaaacattcagaccccaagagcagtgttctgaaatcctatgttaagggaaacattgagaccccagcatgaatgttctggaatcctatgtgagggacaaacattcagaccacggcaggagtgttctggaatcctatgtgaggaacaaacattcagaccacagcaggagtgttctggaatccyatatgaggtataagcattcagaccctcatagcagtgttctggaatcctatgtgagggaaaagcattcagagcacagcaggagtgctctggaatcctatgttagggacaaacattcagaacctcgtaacattgtgctggaaacctatgtgagggacagacatttagaccctcgcagcagtgttctggaatcccatgtgagggtcaaacattcagatcctcgcagcagtgttctggaattc

SEQ ID NO: 598991 - DNA, 460 bp, Homo sapiens
gaattctatgtgactgacaaacattcagactccagcagcagtgttctgtaatcctatgtgagggacaaacattcagaccccaagagcagtgttctgaaatcctatgttaagggaaacattgagaccccagcatgaatgttctggaatcctatgtgagggacaaacattcagaccacggcaggagtgttctggaatcctatgtgaggaacaaacattcagaccacagcaggagtgttctggaatcctatakgaggtataagcattcagaccctcatagcagtgttctggaatcctatgtgagggaaaagcattcagagcacagcaggagtgctctggaatcctatgttagggacaaacattcagaacctcgtaacattgtgctggaaacctatgtgagggacagacatttagaccctcgcagcagtgttctggaatcccatgtgagggtcaaacattcaga

SEQ ID NO: 598992 - DNA, 446 bp, Homo sapiens
agtgttctgtaatcctatgtgagggacaaacattcagaccccaagagcagtgttctgaaatcctatgttaagggaaacattgagaccccagcatgaatgttctggaatcctatgtgagggacaaacattcagaccacggcaggagtgttctggaatcctatgtgaggaacaaacattcagaccacagcaggagtgttctggaatcctatatgagktataagcattcagaccctcatagcagtgttctggaatcctatgtgagggaaaagcattcagagcacagcaggagtgctctggaatcctatgttagggacaaacattcagaacctcgtaacattgtgctggaaacctatgtgagggacagacatttagaccctcgcagcagtgttctggaatcccatgtgagggtcaaacattcagatcctcgcagcagtgttctggaattc

SEQ ID NO: 598993 - DNA, 588 bp, Homo sapiens
agtgttctgaaatcctatgttaagggaaacattgagaccccagcatgaatgttctggaatcctatgtgagggacaaacattcagaccacggcaggagtgttctggaatcctatgtgaggaacaaacattcagaccacagcaggagtgttctggaatcctatatgaggkataagcattcagaccctcatagcagtgttctggaatcctatgtgagggaaaagcattcagagcacagcaggagtgctctggaatcctatgttagggacaaacattcagaacctcgtaacattgtgctggaaacctatgtgagggacagacatttagaccctcgcagcagtgttctggaatcccatgtgagggtcaaacattcagatcctcgcagcagtgttctggaattctatgtgagtgacaaacattcagactccagcagcagtgttctgtattcctatgagaaggacaaacattcagaatccaggagcagtgttttgaaatcatatgttaagggcaaacatacagaccctagcatcaatattctagaatcatatgtgagggacatacattcagaccctcacagcagtgttctggaat

SEQ ID NO: 598994 - DNA, 466 bp, Homo sapiens
tgtgagtccagcttccaaaggctttgtgtgcttctgttttccttcttgaacatctgcctcagcaagagaatatgccttggctggcctgcttaggatgagagmccacatggagaacagcccatctttccaacagaattcatcctaaattagcccacagtgagccaggcaggtgggaaagccacagacaaaattagaaaaaaagaaaaaagcacaaaagacattaaggtgagaaacacttagctaaccccagtaagaaaaacgtcccagttaactcatattcttgtgattacaagtaataacaaattaaataataatatttaattatgatgaataataatacataatcattgttcacagtttattgaatgctgaggttgtttgttatacagcattattatggcaatagctaactgatacaaaccacatcatggctttcattggccttactgaagacttgatgactaga

SEQ ID NO: 598995 - DNA, 466 bp, Homo sapiens
tgtgagtccagcttccaaaggctttgtgtgcttctgttttccttcttgaacatctgcctcagcaagagaatatgccttggctggcctgcttaggatgagagaccacatggagaacagcccatctttcmaacagaattcatcctaaattagcccacagtgagccaggcaggtgggaaagccacagacaaaattagaaaaaaagaaaaaagcacaaaagacattaaggtgagaaacacttagctaaccccagtaagaaaaacgtcccagttaactcatattcttgtgattacaagtaataacaaattaaataataatatttaattatgatgaataataatacataatcattgttcacagtttattgaatgctgaggttgtttgttatacagcattattatggcaatagctaactgatacaaaccacatcatggctttcattggccttactgaagacttgatgactaga

SEQ ID NO: 598996 - DNA, 599 bp, Homo sapiens
acgtcttcagcccctgacctgaggtctgtcctctgtcctgtggtgatctacctggctcccctcactagtaccacacttactgccttcacaccaactggagctcttaacaagaatggatcatattcttttctttcttcaccttcttttttaaattgtcagcagtgaggcattataatgagtgtgtctgtcaccaacgctccataggttagcattcccccttactaagaagttaactatgaaataatcaatgtagtaaaacagtgtaattctatctctaaactactaaacttgsaaaaacaccagattcaatggcatctcatgctaatctgcctgtggaacaaaaaccctggatccacaagttgagaccctcataccatgcattagtattcatttagtgatgtctccagcagaccctgcttacctcctttttgctggctgactcattcccgctcattttctcttgttatatttgcaggctcactgcccagtagaagctgaaaagattcagtatgagtaaaagaagagatctgaaatttgcagcttgtcatagaaaggtatttgttttctttttatttatttgttttaaactttgattttag

SEQ ID NO: 598997 - DNA, 599 bp, Homo sapiens
acgtcttcagcccctgacctgaggtctgtcctctgtcctgtggtgatctacctggctcccctcactagtaccacacttactgccttcacaccaactggagctcttaacaagaatggatcatattcttttctttcttcaccttcttttttaaattgtcagcagtgaggcattataatgagtgtgtctgtcaccaacgctccataggttagcattcccccttactaagaagttaactatgaaataatcaatgtagtaaaacagtgtaattctatctctaaactactaaacttggaaaaacaccagattcaatggcatctcatgctaatctgcctgtggaacaaaaaccctggatccacaagttgagaccctcataccatgcattagtattcatttagtgatgtctccagcagaccctgcttacctcctttttgctggctgactcattcccrctcattttctcttgttatatttgcaggctcactgcccagtagaagctgaaaagattcagtatgagtaaaagaagagatctgaaatttgcagcttgtcatagaaaggtatttgttttctttttatttatttgttttaaactttgattttag

SEQ ID NO: 598998 - DNA, 466 bp, Homo sapiens
tgtgagtccagcttccaaaggctttgtgtgcttctgttttccttcttgaacatctgcctcagcaagagaatatgccttggctggcctgcttaggatgagagaccacatggagaacagcccatctttccaacagaattcatcctaaattagcccacagtgagccaggcaggtgggaaagccacagacaaaattagaaaaaaagaaaaaagcacaaaakacattaaggtgagaaacacttagctaaccccagtaagaaaaacgtcccagttaactcatattcttgtgattacaagtaataacaaattaaataataatatttaattatgatgaataataatacataatcattgttcacagtttattgaatgctgaggttgtttgttatacagcattattatggcaatagctaactgatacaaaccacatcatggctttcattggccttactgaagacttgatgactaga

SEQ ID NO: 598999 - DNA, 466 bp, Homo sapiens
tgtgagtccagcttccaaaggctttgtgtgcttctgttttccttcttgaacatctgcctcagcaagagaatatgccttggctggcctgcttaggatgagagaccacatggagaacagcccatctttccaacagaattcatcctaaattagcccacagtgagccaggcaggtgggaaagccacagacaaaattagaaaaaaagaaaaaagcacaaaagrcattaaggtgagaaacacttagctaaccccagtaagaaaaacgtcccagttaactcatattcttgtgattacaagtaataacaaattaaataataatatttaattatgatgaataataatacataatcattgttcacagtttattgaatgctgaggttgtttgttatacagcattattatggcaatagctaactgatacaaaccacatcatggctttcattggccttactgaagacttgatgactaga

SEQ ID NO: 599000 - DNA, 635 bp, Homo sapiens
agttttagtggccagcatgtgtatgccaagttctctttcccactgctaggatgaccggcaaggttctagacaggtgacacttcatcagctgtgtcccaatgagaagatgtagagcgaaccacagccaacttacaatgaatggaaaaccagaatgagaaagaattcaacattctgaaagcagccattgatatcttaaggtattgatttctacagcayaacctagcatatcctgactgacacaatagatgaattaaaaaaagaagataaccaaaattctgccatccataagagaacacagtttgcattgtgtcttgtatatttctaaagcccttttaaatccctgaaccttctgcttttcctctggcactttattaataactgtatacatttatggtttttttcttaaaattatgtcaaaataaaagtatgattataggtgaagatgggtcacacatagaggagtagatatataaagagatgtgcacatagaacgatgctatgctcgtttctgtattcccaggccccactcacacacctcacacctcttggccttcagtaaattcttatgaatttaaataagcagggagggctgcttatgcattcatgactgtggacttgctccaggggaaggaaaa

SEQ ID NO: 599001 - DNA, 480 bp, Homo sapiens
atcctttaatcctcagtatcagatgactgatttcaccatcccaaccccactgtaaaaaacttatctctccccattccttttgatgatggggaagcagattagggaatattcataagggattactaacaaggttgtttwaggaatcttatttgtcctttggcctattgcttccattgtcttgattttagatgtaatttagtactggacaggatgagtcatgcaaatacgtaaaactgagtggacatgtcactggggcaaactggacgtggaattcaagctgctgttattattattcatgtaccagaaaagtaattagaaggtactaaattatcaaaataattttattaaaatagtgtcagttgagaatatcaaactatattgatgcaattctaaaaagacccagttactgtaaataatacacttgcattgctgacaattacaattattaaattataaaagctcccaggtaagaaaatatta

SEQ ID NO: 599002 - DNA, 379 bp, Homo sapiens
atgagtcatgcaaatacgtaaaactgagtggacatgtcactggggcaaactggacgtggaattcaagctgctgttattattattyatgtaccagaaaagtaattagaaggtactaaattatcaaaataattttattaaaatagtgtcagttgagaatatcaaactatattgatgcaattctaaaaagacccagttactgtaaataatacacttgcattgctgacaattacaattattaaattataaaagctcccaggtaagaaaatattaactttctaagagaaatgtgaaatacttccatcagcagatggggagaaatggtttaaaaatcaaatgaaagttaatataagataatttttatcccccttagaaaaaattg

SEQ ID NO: 599003 - DNA, 553 bp, Homo sapiens
aattagaaggtactaaattatcaaaataattttattaaaatagtgtcagttgagaatatcaaactatattgatgcaattctaaaaagacccagttactgtaaataatacacttgcattgctgacaattacaattattaaattataaaagctcccaggtaagaaaatattaactttctaagagaaatgtgaaatacttccatcagcagatggggagaaatggtttaaaaatcaaatgaaagttaatataagataatttttatcccccttagaaaaaattgtgctacttatttcttgtgataaataaatctcatcaggtgtttctcttcttattcatggttatcctcctatttatgctcaaataaggcttacttgctcttgtcattaataatgccagtgactcttctattcttcatgattttattttatctgtttgagaagatttttttcttgatgaaaatgccaagtctattgtgaggttcttactaasagactagagagtgaaatatctggcctgcattttccttgcttcaacacgattgatacccagaattc

SEQ ID NO: 599004 - DNA, 553 bp, Homo sapiens
aattagaaggtactaaattatcaaaataattttattaaaatagtgtcagttgagaatatcaaactatattgatgcaattctaaaaagacccagttactgtaaataatacacttgcattgctgacaattacaattattaaattataaaagctcccaggtaagaaaatattaactttctaagagaaatgtgaaatacttccatcagcagatggggagaaatggtttaaaaatcaaatgaaagttaatataagataatttttatcccccttagaaaaaattgtgctacttatttcttgtgataaataaatctcatcaggtgtttctcttcttattcatggttatcctcctatttatgctcaaataaggcttacttgctcttgtcattaataatgccagtgactcttctattcttcatgattttattttatctgtttgagaagatttttttcttgatgaaaatgccaagtctattgtgaggttcttactaacagactagagagtgaaatatctggcctgcattttccttgcttcaacmcgattgatacccagaattc

SEQ ID NO: 599005 - DNA, 604 bp, Homo sapiens
ttccactaaaaaactgttacaagtaataaacaaatttagtaaagtaccaggatacaaaattaatacctaaaattatttgcatttctagatgctaacwacaaactatccaaaaataaataaaataatttcatgtataatatcaaaaatagtaaaatgcttaagaataaatttaatcaagaaactgaaacatatgtacacttaaaactgtaagatattgatgaaagaaatagaagaagacacaaataaataaaaagacatactacattcatggataggaatgaaaaatattgttaaaatgttcatactaccaaaactgcagactcaatgtgatgcctaccaaaattacaggcttttttttacagaagtaaaaaaaatcttaaaattttcatggagccacaaaatatcccaaatagccacagcaatctttagaaagaaaaatgaatctaaaggcattacacttcgtaatttataacataatatattacaaggctatacaaatcataacagtgtggtactgcattaaaacagatacatagaacaatggaacagaatggagtacccagaaataaaccaagcatatagaatgaactaattattgacaagg

SEQ ID NO: 599006 - DNA, 604 bp, Homo sapiens
ttccactaaaaaactgttacaagtaataaacaaatttagtaaagtaccaggatacaaaattaatacctaaaattatttgcatttctagatgctaactacaaactatccaaaaataaataaaataatttcatgtataatatcaaaaatagtaaaatgcttaagrataaatttaatcaagaaactgaaacatatgtacacttaaaactgtaagatattgatgaaagaaatagaagaagacacaaataaataaaaagacatactacattcatggataggaatgaaaaatattgttaaaatgttcatactaccaaaactgcagactcaatgtgatgcctaccaaaattacaggcttttttttacagaagtaaaaaaaatcttaaaattttcatggagccacaaaatatcccaaatagccacagcaatctttagaaagaaaaatgaatctaaaggcattacacttcgtaatttataacataatatattacaaggctatacaaatcataacagtgtggtactgcattaaaacagatacatagaacaatggaacagaatggagtacccagaaataaaccaagcatatagaatgaactaattattgacaagg

SEQ ID NO: 599007 - DNA, 555 bp, Homo sapiens
ttttgataccctgctctctctgaatttaaatgatctttcacttcaattatgaatttcttatttatttatgtaagccaatttgtatgaaggtatctgttccccttcaaagaatacacacacttgacccaaaaaaactgaatgagttatactaaggatctaaacccatgtggcccagcccatagtctaatatgagaaacaartaagagattctaaaagttctcgagcaatttcttgaatagaggagaaaagtaactttagttgttctggtaagtgtactttggatcccattaaatgaaagatattaagagaaaaatgcatcatatctaaatgtagacattactttgctactctcttttacctgttgtagtattagtagctgaatttctatatgaggattaagatactcctaagtattactacaacataaatacaaatagggtatgtcgttaatttttaagatggagccaggtattttggtgtttagggtccttaaggggagatagatgatagatgatagacagataattttattatttataaatagtattttataac

SEQ ID NO: 599008 - DNA, 553 bp, Homo sapiens
acgatgcctgtacttatctagaaaattcaaataatcggaaagcgttgtttaaagagaaaggaaacaaaaaacaagaagtatgaaacagtttttcatcccttccayatttcccctagaccacaggcaatcattctttactacttttgtactttaaatattaatctccagagctcaaaataccatgcttctttttctgtcttgattctttgctaaaatagcaaagaacagttttccttctcctttcagagttcctttttcttcagggttgctttactctttttgatttcttggttttttgtttgttttgttttgttttgtattgttttgttttgttttggagacagggtctcactctgttgcccaggctggagtgccgtggcaggatcatagctcactgccatcttgacctcctgagctcaagcgatcctccctcctcagcctcccaagtagctgggactacaggtgcatgccactatgcccagctgattattctattgttattatttttagtagcaatgaggtcttgctatgttgcccaggttgatctcacact

SEQ ID NO: 599009 - DNA, 464 bp, Homo sapiens
tgggttttaatggcatgtggagcattattttaaggataacattcatggatttttcctgttaaggttctgttagcccccagtccaactcgaaagggatgtgaaacagttttggcaatttctagaagtttgtgaaataaactctatccgtccttagaagtgatttttgctccagagctgaacttttaccaataagccacagggaaagttaaacaaagtttacgttgctctccctctacccagcttagttaacatcctgggtgaaacactcacagcaatttcatgaagaaggaggattcccaggctggcaccagggatgtaaakctgacagaggggggaccatttgcactgcagagcccaggagacaagaccacacagctggtgcccacagctggtgttcacaggtgcagctgggtcacgtggggcttgagaaagagcatggaccaatactccagggagaggagttg

SEQ ID NO: 599010 - DNA, 610 bp, Homo sapiens
tagaacattgaattagtgtctctcaggatgagatctaagaaacagtgatattttaaatctcctgagttgattttagtatacaactgatgttgagaacagttagttagaccacaataaagaaaacaaagagaacattcctgggcttgggtagactatgttaatgggtatagtgcacatgtcacatttatgttttttattttaatgttgtgccaatcactgatgtcatttctatgaataaaagttattgcatttcacaagcaacatccaagagcccctttgtctatgcacctccaagagttataaagaaagccaaaggcagccagatgcaggcatgcccagtctctcctcctttctgtcatgttttctgtgatgccatcattgcctaggacaccactgcacacatggtcttctgattcagctctgttgtttctcaagtgctacaccttaacaaagacaagtactgaaagtgatttaattgaattcaacatggtggtgagaggggtgccctcctaacttaccaatagcttctctcccttcaggtgcrgtctaaagatcctttgtcccaccacacaggaaaccaaagatgcatcctggagatttagcaaagctt

SEQ ID NO: 599011 - DNA, 553 bp, Homo sapiens
ttactaaccctttgtttgagtctgcattttttagtttgcatatgaaaaataaggtctrtctaatcttatcccagtattcaattatttttagtagtgaaatgctttaccaaaataaaaatacacacccctccagagtatatcacctgctgtacgcccttaagagtcactgatcaatttttcctgcctgaatccccaggtaggactcaacataataacctctattgacccccactaaatatgtactagactccgctttacataaattgcatcatttaacccaaagaggtaaactactgataacatacctattttacaagtaaggaaattgatgcacagagaaggtggtgacttgccccaggtcccagagctactccatgctggagctggggcttggctgcagagcttgggcttgtatcacccaaccagctggtgtttctcatagtccattgctgtttcccctggatccattgcccctctgttttcacactgagcatagtgcaagtaattgcatcacacatgttgtgtagtactataactttctctgtcttaagct

SEQ ID NO: 599012 - DNA, 432 bp, Homo sapiens
ctgaaacagtgattggaataaacctaaccatgatctactgctagagaggtggcacttagacagagtgatgatgcctaaacttctagaagtagagttatctggctcctctaagacctagactaactgtaggtcattgayaagccaaacatctgattaagaatcacattggaagacttctcatcatttttgtctttgtaaataaaggacccctatctaactttacattcctttacttccttgaacttaaaagcctataaaaacaaacaaaccaaaaataagcaaaagtatggtattattttgtttccacactggtaataaagacataccagagactgggtagtttatgcaggaaagagtttaatggactcacagttctacatggctggggaggcctcacaatcatggtggaaggcaaggaggagcaagtcacat

SEQ ID NO: 599013 - DNA, 432 bp, Homo sapiens
ctgaaacagtgattggaataaacctaaccatgatctactgctagagaggtggcacttagacagagtgatgatgcctaaacttctagaagtagagttatctggctcctctaagacctagactaactgtaggtcattgataagccaaacatctgattaagaatcacattggaagacttctcatcatttttgtctttgtaaataaaggacccctatctaactttacattcctttacttccttgaacttaaaagcctataaaaacaaacaarccaaaaataagcaaaagtatggtattattttgtttccacactggtaataaagacataccagagactgggtagtttatgcaggaaagagtttaatggactcacagttctacatggctggggaggcctcacaatcatggtggaaggcaaggaggagcaagtcacat

SEQ ID NO: 599014 - DNA, 542 bp, Homo sapiens
ttcctcaactggaggaataaacacacaacactttgacttgcctcaaatattgtctcattgccattcattctccatagctccatagtgcagccacaatactcttacaaaacatcaatcagtgcatttcgctctctttgttgagtatcctgctattctgacaaaacatcccagagtctaaatatgttagccaagggtctccatacagatagttarggcaatgtaagacttaagaatgcaaccttcagttgctgaggtcctacttccaggatttctgacttagttggtctggaaggcgctgaagcacgtatatactcttttatatggtagcaatgaacagtcaggttgagaaactcaagtgtcagtctgcttggatatgatgataatatttagctggatgtattctaatatttagcacatttcacagctatgtgaaattacctatatccctgtttcttcaattgaatgggcacgtaataactgtaccttcattgtataatttctttgcaaatagaatgaatccaaagccctgaaacctagtaagt

SEQ ID NO: 599015 - DNA, 617 bp, Homo sapiens
aagattctgatgtatgtgtcgtattattgaaccctcatggcaccacattgagttagatgctatgactatccccactatacagaacaggaatgttaagctcacaggcccaatattcaaaactaataagtaacagaaattgagctcaattccacacctatctgagacccaaaaccaggtctccaagttgctcttaatcttttccccacactgcccatcccttctttctgtctcctacccttgtaacattgagacaggcagtggctctaccaggggaactagaacgtatttcttccccggtctggagatgcagaacactgagcataataagtgcttctcaagctttaatattcacttgaattacctggagatcttgttaaatatgcagattttgatccagtagttttgggatggaacccaaggtttggtgctcttaacgagctcccaggtgtgggtagttgcaagtagacgtacaagtttgtctgtcaakagttagacattgtcttctcctgaaaatctttcagttttatccgattcaataatgtgcgattcaagtaaatacagacatttaaatgccacgcccttcagcaagcctgggacacaagaagggaaaaacttgt

SEQ ID NO: 599016 - DNA, 617 bp, Homo sapiens
aagattctgatgtatgtgtcgtattattgaaccctcatggcaccacattgagttagatgctatgactatccccactatacagaacaggaatgttaagctcacaggcccaatattcaaaactaataagtaacagaaattgagctcaattccacacctatctgagacccaaaaccaggtctccaagttgctcttaatcttttccccacactgcccatcccttctttctgtctcctacccttgtaacattgagacaggcagtggctctaccaggggaactagaacgtatttcttccccggtctggagatgcagaacactgagcataataagtgcttctcaagctttaatattcacttgaattacctggagatcttgttaaatatgcagattttgatccagtagttttgggatggaacccaaggtttggtgctcttaacgagctcccaggtgtgggtagttgcaagtagacgtacaagtttgtctgtcaatagttagacattgtcttctcctgaaaatctttcagttttatcmgattcaataatgtgcgattcaagtaaatacagacatttaaatgccacgcccttcagcaagcctgggacacaagaagggaaaaacttgt

SEQ ID NO: 599017 - DNA, 585 bp, Homo sapiens
ctaggaagaccccagactcagtcagtagtgggagagatggctggacctggagagagatggccggaccttgaaggagatggcgggacttcggggaagataacctgcccttcccatcctctctccagctctcctctctgctgagagcagttttcattgctcagttaaattctccactttcactatccttcagttgtctgtgtgacctcattcttcttgaatgcaagacaagagtttgggactcaccaagtgtgggtacccaaaaaggctgtcacactggctcattgccctccccggcagaggacagctgactcatgcaatgaggcaaggagccaactgagctgccaacacgctgccatccagaaacggcagaactaaaagagcaccgtaacacctcctcttgggcttcagggccacaggcatccccacctaggtgccaccrcaggccctgcaggaccagccagctggaccctgcacttgctcgctcacgtgctgcctcctgcaagggggtgagtgtggcaggccagctaaaccacacatccctgtcacgggtccagcaaaaaggccgaagatatttttgtattatta

SEQ ID NO: 599018 - DNA, 597 bp, Homo sapiens
ctttgtctttctagtggcctttactgataaaatgtagcactctgtctaccagttgtcagagaaaaaattttctaatgtcacaagcatggcagtgaagggtggctttggggcagagaagctgctatgcttaggatacttgtccccccaaatctcatgttaaaatttgatcaccagtgtggtagtgttgagagacagggcctaatgggtggtgtttgggccatgggagcagattcctcataaatagattagtgacttccctgggagtgggggatgagttctcactctattaattcctgtaagagctgattgttaagaagagcctggcaccgcccctacccctcttgctttctctcccgctgtgtgatctctgcacatacaggctcccctttgycttccaccacgagtagaaatagcctgaggccctcaccggatgcccaatattgaaccttccagccagcagaatcataagccaaataaacttcttttctttataagctacctagccttaggtatccctttacagcaacactaaatggactagaactgaggtgatgtaactggtgtaaactaatgaatcagtaattgaattgaatataa

SEQ ID NO: 599019 - DNA, 613 bp, Homo sapiens
ttttaaaataacttaaaatagtataattgagttgtttgtaatacaaaggataaatgcttgaagggatgaataccccattttccatgatgtgattattacttattgcatgcctgtatcaaattatctcatgtatcccataaatatatatacctattatgtacccccaaacaattgaataaaaaattaaaaatttaaaaacatgtaaaacataaaaaagaatatacaytgggaaaggacatgtaaaaaattaaaaagaatatatccccaaataaatttttaatacaaatttaaaaattttaaaaacatgtaaaaattaaaaaaagaatacactgggaaaggacaccctcttcaataaatggtgctgggaaaactggatatccatatgcagaaaaatgaaattagacccctatatctcactatatacaaaaacaactccaaatggattaaagacttaaacatacacctgaaactataaaactactagaataaaacaagggaaatgcttcaggacattggtctaggcaaattttatgactaagacttcaaaagagcagccaaccaaaataaaattcacacagcaatggaaacaatcaacagagtgaagagacaacct

SEQ ID NO: 599020 - DNA, 480 bp, Homo sapiens
ccttctagagagtgcttatgtgggaatatcagtgtttcagagaaacaaggaaaggatccgtagaatgaggccatatttctaccacgatggtggggaacactaaccttgtaccctatttataccatgttaatcccccgctgatatggtttggctgtgtccccacccaaatctcatcttaaattcccacattttgtgggaggrgcccagtgggaggtaattgagtcatggaggcaggtctttgtcatgctgtcctcacaatagtgaataagtctcacaccttcacaagctctcttgttgcctgctgccacacatgtaagatgtgacttgctcctccttgccttccaccgtaattgtgaggcctcgccagccacgtggaactgtgagttcattaaatctttttcctgtataaattactcagcctcaggtatgtctttattagcagcatgaaaatggattaatacactccccaaagccagaatt

SEQ ID NO: 599021 - DNA, 480 bp, Homo sapiens
ccttctagagagtgcttatgtgggaatatcagtgtttcagagaaacaaggaaaggatccgtagaatgaggccatatttctaccacgatggtggggaacactaaccttgtaccctatttataccatgttaatcccccgctgatatggtttggctgtgtccccacccaaatctcatcttaaattcccacattttgtgggaggagcccagtgggaggtaattgartcatggaggcaggtctttgtcatgctgtcctcacaatagtgaataagtctcacaccttcacaagctctcttgttgcctgctgccacacatgtaagatgtgacttgctcctccttgccttccaccgtaattgtgaggcctcgccagccacgtggaactgtgagttcattaaatctttttcctgtataaattactcagcctcaggtatgtctttattagcagcatgaaaatggattaatacactccccaaagccagaatt

SEQ ID NO: 599022 - DNA, 480 bp, Homo sapiens
ccttctagagagtgcttatgtgggaatatcagtgtttcagagaaacaaggaaaggatccgtagaatgaggccatatttctaccacgatggtggggaacactaaccttgtaccctatttataccatgttaatcccccgctgatatggtttggctgtgtccccacccaaatctcatcttaaattcccacattttgtgggaggagcccagtgggaggtaattgagtcayggaggcaggtctttgtcatgctgtcctcacaatagtgaataagtctcacaccttcacaagctctcttgttgcctgctgccacacatgtaagatgtgacttgctcctccttgccttccaccgtaattgtgaggcctcgccagccacgtggaactgtgagttcattaaatctttttcctgtataaattactcagcctcaggtatgtctttattagcagcatgaaaatggattaatacactccccaaagccagaatt

SEQ ID NO: 599023 - DNA, 480 bp, Homo sapiens
ccttctagagagtgcttatgtgggaatatcagtgtttcagagaaacaaggaaaggatccgtagaatgaggccatatttctaccacgatggtggggaacactaaccttgtaccctatttataccatgttaatcccccgctgatatggtttggctgtgtccccacccaaatctcatcttaaattcccacattttgtgggaggagcccagtgggaggtaattgagtcatggaggcaggtctttgtcatgctgtcctcacaatagtgaataagtctcacmccttcacaagctctcttgttgcctgctgccacacatgtaagatgtgacttgctcctccttgccttccaccgtaattgtgaggcctcgccagccacgtggaactgtgagttcattaaatctttttcctgtataaattactcagcctcaggtatgtctttattagcagcatgaaaatggattaatacactccccaaagccagaatt

SEQ ID NO: 599024 - DNA, 624 bp, Homo sapiens
caatttgtattattaatccaaatttgtctattaaaaacattgtgggaatttggggttctttttggataatatcctcagttttccctcttttcccacaaggccagatttaccgaaagtaaacctggctctttatagaaagtttgttgattcctgttaatcgcacaaaatggacaactgtggaaacaatcttcatgtccattgacagggctgttttatgaagagaagcaattggttggctttggtgattgagcacagactttagagccaggtagtctgggttcaaatccctgccatgccacttactggctgtgtgaccttgggcctccttgtgccttgtgcattggtttttgtatttgtaaaattaaaaaagaaaagaatctcccttcamaaactactaagggttcatccatataaataaatttataccaatgtaaagctctcagaacattatctggctgataggaagtgctatgtaaatatcagctattattatgactgttgttactaccttcaccctcctcgtggttacaatctttggaaaatcccagttcaggctaccgttgtgcagtgctgagccacgcatgtggtctccctgcagtccttttcatgcttctttgtggaatt

SEQ ID NO: 599025 - DNA, 624 bp, Homo sapiens
caatttgtattattaatccaaatttgtctattaaaaacattgtgggaatttggggttctttttggataatatcctcagttttccctcttttcccacaaggccagatttaccgaaagtaaacctggctctttatagaaagtttgttgattcctgttaatcgcacaaaatggacaactgtggaaacaatcttcatgtccattgacagggctgttttatgaagagaagcaattggttggctttggtgattgagcacagactttagagccaggtagtctgggttcaaatccctgccatgccacttactggctgtgtgaccttgggcctccttgtgccttgtgcattggtttttgtatttgtaaaattaaaaaagaaaagaatctcccttcacaaactactaagggttcatccatataaataaatttataccaatgtaaagctctcagaacattatctggctgataggaagtgctatgtaaatatcagctattattatgactgttgttactaccttcaccctcctcgtggttacaatcttyggaaaatcccagttcaggctaccgttgtgcagtgctgagccacgcatgtggtctccctgcagtccttttcatgcttctttgtggaatt

SEQ ID NO: 599026 - DNA, 624 bp, Homo sapiens
caatttgtattattaatccaaatttgtctattaaaaacattgtgggaatttggggttctttttggataatatcctcagttttccctcttttcccacaaggccagatttaccgaaagtaaacctggctctttatagaaagtttgttgattcctgttaatcgcacaaaatggacaactgtggaaacaatcttcatgtccattgacagggctgttttatgaagagaagcaattggttggctttggtgattgagcacagactttagagccaggtagtctgggttcaaatccctgccatgccacttactggctgtgtgaccttgggcctccttgtgccttgtgcattggtttttgtatttgtaaaattaaaaaagaaaagaatctcccttcacaaactactaagggttcatccatataaataaatttataccaatgtaaagctctcagaacattatctggctgataggaagtgctatgtaaatatcagctattattatgactgttgttactaccttcaccctcctcgtggttacaatctttggaaaatcscagttcaggctaccgttgtgcagtgctgagccacgcatgtggtctccctgcagtccttttcatgcttctttgtggaatt

SEQ ID NO: 599027 - DNA, 555 bp, Homo sapiens
  misc_feature 197: n = A,T,C or G
tgttgcagggtagcagaagattttgacatctaaggctcagaactaaatataggggctctcttaaagatgtgtggaactccgatggttggatttttcacattgggttttctttaatcaygctaagactcttttaggggctgagtttctgcatgatctattattgttcagagtaagggaagaaggatggtttgatttanaagtggttaaaaaatgaattttaaaaaacagtatcatgttaacaatcaatacagaattgtgtctaaccaattacacaaacaactaaccaaagccaattaccataaagcttagtatgtaaatatacaaactcctcaagatggcaggattacaagtaagttgaaaaatgtaagagaatgggggacagactcttaagagtctctggcaggcactgtgctggggttttgcacacattgtcttcctttatcctcactacattcttaccatgtgtgttgttgtattccaattttactgatgaactgagctgaaattaactgaagcttatttctttgtgttcacaaagatgaagtatgaagttga

SEQ ID NO: 599028 - DNA, 555 bp, Homo sapiens
  misc_feature 197: n = A,T,C or G
tgttgcagggtagcagaagattttgacatctaaggctcagaactaaatataggggctctcttaaagatgtgtggaactccgatggttggatttttcacattgggttttctttaatcacgctaagactcttttaggggctgagtttctgcatgatctattattgttcagagtaagggaagaaggatggtttgatttanaagtggttaaaaaatgaattttaaaaaacagtatcatgttaacaatcaatacagaattgtgtctaaccaattacacaaacaactaaccaaagccaattaccataaagcttagtatgtaaatatacaaactcctcaagatggcaggattacaagtaagttgaaaaatgtaagagaatgggggacagactcttaagagtytctggcaggcactgtgctggggttttgcacacattgtcttcctttatcctcactacattcttaccatgtgtgttgttgtattccaattttactgatgaactgagctgaaattaactgaagcttatttctttgtgttcacaaagatgaagtatgaagttga

SEQ ID NO: 599029 - DNA, 582 bp, Homo sapiens
gcataactcccattttgtgggtggggaaattgaggctgtgtaayttgcccaaaattgcccacacagccagaaagtagcagaggtgaagtttgaacttaggtctgccagggtacttctaacacggtaccatcttgcctcctgggctggcctggcatctatagacacacagtgggatggctggacatgctattcattctttaaacttcttcccgtgacaccatactgatcccgagggggaaaaaatgttgagatgtttggagggatttttagcacccgagtatctgctgcctcaaatgacctgaaatgagaaccagcaaaagaaatgaggtcagaatttcaccctcataggatcttgctcttctttatcactttatctttcttctcgtacccctgaaaagcccttaaaaaggcaatttggtgatgcagattctgcaaaagataccatggaggttaatgaaatatgattaagctcaaaagcagtctttagagcggatgaggacctgtcagagatccaatgctccagcacctgttttgaataacccttcatttcccctgagccatgctgccacctttatcaaacac

SEQ ID NO: 599030 - DNA, 432 bp, Homo sapiens
aatgagggatgtgcgtggaggaacaaaaggacagaagaatcctaggccctggacatcacagtgctccccactcattctttcctttccaagtcactgttaactgcggatcagcagccaaaccctgtcctggttcttttgcayggaatttggcatagttcacaaatctaggttttatagaaggctctcaaatttagctcacactaaaattgagcatttttatcccatctcttactagatacttttccttatattaatctccctaggtaatgtgcaattccttggaaagaaatatattctgttcttctccttcctgcctccatgccacaatggtgtcttgctgagtgggcaagaagggtcagcactttatatgacttcctgagggaaggaaaagccaaactcttagggaagcccaggcagaatcttctgtcttct

SEQ ID NO: 599031 - DNA, 486 bp, Homo sapiens
agctcacactaaaattgagcatttttatcccatctcttactagatacttttccttatattaatctccctaggtaatgtgcaattccttggaaagaaatatattctgttcttctccttcctgcctccatgccacaatggtgtcttgctgagtgggcaagaagggtcagcactttatatgacttcctgagggaaggaaaagycaaactcttagggaagcccaggcagaatcttctgtcttcttggttgcagcttggcctcttacatttacagctgaagccttcggccagtgccagcatgagcaggtgccagatttgagccttgttcttagacgtggccccatggtagacgttctgagtccctacatttgccttactttcccacaacagggtggcaattcattcccactctactggctgtcactttagttgtgttgtgttccttgccctggaattcctttgtccctacctttctacactggaaccagaa

SEQ ID NO: 599032 - DNA, 595 bp, Homo sapiens
agctcaatgtttccctctgcccaatcttgttccacatcttgttaataggggtatcccctcctttccacaggtgttgattctaaaggaactctttaacaaacatccttaggctaaagttggtctcaggatctccctcccagggaacccaatttgcaacaggaccagccgtttctctgttactcttctgcactctacaggcccatcttctgattgtttcaccctacctcttctgtttccaccttcatcttgcaaccctttagggccagatggaatgaacaatttcctcttcttctagttaccttttcccatcagcagcaagtctcatggcttagctaccaaggatcaggactcagaaccagagcagagactgtctggaggggsctggggccatggagggagacactgtgccagggaagctgaaatcatggacaagacaaggccattgccagagacaccatttaaagcatgaagagagaaaaaccctggctcttcccgtattcccaccctctaggattttaccagttctccccattgactgaaactaactggaaaccagttagcaaaggagactgggaaatgtagtttgtggggatca

SEQ ID NO: 599033 - DNA, 436 bp, Homo sapiens
tggcttagctaccaaggatcaggactcagaaccagagcagagactgtctggaggggcctggggccatggagggagacactgtgccagggaagctgaaatcatggacaagacaaggccattgccagagacaccatttaaagcatgaagagagaaaaaccctggctcttcccgtattcccaccctctaggattttaccagttctccccattgactgaaactaactggaaaccagttagcaaaggagactgggaaatgtagtttgtggggatcagctctccgcaatacagaaccatggagaggaaaaatggggaagggatctgaaaggaagcaagccaatgagtgtcaaatgcattagcatattaaatsctatgtgcaggcaagccaagacatgtgtttaagtatttctcacacatatccggacataaaactttatgat

SEQ ID NO: 599034 - DNA, 605 bp, Homo sapiens
catagtacacggtatgatgtgcagatactggggttttgggatgggttgctgcactttatagagaaggaaggtcctttcattgccttctatccccttggtgatgttttcggcccttgtgggttgggtgatggcagcctattgtatctagcctggagcacgctccctcatcctctctgccactttgttccttgcagaaaacctggaagggctaagatgccaagttattttgcagtattaatcaatcagaataaaaccactctcaactaggctgaacaatagggcatcttgttaaaaataagaaaaaaattttaaaatgtctatctcacaatgaaaaaaatggctctggtaatgctcagtgtttgctgggagtgaattgtgccttctttctgggttttgtgggtgttggattcttgtgctgatatttttgtgcctgtaaaagatgtcaagtcctttgagcttcgtaaagatagaggargatgtaggaaagggagagtttagcatttgggacatttgtttgcaacctaaatgtttgtctgattgttttactagagcattgaaattcagccttgagcttttcatggtgagcaccttctttagtcgctgga

SEQ ID NO: 599035 - DNA, 467 bp, Homo sapiens
gttctgcccattttcaagtttccattttcttttctttatgaccttctggcacgtggttgagacatggaagcttccagtagattacagggtggaataaaggtgtttccataagtaacactgcaaatataattcattttactattgatcactgggaagatggcagtgaacagaacagacaaaacatccctgccctcttgaagctggcattccagtggggtggagggtttgggccaaagaatgacagaagatgaaagggcatttgtcctctccatgtttttctctaataagaggccctaggcgaagttctgctgatgattgtgtaaactgagcctcttgcacaatcccagtgcaaatcacactgtggacgatgtcagtggccctccctagagtcatccatcacctaacctgtttgaccataagctgcagtcctgaagawacagggcaggagctagtgttgggttacattg

SEQ ID NO: 599036 - DNA, 563 bp, Homo sapiens
cagtggttccaaactgcagattcaagagccaaacgctacccttcaaaatgtgtgttttgggrcattcatgtgctgttgaaaaatatttttgaaatggttatcattcaaaaatgggcagatttcacataaacatataaactttcaacttatattttaaatgggggaaaatctggtcacagtgggcccagatttgcatgtgtcaactgtcagccaagaatatgtatcttctacttcttgtctctctaatttgccatagtctccacccatctctactgcttcccacttgtcttccacttctctcatttatattccctgcctggtctctgcacacagttatgcttctgatacctgttgttgggatagagaagtcagcagaggccagattccctagacccttgaaggctgttttgtctttatctttaaagcaatgaggatctgttaaaccatttgaaagaggggaacaattggacttttgtgatttgaaaaagaactctctggtatataatatgctcaccagaagacaggacctggactattcatagttgtagaatttataagaattc

SEQ ID NO: 599037 - DNA, 559 bp, Homo sapiens
aaacatttaccagcacacaaactggcaaaggggattcaaggagaacattatagataatagggacagttcataaaaaggccccatggtagagagtaacatgacatatctgagaaattgaaacaagtttcattgagaatactaagaatctctacctcaaagcgttttaaggaccaaatagaataacccatataaactgtttcaaacagtgcctagcacatagtaagttcttaataatggtagtttagtttttttttaagttcagcagtgtccaattgyttccaatggtagcttttaggtgtagattgttaagaaacaggatggcagatactactagctccctacccaatatccactccatcccttcttcctcaacttaacagaactgcaatattgttcagagtagcaaggtactcagttacaatatttgtgatcccaggctctgtggagttcaagaaagccacagcactcagtgttgaccaaaaagacataactgagggtcttgggaaaaaccccctttctggatgctcttcataactggaatgtggacatggggcttgaa

SEQ ID NO: 599038 - DNA, 509 bp, Homo sapiens
aattgcttccaatggtagcttttaggtgtagattgttaagaaacaggatggcagatactactagctccctacccaatatccactccatcccttcttcctcaacttaacagaactgcaatattgttcagagtagcaaggtactcagttacaatatttgtgaycccaggctctgtggagttcaagaaagccacagcactcagtgttgaccaaaaagacataactgagggtcttgggaaaaaccccctttctggatgctcttcataactggaatgtggacatggggcttgaagctgcaacaggcatttttgcatttgtgtgcatccttgagctgctataacaaaataccatatatggagagccttccaaacaacaaaaaagtatttcccacagttctggagactggaaatccaagaccaaggtgctggcagattccatgtctgatgaggtcctgatctttatacacaactatattctcactgtaacctcacatggccgaaggggaaagcaag

SEQ ID NO: 599039 - DNA, 509 bp, Homo sapiens
aattgcttccaatggtagcttttaggtgtagattgttaagaaacaggatggcagatactactagctccctacccaatatccactccatcccttcttcctcaacttaacagaactgcaatattgttcagagtagcaaggtactcagttacaatatttgtgatcccaggctctgtggagttcaagaaagccacagcactcagtgttgaccaaaaagacataactgagggtcttgggaaaaaccccctttctggatgctcttcataactggaatgtggacatggggcttgaagctgcaacaggcatttttgcatttgtgtgcrtccttgagctgctataacaaaataccatatatggagagccttccaaacaacaaaaaagtatttcccacagttctggagactggaaatccaagaccaaggtgctggcagattccatgtctgatgaggtcctgatctttatacacaactatattctcactgtaacctcacatggccgaaggggaaagcaag

SEQ ID NO: 599040 - DNA, 629 bp, Homo sapiens
cagaactgtggtgagggtcaagtgggaaggggagaatgcaaacacctcaaagtgaaaatcatcacatgtaactataaatcatcatttgcacagacagtggaagtgctgtttccattttcttttatttttttctctgcctcactcttygttgagtattctgttaaaaacaaaacaaaacacacctctgttacccaagagagcaatatcaaaaaattaaaacctgctcttaaaaacacttgaccccagctacaatcactgctgggcttatgagggctcaccctgccccttcagcagttatttcttaagcctgtctaatgtttaggtagaagagcctggggattgagagagaccattacaggtgctgttggctctaggacccagagaggagtccatagatgcccaagttcagaggcagtgcttgcagcaatcttgttctctaagtgtcacaccgttgtaaggtgtgagaaatcctgagatttctcactgtcaggaacataatcaaatgagacttggaaataaaggaaaccctatgctcagacatgtatttttttgaggacttggagacactgatggaaaatatattgctaccacagggaataaccctatgggctggcagacattgggccctg

SEQ ID NO: 599041 - DNA, 601 bp, Homo sapiens
tgatttttacctgtttttcactactgattcccaaccaattagaatagtgcctggcacatagtaagcactcaataaatagttattgaatgaatgaatgaatgattgaatgaatgaatgacaagtgcccaactcgtgtctcttatattttctttcatctctagatctcraaacacctttatctagagaagaacaaatgtcttgcctagggcctctcataccatgaaatgcgctgtgtagtccagggaaggtgtgagctcgatgggcttaatttgtcttagaaatgcttcagacttcttcatacagtctcttgcagcagaagacctagtttggaggtgggggttgaggaagttcatattccccagatgatgcccaagaatgactttgagggcaagctctgaaaagcctcagcagttgtctgtggcttcagtgtgagagattccagagtttgcaaaccacaggaatctcactcctgggtggaggcgaaacttgtttgctaaattttccttccctttcacacctgtctcctcacctctttctccccaagggcccctccagcctcagctctggggctgacacctgctcctctgaggctaggtattaa

SEQ ID NO: 599042 - DNA, 570 bp, Homo sapiens
agtctcagggatgagcataataggctcatattatgattcctataatcctactcccattttccagggactgattgggaggtgaacagtgtcagctgatgaaatgaaggaagaaggctggtgaagacatgaggcttcctttccaggtaaaaaccttataagatggttgggtcactcttgtccctgcttcctgcaatttgggaatattatacctgaagctgctgcagctatcttgtgaccatgaggtgtaagtatgatcacggaaagccactatactaaggatgaccaagtaaaataaggaaagaagctgggcctttgatgacattgttgaaacactgagtcagcccaggaactgcctaccactagtctttttgttgaatgagataacacaygcttgaattaagatactgttaaatgggaatattgtcacttgtagcccaaagcattggtaactgatgcacttagcatttatccttactcacactgagccatggtctgtgcttggtgtttatacacattagctcactcaacccccacaacaacctgtttattgtgctcattgtacaaatgaga

SEQ ID NO: 599043 - DNA, 586 bp, Homo sapiens
gcattgcaggccatacattctctgtcacaactacccaactcagccattgcagtgcaaagacagtgcataaacaaataggcatggctgtgttcctataaagctttatttacaagaacaggcagcaagctgtttttggccagtgaacaaatccctgcttagatcatcttagattaatttgaaaacctgtatctctcttctgacatttttctggccaaggagcatggttggccatgctcagggaaamctggaggtgctagaaagccaatacccctggaaacagccctgaagcccctctgttggtagagctgatgcatgctctacccagtctcccagagtttcccagtgagactgaactccagctgcccacagctgtaacctgctcaatatcacacccttgataggccacttaccttccttgcctcccttcaaatctcccctaccaatatttcctgagattagttcccaaccttcttgcatttgtgccaagttctggttccagggaaacccagcctaagatctgggtgtttgatctaaccatagctgtggggcaattttgatcctcatatcattcattcactcagtcact

SEQ ID NO: 599044 - DNA, 564 bp, Homo sapiens
atagcctctccctcgcagggctcttgtgagcactcaaggaaactctgcatgtaaagaattcagcatggcggctggcacctagcaggtgctgggggcactcagctccatcactgtgtgaaggcatcttcaagagtccctggttggacataactttggaatgcagctgctgagctgcacactgcatataactgagcacattcctctgattccagctcacttctgggacccaagcctcttggactgcctaccaatgagaactggcatgggaaarggacacattccatcaaattatccttttttgcacatctcagacctttggtcttctaagggaattcccagcttccgggaggtggtgggttgcagctatggggatggaaacagttactctgaggccagacatggccttcgcctgctgagcagagagaggggctgtactccagaagagccacccaagttgctgaccgctctgttctcctgtgtcccccaaccatctgtgcagcagagggctgctaattggggtgctctggccccagacatcacagatgatgcaatccagggagttat

SEQ ID NO: 599045 - DNA, 577 bp, Homo sapiens
tgtggttaactcatgtaagcttcctaagccatgcttttctcatctataaaatggagataataatagtattctttcttattttacaaagctttgtgaatgaggtaggagatgtgggagaatggtgtaataccaggcaaattaaataaaattctcttattctaatttgccattcccaagtacctataattgatgtcaaggaggcagtccagaaacatacaaggcagtaaaaagaaatcaatttgatcaatttgagacacagaaatttccacaggaagaataaagagttggcccaatacctataatgcatttgaaagtaatcacttagaatttccttgaatatattaaatgagaattaaaaataatgtttttagtttacttggagctgcctgaaatttggtttgaatgcttataaagatggtgcatggcaggactgtgagatttctggatgtcttaaaaacaacacccttaagtcttaacaaggggaaagcctcaaatggaatcttaagtgatgttgcaaatagagcctttgtgtgtktgtgtttgtgtatgtgtgtgtgttggaggtgggtggaggagt

SEQ ID NO: 599046 - DNA, 541 bp, Homo sapiens
acaattttttagatttaattttttaaggaaaatttcatagtacaaagattaaacataggtcacttctgtggtttcaatgagtcccccaaagttcatgtgttgtaaacttaatccacaatgcaacagagttgagagatggaacctttaagaggtgattaggtcatgagggctctaccctcctaaaaggattaatgtcattattgagagactggcttatttataaaaggatgagttcagaccccttctctcactctctcaagtgcctgcgagtgcgtgctctctctctcttcctccttctygcacatgtcgtcccttctgccatgttatgacacagcaagaaggccccacaagatgcctgccccttgatctgggacttaccagcctccagaactgtaagctaaataaatgtctgttcattaaaaattacccagtctgtggtattctattgtagcagcacacaattaaggtccatcatcatatgctctgatatttcaaaacaaatcatttctactatactaaatactcaggagattgatgaaga

SEQ ID NO: 599047 - DNA, 599 bp, Homo sapiens
gttttcattcccaactctttctccacatcttccacaataataaaaattttagctgggcacagagaaacaaagaataagaccatattttcaagtctccttgcatttatgtataatcatgtgrctatgttttggccaataaaatgtaaataaaattattacttagcagttttctaaacccttctgaaaaaacaactgatgtgttgtttcaccatctcttcctccatactactgcctggaaccatcttaaaccataccatcacatacagctgagaaacagcgtagaaagagcttcagtcctgaacgttgtgaaggtctatactgagcatggaccattcatttgggtgagggagacataaacttctcctttgttttaagccattttctcttggtctttctgacacgtatagctgatgtaattctaatgcataagtatttaggcaaagtttctgaggctgggttcttgcttgtgtttcctcattcactctctgtagtttgtttctacatcctttgcgattttcccataactttcctgtgcttctacaggaggagtagatgatcctgtctgacgcattgactttggactttggccaatggaatga

SEQ ID NO: 599048 - DNA, 599 bp, Homo sapiens
gttttcattcccaactctttctccacatcttccacaataataaaaattttagctgggcacagagaaacaaagaataagaccatattttcaagtctccttgcatttatgtataatcatgtgactatgttttggccaataaaatgtaaataaaattattacttagcagttttctaaacccttctgaaaaaacaactgatgtgttgtttcaccatctcttcctccatactactgcctggaaccatcttaaaccataccatcacatacagctgagaaacagcgtagaaagagcttcagtcctgaacgttgtgaaggtctatactgagcatggaccattcatttgggtgagggagacataaacttctcctttgttttaagccattttctcttggtctttctgacacrtatagctgatgtaattctaatgcataagtatttaggcaaagtttctgaggctgggttcttgcttgtgtttcctcattcactctctgtagtttgtttctacatcctttgcgattttcccataactttcctgtgcttctacaggaggagtagatgatcctgtctgacgcattgactttggactttggccaatggaatga

SEQ ID NO: 599049 - DNA, 594 bp, Homo sapiens
agaccactttttctggctgggcaagttgaggaaggcttcaaagaggaggtaatgtttgtcaatattattgaaaaattgccagatccatttcatgcattcatgaaataaacaccactattcggggccaatacctagaagcctttaatgctttgaaaagcacctaaaaatcatttctcaattgcatattatttgatcttcagttttgtcatctgcctgcacttggtacaaattctgtgtcattctagaggtaattttgcaaggcaagccagtcagtattgtgacagcagatgatggaaaaaggaatgctgccttcttttgtccctgcaaagaataagagggaaggggagcgggtgggggcacatgcaaggattctattgctttttcatctttctgttatcattgtctgtgtcagctcctcaatgtagggggaccatttagtctttgcatctacaaaaaacaagccatttttttctttttactaacctaatttttaaaaatcatttaattgggcccagagcggcgcaatggaaggatayggagtttgggaaaaataaaaccaatgagtgaaccaggacattttgtgttctttaagct

SEQ ID NO: 599050 - DNA, 570 bp, Homo sapiens
cttgctaaagctggacaatgcagagataaacacagaagcccaaaagtcagggcctaattgagaagagttcagaggagcctgaaaagagcttggtcaaggagagaatcattgtcccataacgatgtttttagttagatacatactttgcagttagttatgctatgttgatagagttccatgtgagtgtgagtgtgtgtatgtgtgcatgtgtaggtatgtgtttgtgttttccataaagaggacataaaatgtattttacactgtaaatttcagtgtgtatcttttcaatggaatgtcaattcagtgtttgctaatagctcacagatttatgtttgtgaaaaaagaaatactggttgttagaaaaggaagttgttatattgttttctgagatgaaacagttataagrtacatagaaatcttacctttaatgcaaactttatgttttaatccttcataagatttgacggtcagctgccaggtatacatcattaccagcactgtagtaatcaattttaaaatattttagtgttaggagagattaatcatttgtttaggttttttttttttttt

SEQ ID NO: 599051 - DNA, 572 bp, Homo sapiens
actttcaagtaaacaataaggtataacttacaatttgagagacaactacattttattttccttacgcagaatgctataagcaatgatttttgccaaatgctatttgaacatagcaacatttacaaaaaaataaaactacttagtattaagaaatttgtttcactctttttaaattatatcaatgaaattcaagcatctatacttgaagggaaaaaaatctgcaaattcaaatgtatacacattcagaacatgcattttgttatagtaaatggastttttaatgatccattcagtgaggaaaatttgtttcccagcaggaattccatagatttcaaaactctctgaatgcacaataataaaattactcaagctcaggtattgccttttttattattttttgcatctgccattcttccatgaaagcacattcatttattctgtcacctaattatcatcatggcaagttatgataaaccaaatagcttgggtagggaatcaaagataacatgtttgtacacagaaataatcttatctgtttgccttcttctccagacacatctcagccattttat

SEQ ID NO: 599052 - DNA, 602 bp, Homo sapiens
atttaaacatggttcagtctacaaacatttattgactgccatttgtgtgcctgtcattgtgctataatgctaagaacgtggaaaagatattccagacctcaaagatctgcagagctacaatccagtggcgaacscagccaagcaatcaatcccattttattaccgttgtaagggaatatgctggacacagtgggagtaacgaggaagaatacacaacccaatctgaagtggggcagggagggcttgtcacagaggctggcacctccactgtccttggtggctaagatgaagtaaggtagtctgagaagatgaaaagttttgttgttgttgttcatttgttctgaggtaatagcaaccgcatgaacagaaagatgacaggcctacaacacactccatacagctggcgcagaatttggtgatttccattaatcaaggcaacagatgcttatcttaataatttagtagtttctataagtctgtctatattcttcatttctatatgtataaatttataaagcaaaaaacactaccaacatcaattgatgttaatatttctgtgtatttctgttcattgttttttcaaagtagctacataaatttta

SEQ ID NO: 599053 - DNA, 546 bp, Homo sapiens
tgtgaaaattatgactgaaagccatgttttctttcaatcaaataagatctcacattcttttgagaaccttcaaacaatggactgactgcgattctgtcagattaagttcaaaatagcatgttgcaaggtaagagctttttttttcctctctctctgctttttcgttgtttgcttgtttagtgtgttcatccattttgttcatttctttaagattttttaaattgtttttaaaaatatttttaaaacagtgaaaaatatactaacaaagaccacatagataaatgtatatamggccagtttttaaaacatttttaaaagaggcagtgcagtcagttcagcaacatgtcgcctgacatccttaagtacacattgtcaaattgacccatacggttccaaataacacatcattgacaatcagcttcataagcatttagacatttttgaaccatccattattcttttgataacttatgatgacttttttgtaagcatcacaatctataattttctaaatatatactcccattttccctacctaaagatttt

SEQ ID NO: 599054 - DNA, 598 bp, Homo sapiens
tttatattttaataaaacagatatttttcaacttttctctctgctagtccttatccccataatgcctaataaaaactggcatttagatacagattgtacattatgcagaagrtaacagatgagcttatcagctgttttacaattacaagggtaaatttattgataaaactgtgcaacatgaactaacctgactcttgtcagtaacatgtgacaatatcagttttctgactagctacctgtttgtagtgctccttaaactgcaatgaaacaaatgacttctgtaacattaaaacaatgggcattggttaaaaggctcagaaactatttcttttccacaaacttacaaaaggcttgttttaaatttagtgttttaacctcaaatatatttttcttacaacttctttagtaatatttgcaccaaaatgtacttattgtgccatcttcagggcgtttttaggaaacagctccatgaagtaaattagaaattactttccttggtggggttttaaattattactttaaagctatagaaggttttgtttatgtatagttatttaaagttttaaaatattagctaaaatctataaagcaaaataat

SEQ ID NO: 599055 - DNA, 598 bp, Homo sapiens
tttatattttaataaaacagatatttttcaacttttctctctgctagtccttatccccataatgcctaataaaaactggcatttagatacagattgtacattatgcagaagataacagatgagcttatcagctgttttacaattacaagggtaaatttattgataaaactgtgcaacatgaactaacctgactcttgtcagtaacatgtgacaatatcagttttctgactagctacctgtttgtagtgctccttaaactgcaatgaaacaaatgacttctgtaacattaaaacaatgggcattggttaaaaggctcagaaactatttcttttccacaaacttacaaaaggcttgttttaaatttagtgttttaacctcaaatatatttttcttacaacttctttagtaatatttgcaccaaaatgtacttaytgtgccatcttcagggcgtttttaggaaacagctccatgaagtaaattagaaattactttccttggtggggttttaaattattactttaaagctatagaaggttttgtttatgtatagttatttaaagttttaaaatattagctaaaatctataaagcaaaataat

SEQ ID NO: 599056 - DNA, 579 bp, Homo sapiens
tcacatattatcttatttagtatttacagtgttcctctgaggtgttacagcagaaacttgtatatccttttaaaaatgagaaagctcttatttaaagacatgaattactgttcaaagtttcaaagactgaattatatagccaagattcaagactacatctttttactacaagtaaaaaattatttctactattatagtgatatataatatccttaaaatcaatgatgaaaattatacataatttttaattacttttgttcaataattkttaaaacatctatactgaaagttggaataattcctggatatggtgactatatatcagaaaatcagacatttaaatatgtagctcaattcttttatcatttctgaactttatttaactaagaaatctatagtgaaacaaggacacatttgaccaatggaaaattatggtagaattacacaaatcaatccacagatgaatacgatacaaatgaattgctcatgtgataaaaccagactatacagcaaatacaaatctgctgttcttagaccactaagaagccctaaagaaaaccaacacgattctttagcgtc

SEQ ID NO: 599057 - DNA, 383 bp, Homo sapiens
atactgcttgtaaggaaaagtggttccttagcaaaaaacgtaaattaagtagaaaaagaaagtgtaattcaacagcaaatttatgcatttacttatattgaccctgtttccaaaatgatttgagatgacttcaaaaggaattaaggatttttttcaagttaatttggaattaagtgcattagygatcaaacacttagaatcatagaagagtagtttcagtggtaactctggtgtgcacaagaataatggactgctgggtccaaggtccttagactcaaacagcaggttctaactttggtggaggcaacccatagtcatcagagctattaaccatctgaatgtaagagacagttgggatgatctttgctgttgttgctgtgagc

SEQ ID NO: 599058 - DNA, 596 bp, Homo sapiens
cactagctgaacagaggtgccgagtttgcttaatgcatgaagttctggcacctctgcctgaacttaactgtcacctgaatcatcagactggaatgtccgtgataaatatattcttaacttggcgagccacagaaattttgggttgtttttttcagcatcaaatataatttactgtgaggttgtttgtttcagcatcaaatataatttactgtgactcgtacagattctgaggattaacgagaggagattctgcttyacttttcaaacttatttttctgagcccactttcctctagaaaaagttgagatcgctgacattattttataaacaagtaactgaacatgagggaaaagggttcagaggacaaggaagactccagaaaaagagacttctttcagattttaaaagatagatatcatatgtaaatatgtaaatttaatcctgaataaggccttagaaaatctcttatttttcctggtttcttcacaaaaatgaaaatagatggggtcactaaaatatgtaaaagtaatgtaccgcagcatctcatctcattcctggcaagtgtttgtcaccttcattttggggggatatattta

SEQ ID NO: 599059 - DNA, 603 bp, Homo sapiens
gttgaaaattatgattgttaggtagaactttcttaaatttagaggaaattattttcttgacggttaagctctgtcctaataggaaattgttttctgtgtcagccagttctactgctggacagctataataattaggtaggatttwtatatatatataatatatattacatatatatttatcaaagtctttttttatttaatttttgcaaggcctacactcaagaaaaggttagattaaatgtattccactgttcacgtgacaattcttgaaatatttgaagacagctgtcatgtcccctgagtctactatctagccctaaatatggtttctcaaccattcattataggaaacctttatgacaccatttgaagaaattgattgctctcctctagataccttaatgtataaatgcctttttaaaggtacaacaagaaggacgtttggcatgccagatggggtacaacggtttctgagtatatgaggattattcttcctgggtgttatacttctgttaccacagcctgggactgcattagtttttttagagattgaatcaagcaactggatcctctaaactccctaggatgtttttctccttcctc

SEQ ID NO: 599060 - DNA, 603 bp, Homo sapiens
gttgaaaattatgattgttaggtagaactttcttaaatttagaggaaattattttcttgacggttaagctctgtcctaataggaaattgttttctgtgtcagccagttctactgctggacagctataataattaggtaggatttatatatatatataatatatattacatatatatttatcaaagtctttttttatttaatttttgcaaggcctacactcaagaaaaggttagattaaatgtattccactgttcacgtgacaattcttgaaatatttgaagacagctgtcatgtcccctgagtctactatctagccctaaatatggtttctcaaccattcattataggaaacctttatgacaccatttgaagaaattgattgctctcctctagataccttaatgtataaatgcctttttaaaggtacaacaagaaggacgtttggcatgccagatggggtacaacggtttctgagtatatgaggattattcttcctgggtgttatacttctgttaccacagcctgggrctgcattagtttttttagagattgaatcaagcaactggatcctctaaactccctaggatgtttttctccttcctc

SEQ ID NO: 599061 - DNA, 568 bp, Homo sapiens
aaggtctttggtgtgctaaagacctttgaatgtgcactagttttggagtaagcaaactgctattgtrttttttctttattgtcagtgttttaagaccaatttattcaagccatcagatggcttctttgtacttacataaaatgaagtcatgtatgcttcaaaccaatcctctatttattatttatttgcatggagctttattcacactattattattattattttcttcaaggataattggggtgcaggaatatttaggatttggacaaaaaatttaaagacctgatatttactgactttactcaagttgatattctatctttctagcttaactcacattttgtaacattttaaaggattattttcaaaataaagaatatatacaaagttagaggaccaaacagcaaaaagttttctctttccattagggaatgctggattccattacggtaagacattttttgatgaagtaaagcagtatattcaactgtcagccaaaaggcaaaaacttctatttcttttcttgttattgatcttcttggaagcccgtatcatttgcaaaaatata

SEQ ID NO: 599062 - DNA, 628 bp, Homo sapiens
ctcttacttcacatttattacaggttggctggatcaaaattccacatcttcctcattcctggatcccagttggcagagtagccactctctacaacattgctgatcattccagcagagggagaaaaaatagcaaaccacacacattctttttttttttttttttttgagacagagtctcacactgtcgaccaggctggagggcaatggcacaatctcgactcactgcaacctctgtctcccaggttcaagcaattctcctgcctcagcctccckagtagctgggattataggcgcacaccaccacacccagctaatttttttgtacttttagtagagacggggtttcactattgtggccagacttgtctcaaactcctgacctcatgatctgcccaccttggcctcccaaagtgctgggattacaggcgtgggcacgggtccgctaagccacacacattcttaaagctcctaccagtagcatatatatcacatctgctcacatttcactggttacaagtttaataataaggaagtttaacaatgggtgggagaacctgcttgattacacctcgccctgtgatatagtttgtctgtgtccccacccaaatctcatattgaattatagcgc

SEQ ID NO: 599063 - DNA, 628 bp, Homo sapiens
ctcttacttcacatttattacaggttggctggatcaaaattccacatcttcctcattcctggatcccagttggcagagtagccactctctacaacattgctgatcattccagcagagggagaaaaaatagcaaaccacacacattctttttttttttttttttttgagacagagtctcacactgtcgaccaggctggagggcaatggcacaatctcgactcactgcaacctctgtctcccaggttcaagcaattctcctgcctcagcctccctagtagctgggattataggcgcacaccaccacacccagctaatttttttgtacttttagtagagacrgggtttcactattgtggccagacttgtctcaaactcctgacctcatgatctgcccaccttggcctcccaaagtgctgggattacaggcgtgggcacgggtccgctaagccacacacattcttaaagctcctaccagtagcatatatatcacatctgctcacatttcactggttacaagtttaataataaggaagtttaacaatgggtgggagaacctgcttgattacacctcgccctgtgatatagtttgtctgtgtccccacccaaatctcatattgaattatagcgc

SEQ ID NO: 599064 - DNA, 494 bp, Homo sapiens
tgaagcttttatgtgttgtgcttttgtgaaaattggaggaaaggatgaattttttttatgagagtttgtggcaatggagatagactttgcacacaaagagtctgagtggtggtggggtggggggtactataaatgagactatgagcctcaagaatttacagacayggacagggagaactctagactttcacaaactgagactggtaatgttaaaagataaatttgggcacattaaaagttttaaaaatttatttgaactgttgatttaaaaaaaagactcaaactctgtaaaatattttaagagatttattccgagccaaatgtgagtgaccaaggcctgaggcacagtcccaagaggtcctgaaaacatgtgcccaaggtggtcgggtcatagcttgattgtgtacagttttaggggaacagaagttgcaggcagacatcactcagtacatgtaaagcgtacactgctttggtctgaaaaggcaggacaactt

SEQ ID NO: 599065 - DNA, 582 bp, Homo sapiens
tcacattcaaggtaacagaggctgagcttgtttatcactccttttgtcttcagatcccggcctgtgattaatattcagaagaccatcacagtgactcctaacagaattgacctccgccagaaaacagcgtgtggggcgcctagtgggatatggtgagcrtccctctgtcttggtgggatccccctcagtttcccacctccacttcatgatgactctattgtcctgaggagccacagggaagatgacaggagtgctgggcagaagggaagagggtctgtcaagtgtttttataacatgttgatcatcgaatgggcagttggggggattggagagctagggaacatgttgggttttttccactgcaataatggatcttttaagaaatatgtgtttgattttattcagcctccaggttaaatcgctgttttgaatatactgctaaccccgctggttataatcctgcaatatgtaagtacctagtacctttaaaatatgtctactttctgtctgccaggttgaaagttctgcataaatcacagaaaaataaaactgcagtggccaacatgggtctgtcaattctgg

SEQ ID NO: 599066 - DNA, 601 bp, Homo sapiens
tttctcatgactagatatctgtggtccattctagcaacaacatttttacaatctggcaaattattctttaactaaggtcaatagtcttcaaataatagatgtgggaaactaattacaattattggaatattaggggactatttccaagtgacttgattctgcayagatgtcaattcttttattttgtggagacttggcagaaacaaaaggctaattgggaagaaattgtagcctcctagttgtagccttggtgtattaaatagatcccctttggcttagtgagatagataattcattttttctagctcatttgagaatttttgttgtgctttgtttctctctccctccttcttcccccaggctcaatgacagccagaggtgacctgtcccagcacacctgggaaggacatgggaatggggtggggggagtccagtcaagtcaacagctgcttactgcacatgctaaaagggcactagataaatagcaagggatacctacccagagaactgcccctcccaggccattctggagaacttccacctcccagaggtggaatccagccagtacttcctagctggctctgaaatcggatgcatggtt

SEQ ID NO: 599067 - DNA, 601 bp, Homo sapiens
tttctcatgactagatatctgtggtccattctagcaacaacatttttacaatctggcaaattattctttaactaaggtcaatagtcttcaaataatagatgtgggaaactaattacaattattggaatattaggggactatttccaagtgacttgattctgcacagatgtcaattcttttattttgtggagacttggcagaaacaaaaggctaattgggaagaaattgtagcctcctagttgtagccttggtgtattaaatagatcccctttggcwtagtgagatagataattcattttttctagctcatttgagaatttttgttgtgctttgtttctctctccctccttcttcccccaggctcaatgacagccagaggtgacctgtcccagcacacctgggaaggacatgggaatggggtggggggagtccagtcaagtcaacagctgcttactgcacatgctaaaagggcactagataaatagcaagggatacctacccagagaactgcccctcccaggccattctggagaacttccacctcccagaggtggaatccagccagtacttcctagctggctctgaaatcggatgcatggtt

SEQ ID NO: 599068 - DNA, 603 bp, Homo sapiens
acactattgggtatgctccattttaagaatgtaacacaaggatgacacattttctaaaaataataacaacaacaaaaaaatcctttcaacttcaaagaagccttttggcataaaaatgatgattggtaaaaaccctttggtaacatacatgattttttggtagcttctgtactctagggccagtgtttggcatcagggatagaaaaatgaccaaggcatggtccctactctgaaggaactaaggatttaatagtaggcatctatgtaggcaaataaatcacagtgtccctcartgtgagataagagaaagggatatgcagactgttgactaggaagggagagctggggcagatggaaagagtgtctacttaatgcccaccttcctctttgaatttatcgtaagtgtaaccaaacctagattctgctacttgcttcccaaaagccaaaacttgagaggcaagagttggtgggaggaaaagcaggtttattcggagatccagtaaacaaagaagatggtggactagcattctaaagtaccatattaagacagtacaaatttcaggctctttttatgttaaagacagagggaagaagagaggtttg

SEQ ID NO: 599069 - DNA, 558 bp, Homo sapiens
ctttgagctttaatttctttatctgtaaaatggagatattactgcttactggggttattatgaggattaagagataatatgcaaagtgcttaatgcctgyctggcatgggtacttgctgactaaatggtagctgttaatgatcatttaaaaagcagtaattgtgtacctactgtgtgtcaggtaccttacaaggtgtcttaaacattctgtgattctaagattgcctgagagtaaagccaaaggtggttgtttttgggtaatgatattttaaactcagtcatatttatgaaacccatgttcaaagcaacttaactttaataggtcttaattagacttataacaaaagtgagtttaatgaacagaggactttgaggaaggagaagtaaaatatcagatgcatgggacggtcagataaaagcacgatcatagaagacctatcataaatgtttgtagttcaaattttctatagtgcctttaactattcagtcacattttaaactccagttatgacttttgcagaataatattgtgtcagagagccccaaaacatgtcgggt

SEQ ID NO: 599070 - DNA, 593 bp, Homo sapiens
gagactacgtccacttcccactgctgcagtacgtaatctttaccatcctcccaggagccagcgggggtgctacacagatccccagatcccatgctatggctcctaggctcacccccggagcaggtaagcagccttcccaccatcctaccgaaagagttaaatatatccaagattcccttactatccttgaagaaataaacctgccgctatcaattcacaagtgacttcacacgtgtactgcacacttccatttgacccccacacccctgtcaagttgctttcagaaagatctctattccacagtcatccttctctgtccagcctcataacaaccaaccacctcagcaagtcccgagtacccactgcagtgtaggtcagcctgtatttctggggttaggttctaaagtctgcctttagggcaaaagccaggtgaaatttrcaaacactcatgaaaatcccttagctggaaccccccgcctttgaaaaatcaaaaaccaagaattaacgtcttgtgcgtttctttgctaagcttacagattccgtttcctcagaggcagaagacaccaaggcctgagcaaggaagggcaaagggt

SEQ ID NO: 599071 - DNA, 587 bp, Homo sapiens
actgcccaaagccatttacagattcaattatattcctatcaaactacaattcttcacagaattagaaaaaaaaaactattttaaatttcacatggaaccacaaaagagcccaaatagccaaggcaatgctaarcaaaacaaaaaacaaaaaagccacagagctggaggcatcacagttcctaacttcaaactatactataaggctatagaaaccaaaacagcatgatagtggtacaaaaacagacacagagaccaatagaacagaatagagagcccagaaataatgttgcacaccaacaaccatctgatcttcaacaaagttgacaaaaacaagcaatggagaaggctttgtattcaataaatggtgctgttataactggctagccatatgcagaagattgcaactgaaccccttccttacaccacatacaaaaatcaactcaagatggactaaatacgtagatataaaacctaaaattttaaaaaccctgaaagatgatctaggaaataacattctagacataggttcagcaaagacttcataataaagatatcaaaagcaattgcaacaaaaccaaaacctaaca

SEQ ID NO: 599072 - DNA, 587 bp, Homo sapiens
actgcccaaagccatttacagattcaattatattcctatcaaactacaattcttcacagaattagaaaaaaaaaactattttaaatttcacatggaaccacaaaagagcccaaatagccaaggcaatgctaagcaaaacaaaaaacaaaaaagccacagagctggaggcatcacagttcctaacttcaaactatactataaggctatagaaaccaaaacagcatgatagtggtacaaaaacagacacagagaccaatagaacagaatagagagcccagaaataatgttgcacaccaacaaccatctgatcttcaacaaagttgacaaaaacaagcaatggagaaggctttgtattcaataaatggtgctgttataactggctagccatatgcagaagattgcaactgaaccccttccttacaccacayacaaaaatcaactcaagatggactaaatacgtagatataaaacctaaaattttaaaaaccctgaaagatgatctaggaaataacattctagacataggttcagcaaagacttcataataaagatatcaaaagcaattgcaacaaaaccaaaacctaaca

SEQ ID NO: 599073 - DNA, 587 bp, Homo sapiens
actgcccaaagccatttacagattcaattatattcctatcaaactacaattcttcacagaattagaaaaaaaaaactattttaaatttcacatggaaccacaaaagagcccaaatagccaaggcaatgctaagcaaaacaaaaaacaaaaaagccacagagctggaggcatcacagttcctaacttcaaactatactataaggctatagaaaccaaaacagcatgatagtggtacaaaaacagacacagagaccaatagaacagaatagagagcccagaaataatgttgcacaccaacaaccatctgatcttcaacaaagttgacaaaaacaagcaatggagaaggctttgtattcaataaatggtgctgttataactggctagccatatgcagaagattgcaactgaaccccttccttacaccacatacaaaaatcaactcaagatggactaaatacktagatataaaacctaaaattttaaaaaccctgaaagatgatctaggaaataacattctagacataggttcagcaaagacttcataataaagatatcaaaagcaattgcaacaaaaccaaaacctaaca

SEQ ID NO: 599074 - DNA, 587 bp, Homo sapiens
actgcccaaagccatttacagattcaattatattcctatcaaactacaattcttcacagaattagaaaaaaaaaactattttaaatttcacatggaaccacaaaagagcccaaatagccaaggcaatgctaagcaaaacaaaaaacaaaaaagccacagagctggaggcatcacagttcctaacttcaaactatactataaggctatagaaaccaaaacagcatgatagtggtacaaaaacagacacagagaccaatagaacagaatagagagcccagaaataatgttgcacaccaacaaccatctgatcttcaacaaagttgacaaaaacaagcaatggagaaggctttgtattcaataaatggtgctgttataactggctagccatatgcagaagattgcaactgaaccccttccttacaccacatacaaaaatcaactcaagatggactaaatacgtagatataaamcctaaaattttaaaaaccctgaaagatgatctaggaaataacattctagacataggttcagcaaagacttcataataaagatatcaaaagcaattgcaacaaaaccaaaacctaaca

SEQ ID NO: 599075 - DNA, 575 bp, Homo sapiens
tttgctttctgtggtttcactttccaaaatttcagttaccctcagtcaatcgcaatccaaaattattaaatcgaaaattctagaaataagcaatgcataaattttaaattgtgcaccattctgagaagtgtgatgaaagtgtgagggagtgtgagggagagcaaaggggcaagtgtaatatgcaagtatttgcctcatgcattgggagagtggtattcatcagaggtggcagacaataggaggagtaggttctaggaaartaatccttcttgctttccttgtgcttacctggcagcctccccagttcttatctaatattcctcttgatctgagttataccagtaaacgcaaacttctctgttactaatcaaatgtgatagaagagtttcataaaacaagcatcaggaggttctgaacgagaacctaagggaactgttataaataaactacacacactttattccaatggatttaagaataaaagtatgttgctgactcgaagccttcttttgcttccttctggaacctagccttgcaggtttctgatattcttatagaacgtaagggaatcagaa

SEQ ID NO: 599076 - DNA, 575 bp, Homo sapiens
tttgctttctgtggtttcactttccaaaatttcagttaccctcagtcaatcgcaatccaaaattattaaatcgaaaattctagaaataagcaatgcataaattttaaattgtgcaccattctgagaagtgtgatgaaagtgtgagggagtgtgagggagagcaaaggggcaagtgtaatatgcaagtatttgcctcatgcattgggagagtggtattcatcagaggtggcagacaataggaggagtaggttctaggaaagtaatccttcttgctttccttgtgcttacctggcagcctccccagttcttatctaatattcctcttgatctgagttataccagtaaacgcaaacttctctgttactaatcaaatgtgatagaagagtttcataaaacaagcatcaggaggttctgaacragaacctaagggaactgttataaataaactacacacactttattccaatggatttaagaataaaagtatgttgctgactcgaagccttcttttgcttccttctggaacctagccttgcaggtttctgatattcttatagaacgtaagggaatcagaa

SEQ ID NO: 599077 - DNA, 402 bp, Homo sapiens
ttatcactcccacctatttgtttccaaaacggctaggcctggctggaggaacttgatctctcccacttctggttttcagacttccattggcttttaccacctgctgtgtatccctgacattatactgcaagacttccttggaggggtaccactagatggcttaaggggtacctcaagatggtttaggctccattgggcactgctttttagctgtctccctctgctcagacagagagggcaagcrggtcaccaagttcattgcctatgccacgaggaaagagatgctagcctcccttctttcaggcatgcccactagctacaattgtttctgtcagagccttccttacttagttgttggaagagaagcaaaagacctagtactgtgtcaaattaatgatttaa

SEQ ID NO: 599078 - DNA, 519 bp, Homo sapiens
tttattcatggatggacttcyttgtagatgttaggtcaaaaaaaaatgaggctagtctttcaatttcagattttctggtctagtagggtggctctggaaacaactgtcattttggaggaagaaattacaggtaaaatcttgtgacctttccattgacatgaaagtgctgaaagaaagactttagtgagggcaagggagttgaaaatgagaaagacatgtcagtttatccatggagaagatctacaaacatctgtaaagactacaaaactcttttaaaggttatttctgcttagactacataaaattgaaagcattcaaacatcttcccttgctgacaaaggctgcattgttgacactaagctttccaaaaataatttcatttgacttgaggacaaagggtttcatagaacctgaattcaccctgaagtagcttggtgaaagctcaggtgtcttgataaacgtctgctctgctccgactgatagggaatttaattctgtttgatactgaaagctgtgtga

SEQ ID NO: 599079 - DNA, 519 bp, Homo sapiens
tttattcatggatggacttccttgtagatgttaggtcaaaaaaaaatgaggctagtctttcaatttcagattttctggtctagtagggtggctctggaaacaactgtcattttggaggaagaaattacaggtaaaatcttgtgacctttccattgacatgaaagtgctgaaagaaagactttagtgagggcaagggagttgaaaatgagaaagacatgtcagtttatccatggagaagatctacaaacatctgtaaagactacaaaactcttttaaaggttatttctgcttagactacataaaattgaaagcattcaaacatcttcccttgctgacwaaggctgcattgttgacactaagctttccaaaaataatttcatttgacttgaggacaaagggtttcatagaacctgaattcaccctgaagtagcttggtgaaagctcaggtgtcttgataaacgtctgctctgctccgactgatagggaatttaattctgtttgatactgaaagctgtgtga

SEQ ID NO: 599080 - DNA, 519 bp, Homo sapiens
tttattcatggatggacttccttgtagatgttaggtcaaaaaaaaatgaggctagtctttcaatttcagattttctggtctagtagggtggctctggaaacaactgtcattttggaggaagaaattacaggtaaaatcttgtgacctttccattgacatgaaagtgctgaaagaaagactttagtgagggcaagggagttgaaaatgagaaagacatgtcagtttatccatggagaagatctacaaacatctgtaaagactacaaaactcttttaaaggttatttctgcttagactacataaaattgaaagcattcaaacatcttcccttgctgacaaaggctgcattgttgacactaagctttccaaaaataatttcatttgacttgaggacaaagggtttcatagaacctgaattcaccctgaagtagcttggwgaaagctcaggtgtcttgataaacgtctgctctgctccgactgatagggaatttaattctgtttgatactgaaagctgtgtga

SEQ ID NO: 599081 - DNA, 425 bp, Homo sapiens
caaatgaatattctaaatgaatctcttcctcttaactattgtttaaataattgcttatgcttgacaagatatttttcatgaactatcaacaatgtgatttgaatcacactcataattacaaactcctcaaccatagtaatttataaattactgccctctcatgggactgtcttcaaacatttaaaacatttattattgagaagttctgttgagctattatagtgtattcataattttctaagaccttamatttcttccaaccttgtcatctggctattttaatttttagttttcattgaaatatacttgataaaattctttgtcacatttggaggaaagacatattttatagcttgtttagaaaaatctaatttactcagttaatgtctagcattctcaattctctcaacatgcggcagtagttg

SEQ ID NO: 599082 - DNA, 425 bp, Homo sapiens
caaatgaatattctaaatgaatctcttcctcttaactattgtttaaataattgcttatgcttgacaagatatttttcatgaactatcaacaatgtgatttgaatcacactcataattacaaactcctcaaccatagtaatttataaattactgccctctcatgggactgtcttcaaacatttaaaacatttattattgagaagttctgttgagctattatagtgtattcataattttctaagaccttacatttcttccaaccttgtcatctggctattttaatttttagttttcattgaaatatacttgayaaaattctttgtcacatttggaggaaagacatattttatagcttgtttagaaaaatctaatttactcagttaatgtctagcattctcaattctctcaacatgcggcagtagttg

SEQ ID NO: 599083 - DNA, 534 bp, Homo sapiens
ccaacaaatatttattaaatgcttattatttggctgatatcatgctaggtactaattttctgttatgattataatagacattttctacyttcagtctaataaggtagatgactattacttaaatctttaattaactttaataagatagatagagatccacaaattatagatttgaaactgttctgttttgagagcagtaggctgtattctattacatttttgccccctttggatctcatgtgcaaagaacagaattggaatcaacatgacctttagtttatggcacatactcatcattatacatttatccgtgagttccttggttttattatttttatacacacacacacacacacacacagagagagagaaagagagaaagagagagacagacagagagacagagagagagagtgacagaaacaaattgaaatctcccactgagacaaaagctgggaacacaagtagctaggatcaaaactatgtgccacccctgttccccaaactcattcccttggctctcacagatgagtt

SEQ ID NO: 599084 - DNA, 624 bp, Homo sapiens
tgttgaagcctattcacactgtatgtgagacccaataatgtgcattttgtctcaacatcactttcagttatatcacattggtatcttttgattgaccatggtggcagtatttaaaccattgggattggtaaatactctattccaatttttttttctccctctagagagccacttgttaaacatttaccagcataccacaaagtatatgatgacaataaaataggatgttgtgatgaaatatacagcagggaaagaggttactttagagtggtcagggaaaaagtcacattgtacttaatagaacattttttaaaataacaaatctgcactgcacttgaygtgtatgtactgactaggacacaggactagagatggagttagaagtaggagacattcatatttttatggagtttacaaaacaattggaaaataaaagcataaaattaattacaaaatgatatatcaataataaacaatactataaatttatatgtgttaaagggatacagaaataaaaaaggtaagtgtggattgtgatgactttctggaggcaatttatgttgacttccagaagaaacttagaaatatttactttcttgcatgtagataggagaatgttttacc

SEQ ID NO: 599085 - DNA, 570 bp, Homo sapiens
tataaatttatatgtgttaaagggatacagaaataaaaaaggtaagtgtggattgtgatgactttctggaggcaatttatgttgacttccagaagaaacttagaaatatttactttcttgcatgtagataggagaatgttttacctttgagcagagagagctactctttgcaactttgaatcagaggattgctaagtagaccaggaacttcttcttcttcttcttctttttttttttttttttttgcattcctgtatgtgttttatttcatttttatttttataaaataaaaggaatctaaggaatttcataraaaactaaagaaagaggaggggcaaaatgaatataatagagtctcagtgtggctggggaatcttaccatggtgaagggacaacactgccacctgatacttggaaaggacattaatgatagctaggacttgtttgtttgggacgctggctttatttaaaacatggttaaaatggctttctcttgaggagcacctcaatatctgacttctatccctttaaatatagcttaacttactccttccatcagcaaaatttatc

SEQ ID NO: 599086 - DNA, 647 bp, Homo sapiens
ctgattgccatatgtatcagtgtcttctgtttttgagaatataattaaaaacagaacaagatataaatccattatggaaaattatataaacccttagacttacacttggcttgcatttcactaggtatactcatgtagctgtggcatattaacattccaaccttgctttaggctagtgccaacagtctgtagaccagcataaataagttagaagaatgttcctcccaagttaggattaaatygaatcattggcttttcactaatgtttaaagcaatcactggtaattgggcttggtgagttccacaaaatataaatgatgcttttttggaccagcacaggatttcaagacaaatattctattcatttgagataaaccacacatttctcagctagaacagaagaaggaccattacttggtttacatattctgtttttgtaaattaaggaaaaatgttgcaataggaaacatggagagatgcatctggaagtttggtgaaaggctgtttaataataatatacagcaacaatgctgtgtaattgtggaagcataagtcttatcttttaatgctgtatttatcatttctcttttttatcctaattactattaggaaaggtagacaggacaggtgttgttacatcagtcctg

SEQ ID NO: 599087 - DNA, 498 bp, Homo sapiens
tcaatttattcattctttgcacaatacttagtcactaattgctctctttcttgtttgtttattgactttctcttccttagagaatacaagccaagtgagaacaggaaatttttcttcttcactgcaataccccaatgcctagtacagtgcttggcatatagtcagtatattaagtgtttgttgaatgaacagacaaataagtagttatcaaaaaaaaaagataaactaaatatagtaasatattctatgatggttttaaaaaataaacatttaaatttcaaagtattggttggcacttcatcttaatctagtgctgttttgacaaagctgtatgaattaagaaagataacatgttatcttgaatcagtcaaaaacaatttctaacacccaggctgaaagaactccagtttgaaggtgctattttctcatatgaaactgtgctcattatacttcatttataatctaactaaacacatttccttggtatgctaatgctct

SEQ ID NO: 599088 - DNA, 614 bp, Homo sapiens
caggttacaaaagataggaagaggtccagtttgatgtcatggtaaaagatgtgggtgggttaataagtttgatttcagacaatgttgtttgagtcattttgtgatctctaggaggagatgttcagtagacagctgcatatgcaggtctaaagctcagagggaaaatgtacgctataaaatataatttgtgagttatttctttgtcagaagaagctttgtgtatactttaccctctaggagagattgagaatgagaaaatgagagaattttgaggggctccaacatctatttatgtcatttataagcccagccttaatcatattgaacctattgagccaagacatctttttaaaaaaattaaataactcacatatactcctttttaaatggattatatttaggggaaaacaaatacaataaaaccccaaatttttaacaaatgattttaaagtaaaagtaattcctatacactrtagaaaatatgtacaatatagatacatataagcaagaaattaaaatgatttataattccatgccaaaggacaaccactattaacaatctatcatacttacttttaatgtttattagttttttaaatcaagccaatcattac

SEQ ID NO: 599089 - DNA, 600 bp, Homo sapiens
gatgctgacttaaggctgatttctattagagttctatttcaagttcattatttcaacgactgaatagactctcacaaataatgatttagttctctgctttcttgtagattaaactagataattgatatagaggcagtaaatatgcataattaaacatactttgtttatagaggtagagtctaaatcaagttctaaggtttgatctacaaaaagacagtcaatgtgtcggcttaaagaagggagaaagagagcacataatcacctatccaaaggtgcacataaacttagccaagccgcaattaaccatagattttatttggcttgaattatccagatttcccaggccctttgaccttctattctgatgagtgtttaattatatgtcctaatgaccataatggcactgtcacccaaggaagagagaaagaagactcataatgacctcattggtagtaacatgtgaaaacatatcttgatgtagtctatatgatgtggcattttgacatagtcctcttaacatagaaaaattactttaaagcatttttttaakgatcaagttatagacacaacagacatctctggtcctcaccctatcctata

SEQ ID NO: 599090 - DNA, 461 bp, Homo sapiens
aaatgattttttttatttgccaggaagtagacatgtgttttcattaggaacattgttggaaaatccctgcaaagaggaacatctgcatcattatcactactgtcagaaaaattccctggcatgcaaagcactgaatgcggcttgtctcaagtagcagagatgctaactcattaaaaagcccagacctgaaaatgaactaaacttcatttaacttttggaagtgatatgccaggttcaattatagtatggaaaaaggcatcaaaacgcaacattttttaatgtgaataatatttcataagacattttctctctaaaagagaaagtaggtcagttttatcaaagtgaaagaagatgtgaatttgaatacattattaacctgtctttggggatggcaaaaatctgcctttgtayttccatcaccttcaaattaaatcctataaaaatctaagttagtttgtaaa

SEQ ID NO: 599091 - DNA, 466 bp, Homo sapiens
cctgctgttggataagaataaggatgcctgcttatataatatctacccagtttttatcatcttacttaaagatgaagtaggaaatcaaggcctacatctaacaactgagcaatggagaagagggatgagattaacaatagctgtgagaaatcaaggaggtcttccttgaaactggtagtttagcagctgtcatattagacaacaatgtagtgtgatcacaaacatggtcaggagttacagtgctgaamtgtccactttggggctgaaaggtgacacagattctctgcaagatgatggatccagtgcatagtgttttatgtgagaaaggacaggcagcttccctctgtatctcagatgagggaaaggatttaagacattgctatgtgatctggagaggtagatgatgataagttcccttcctcaaaataagtggacatacagcctttcagaggatagagaatgtttc

SEQ ID NO: 599092 - DNA, 667 bp, Homo sapiens
ctgtcaggtttgtggcctatgtctcccatgtggagtttaaatcactatgggccatttcttagttagtttcctaaattataattcgtgggtcagacaagaggtaaggtattaaagggccttaatcaaggattcagcagtggtgttttaaaaagggtgtgcatgtgttgtgtgcaggtggggggatttgtaacaagtgacaaagataactaatcttcctctcttgaaattagatataatagaatctaatatttgtttctgttatgtagacatattcttcaaagactaaatttaataaagatgaaaggagtctctcacttttaattattttacataaawgatactacaggatatttaatggatacaaagctttatcaaaggaaataagcagtgagactactctatcaaaagtagtaggtacttgattacatttgaatatggttcaaactgatctctaagtaattgacttggagttccttttgaaaactatgaaagcattttgttgactctattatactcttcttaatttttttttctgtcttattatccagtgaacctactggcacaaataatgttttcagtctggattttcttttttagtttttgttgtttcagttatgaaaaactcagatagaaatgaaagatataattcaaaattgctcaaaccata

SEQ ID NO: 599093 - DNA, 562 bp, Homo sapiens
ggaaataagcagtgagactactctatcaaaagtagtaggtacttgattacatttgaatatggttcaaactgatctctaagtaattgacttggagttccttttgaaaactatgaaagcattttgttgactctattatactcttcttaatttttttttctgtcttattatccagtgaacctactggcacaaataatgttttcagtctggattttcttttttagtttttgttgtttcagttatgaaaaactcagatagaaatgaaagatataattcaaaattgctcaaaccatatggtttccaaatgttgctgcataatggaatcacctggggattcttaaaacatagtgatgtctggctcccaccccaacattctgatcaaattgcaatgggctgagagctgggcattgagactttcaaaagcactctatgtgattcccatgtgcagcacagtttgggaaccactggctcaaacactgagaaaaactaataacatgaaagttcaaggtaaaraaaatctaaggaattagttcagagaccattttttcatgaagaacaccaggtt

SEQ ID NO: 599094 - DNA, 570 bp, Homo sapiens
ttcaattggcatctcttccaagaagatttttctaatttcctcaagtgatgtgttatctcccctataattgaaccccattttgatatttgtgtccctttttagctttttttttaacttgttttctattagaggtgttagtgtcctactcatcttgcttttcctacagctagtaagtggacatccaggaggtacaaggatatatcccagacctggccagtcatgctaccatttcccataataatctccttaagaagtgagcaccagacccaagtcattcagakactacctgtaagatataggcactgagggaaagagtctggtttttcttttagatgaagagctataagaatggaatcgagactaggagaggaacatccaaaggagagaaaatgactgcagtgggagagaacaagagctacgatcaaaaagaggagagacaagcagcactgaggaagacagaagggtaagaagaggtaagaattctatcaacactgagatactgagacctggatctgtcctgttttggaagtaattgattctctctctcttttttttttcttctcaagctca

SEQ ID NO: 599095 - DNA, 541 bp, Homo sapiens
acctactatcttgattcaaatcttcctttcattgtcatccacttacttggaaaatgcattwtaacattaaggaaagaacaatggacttggaagtcaacagtccttgtttctagtcctaaaattgtaactgaaatttttgaaatttgtttaatttatctcagcttcagcatctttatctataaaatgagtatttggactagtttatcttttctggctctaaagaataaatgctctgcctaaaaggattgttcatttatcaagagagctattaaattaatagaacacaaaaaaaggctatggaaaaaaagtgatagagggcaatgtgagttctagagagaatggattccatagagtgttacaccaacctggctttttagaggagaatggaaaatgaagaatgcttaaagagtaggaagaaataaagaggatccctatttcaagggaaactagtaataaatataagaaggtaaaagaaaaagaattatttaaaagtgttctagacatacagccaaatttaaattcttctgtgtgcttgatatta

SEQ ID NO: 599096 - DNA, 471 bp, Homo sapiens
gacttactcactatcacaagaacagcatgggaaagacctgcccccatgattcaattacctcccactgggtccctcccacaacacgtgggaattcaagatgagatttgagtgggaacacagccaaaccatataatcattatataaggactttgtctctttttgcagtttttgacttaaagtctcttttatctgatgtaagtatagctactcctgcttgcttttggtttccatctgcataaaataccttttttcrtcccttcactttcactctaaatgtgtctttacaggtgaagtttcttgtaggcaacatatagtggggttatgttttgttttaaaatgtattcagccagtgtatggattttaagtgtatatcttttaagggggaatttaatccatttacattcaaggttattattgataggttaggacttattctcgttattttgttagttgctaatctggttcctttgt

SEQ ID NO: 599097 - DNA, 602 bp, Homo sapiens
gttatgtgctctgcagaaagatgatcccaccacaatatattagctctcttctagacacatatgtaatcacccaaggttcatcttgccaactgctcagaagagccaatgcaccaaggacagtgggtttttgcaacagagtgtttaataaatgcagagccagctaagcaagaggacaggaggttattatcactcaaatcagctccctgaaaatttggacgctagggatttttaatgatagcttggcaggcagaggcctaggaaatggggaatgctgattggttgggtcagggatgaaatcacgcagtggggggtcraagctgtcttcttgtcctgagtcaatttctgggtggggcccacaagaccagatgaagcaatttattggtctaagtggcaccagctggtccgtcagaatgcaggatctgaaaaatacctcgaacaccaatcttagattttacaatagtgatgttatccagctgggaggttaggatcttgtggcctctggctgcatgactcccgagtcataatttctaatcttgtggctaattggttagttttacaaaggcagtctgatgtacaaacaaggaaggagtttgtatcctttg

SEQ ID NO: 599098 - DNA, 528 bp, Homo sapiens
gttgatttttttgtcctccaactttgctgaatatgtttatcagttctaatcattttcttgcggagactttaggtttttccaaatagaagatcatatcatctgcaaaccaggataaactgatttctttcttctcaatttcgatgccttttatattttcctattgtgtgattgctctagctaggcatgttgtgcttccattatcatttgtttcaagaaattttttaattttcttcataatttcttcattgatccactggtcattcaggrgcatattgtttaatttttatgtatttgtagaatttccaaaattcctcttgttattaatttccaattttattccatcgtggtcagagaagatgctttatattatttccatttttttaaatgttttaagacttgttttgtgatgtaacatatggtctaccctttagaatgatccatgtgctgaggaaaagcatgtgtattctgcagctcttggatgacatgttccgtaaatatctatgaggtccatttggtctgtagtgcaca

SEQ ID NO: 599099 - DNA, 563 bp, Homo sapiens
tccattgtaagttatttgtttctattctcttgctgcttttaggatcctttctttatccttaacctttgggagtttgattattaaatgccttgaggtagtcttctttgggtgaaatctgcttggtgttccataaccctcttgtacttggatatttatatttttccctaggtttgggaagttctctattattatctctttgaataaactttctacccttgtctctttctstacctcctgtttaaggccaacaactcttaaatttgcccttctgaggcaattttctagatcctgtaggtgtgtttcattgtttttcatccattttttcttttgtctcctctttttattttcaaatagcctgtctttaagctcactaattatttattctgcttgatccattttgctattaaagaactctgatgcattcttcagtatgccaattgcatttttcagctccagaatttctgcgtgattctttttaattatttaaatctctttgttaaatttatctgatagaatcctgattcccttctcttgggttgaaattctttgagtttcctcaatat

SEQ ID NO: 599100 - DNA, 544 bp, Homo sapiens
tctgtcctattttgcataataccaatgtcctcaataaacatatcaaagcagaaaatgkgtgggggaaatgccaataagaagtttctcatatagactttaaataatttctaggccctagcaatagaacccatttgtgcctgtgctttccttattctgaattggcaatccctttctatgcagttcaaattttatattgtattttttttctttctggcacactgaagaatggcacaaagctacaaagcttctttgccaaatccctcaatcctccctgatggttatctccattatcctgtcctcaagaaagcaacaaactaaattctgaggtgtttttggctattatcaaactctaggaaaaccaatgataaaaacaaaatgcaaggaggttataaaatcagaaataatcccaaaagctaattcttgtcttcacagaaatagagaagccctagtttttcttgggttatctcctcttagttcttctgggaattagctctccccccctttattttttattcttaggttattttgaccttaaatatggaaa

SEQ ID NO: 599101 - DNA, 621 bp, Homo sapiens
agatccgcacttcccgctgctgtgttagaactcttgccagccacaagggaatagagagctatttgagaaattgccctctccagcctctaataattatgtaaagcgtatcatcgaggacctgtaattggtacagaaggctacggctagaaaacgagactattactctctacaatcttcttaggataaatgatacatttatcttaaaggaaagagaattgtaatacrcacgaacaggatgtaaaggaaagcaacttccttgaatggaggatgcagcttaagatattactattcagcagaactgacaccaattggaaatgaacaataatgaaatgtagaagttacaagaaacaaaagccttaacagaaaaaaatgtaaatggattataaaaagagaagttgcaagtttcacataaagtttagtcttggatacaagacctacccaatgattacccacaaacaatttcttgggcagaaaggcaaagcagaaagaaacaatatataaaacagaaaagaacaaaaaataatatgacttacacaggtgtagaagaatattttgaaatgccatctaaaatatatataattcctggcaattttgtctcaaaattctccactctttgaagct

SEQ ID NO: 599102 - DNA, 621 bp, Homo sapiens
agatccgcacttcccgctgctgtgttagaactcttgccagccacaagggaatagagagctatttgagaaattgccctctccagcctctaataattatgtaaagcgtatcatcgaggacctgtaattggtacagaaggctacggctagaaaacgagactattactctctacaatcttcttaggataaatgatacatttatcttaaaggaaagagaattgtaatacgcacgaacaggatgtaaaggaaagcaacttccttgaatggaggatgcagcttaagatattactattcagcagaactgacaccaattggaaatgaacaataatgaaatgtagaagttacaagaaacaaaagccttaacagaaaaaaatgtaaatggattataaaaagagaagttgcaagtttcacataaagtttagtcttggatacaagacctacccaatgattacccacaaacaatttcttgggcagaaaggcaaagcagaaagaaacaatatataaaacagaaaagaacaaaaaataatatgacttacacaggtgtagaakaatattttgaaatgccatctaaaatatatataattcctggcaattttgtctcaaaattctccactctttgaagct

SEQ ID NO: 599103 - DNA, 586 bp, Homo sapiens
tacttgattccatttttacttacctaaaatgtctattgaaaaatgatgggagttaatcatacttgattctatttttacttttctaaaatgagataacagttataaatgtgttttgaaaatgtaaaagtgatagggaatgtgagctgttggttcataatactactagtaatcttcaaatcatattattgaagtactgtatggcagtagggtagaaaataaatggatgatgtggccttaaaatttgaaaggtgaactcagtgtcaacaattccaagtatcatgcctattcattagttttaatttttttagtttagcctttggcagtctcytgctctctttaacctaatactatcacatatggcatcatctatagttatgattatatctaaaattcacaaggcctgcaattctataatttattaaagcctgtagaaaaggtagtgtgtgaatgttaaattaagataaaataattgcctcaccacaaagctggtaatttatgtcatcttgggactagtatttggtccattttggaccctgaggcatgggagtcccaaattagggcaagtccaggatttgacagtgatgtg

SEQ ID NO: 599104 - DNA, 482 bp, Homo sapiens
gcattaaaatagatgagtgttgcatacagactcttaaggtggcctgcatagcacctgtctcctggcattcatgcccttgtgtgatcccctccccttgagtgtggatagcacctgtgacttgcttccaaccaatggaacagggcaaaggtgagaggatatatgtgattacatctacctaattatgtgattagtgtataaatttgtagtgtctgtccttttggcactctcttgctctcgctgtcttgtgcgctctctctctctctctctctctctctcwcacacacacacacacacacacacacctggttttgagtaagtgagcaacctctacaaactaagggcaagccccagccaatagccagtaagaaactgaagccctgcaaacattctgagtatgcttagaggtagactctttccctagttgagtttcagatgagaactcagcccaggtggcccctcgatggcagccttgagagatccga

SEQ ID NO: 599105 - DNA, 624 bp, Homo sapiens
ttttctcccattccaaaggctgacttttcaatatgttgattgtgttatttcatgcatggaagcttttaattaagatgtagtcaattttatctattttaacttttattgcttatgtttttggtggcatatcaagaagtcattttcaaatttaatgtcataaaactttttctctgagttttcttgtaagagttttatagtttttgctgttatgtttaaatattatatccatttcaagttaatttttatatayggtgtaaggtaagagtccagcttcattcctttacatgctggatattgcttttcccaatgttactttgtctaaaaagtttttcctttccccatgaaatgttttgacacccttgttgaaatcatttggtcatatatatgagggtttatttgggcattccttattctgttttattggcctctgtgtctttctttatgctagcactgttttgattactgtagctttgtaataagttttgaaactggaaagtgtgagatcttcagatttgttagtcttttcatgattgtttgtatttaatgcaatccctattaaaatatcaacagtgctttctgcagaatttgaccaaaaaatccatgctaaaattcatatggaatatc

SEQ ID NO: 599106 - DNA, 554 bp, Homo sapiens
ttctgttttattggcctctgtgtctttctttatgctagcactgttttgattactgtagctttgtaataagttttgaaactggaaagtgtgagatcttcagatttgttagtcttttcatgattgtttgtatttaatgcaatccctattaaaatatcaacagtgctttctgcagaatttgaccaaaaaatccatgctaaaattcatatggaatatcaaagaacccaaaatagacaaaacaatcatgaataaggagctcctaaataaaccctcacattcaatttcattctcatattcaattcatgaatatgagataccttgycatttatttgtgtcttctttaatttcttctggcaatgttttttagttttcagtgtacaagtggttacatttatttctaaacattttattcttcttgatgttattataagtagaattgttttctttatccttaagcattttttattaattgagaaatggtagtatactcttcaggaactggcttaggaggtttgatcttcagtctttttgctattgttttctctacactattacta

SEQ ID NO: 599107 - DNA, 615 bp, Homo sapiens
tgctttctggtattaatttttgcattccacttctatttaaatcattttaaagttctgtcttcccaagaaaactgtaatttttgtgggctcagggactgagttctatgatctgggtacactgcagacttacaacgtatctttgatagctaactgaaataaaattaacataataatgttggactaatcttttgagcctcaaacattaatactctttatactagctgagtataatcagtaggtcaaggagaatctctatcttgcaggaacatctattctgaaagacagaaaagcctgaacaagaggactctatwtaattctcttaatgaagtgcacaaaggactactggcatgtaataaactccttacctaccagtccttcgagggtggaataatttggtgtctaggtagtctaaacctctactcctactcctctcccagaaaaactgtctgtttccattaaactggaatattcatcattgtccaaatttgcatcacacattgtgcttctgaatcttgattcacactatttctcatgcccgctattctcttgcttcaatccaacaatgctcacatctccctccctgcaagaagtattcctcatcaagaggctttgaag

SEQ ID NO: 599108 - DNA, 575 bp, Homo sapiens
ctgccgcgtctctctctctcttccttctgctccggccatgtgaagtgctagctctcccttcgccttcttccatgattgtaagtttcctgaggcctccccagaagcagaagctgctatgctttctgtacatcctgcataaccataagccagttaaacctcttttctttataaattactcagtctcaggtatttctttatagcaatgcaagaatggactaatacaccatatcatgaaacataagtcttcagaagttaaaaaaaaaatctaaaacctgccagatataaaaagaatcagcactgtggtatatgaactatatattaatggaagcaatgcataatcataagattgtcrtcaacagacacttgttgtgcaacaattatgtaaatgtactggggcagaatcgatggataagtccaaagccctggcctgaaaaacaaatacacattccattttaaaagatgctgggtatattttcttctgaaaaggattggtactttgactaatagctctcaggtcttacttttgcaatcacacagtaatagcatttaaatttgccaaaagaataactgatgaa

SEQ ID NO: 599109 - DNA, 587 bp, Homo sapiens
gtcactcttcaattcttccctgatgaagtctcagattttggaacagaaagaacatatgtcctctgtgtcccatccaatttcctgacccactgtgtctgtgagcataataatatcattgttattaagttttgggatagtttgtttcacagcatagttaactggacaaattgataaggtaaacttgacattttaatgacagagcattattgtcggctccaaaggcctgaacaaagcctttccttttccgtagaagcagtatttattgaaaaatttagagaawaaatttacacatttagagtaggcatcattatagcaactgtcactttgaagcaccagatgtttttttatatatattttactgttactggttggtgcctgtaccaccttttgtagtagatacgaatccctggcttcctggaatatatccagatttttagttgaaagaaacacaaaccttgcctgatcagccaggaagagattttattataggataaataaataaattctatagctcacagaattgtcagggagggttggaatttaatataggaacagttgagtgtaaacttacaggaacaatcctagaa

SEQ ID NO: 599110 - DNA, 587 bp, Homo sapiens
gtcactcttcaattcttccctgatgaagtctcagattttggaacagaaagaacatatgtcctctgtgtcccatccaatttcctgacccactgtgtctgtgagcataataatatcattgttattaagttttgggatagtttgtttcacagcatagttaactggacaaattgataaggtaaacttgacattttaatgacagagcattattgtcggctccaaaggcctgaacaaagcctttccttttccgtagaagcagtatttattgaaaaatttagagaataaatttrcacatttagagtaggcatcattatagcaactgtcactttgaagcaccagatgtttttttatatatattttactgttactggttggtgcctgtaccaccttttgtagtagatacgaatccctggcttcctggaatatatccagatttttagttgaaagaaacacaaaccttgcctgatcagccaggaagagattttattataggataaataaataaattctatagctcacagaattgtcagggagggttggaatttaatataggaacagttgagtgtaaacttacaggaacaatcctagaa

SEQ ID NO: 599111 - DNA, 635 bp, Homo sapiens
  misc_feature 594: n = A,T,C or G
taaacttacaggaacaatcctagaaccatgcattagaactggtctgatgagaaaaaactgcaacctgtgctgttgcctgatgaacataaaggaaatccctgtactgactgtccctgattgttggatgcctctgctgccaccaatgccagcaaaatagttaggactccccctaaagcttgtcttcttagatttcttgcttccaaaccaaagattcaggagcaactgactaactggcaaaacctcctgcaggtgcmtgtatcctagctggaagggagtcttggaacttgagttttctagattctgctgttaggaagccaaatcaagaaggctgcaaatttcccaaatatagcaagggtgtaaaaaggtgctgggtaccttgaaaacttgacagttatgtatgagctgggttgtattaaaagaagacaaacagaagtctggctggccacaacaatgaagatggtgcccaaaagcaaaactagagtcacctgatagagtactcggttgtgcctccaggctgagatgttaaactctgtaccaatttatataggtcaagacaaaccacttgccccagcacaaccttactcaatcttattntacttccaagtctctctcaacaaaatccctacctggcataa

SEQ ID NO: 599112 - DNA, 578 bp, Homo sapiens
agatgtacgagagatgcagagtttctatggtgtgtctagagcactgtacttgtagattctacttgccagccatgcatgamagttcaggttactgacctagacctctgcagccatattctgtgttagaattattctaaacatcctccagactccttgtgaaagataactttgtaaacgacaagttgtacattttgtcctcatgtttcgctgttttatcctaaagttccttgagactctcaagtgtattccaaccactcctggggatttatttatgtccaatatgtcaattagaccgagaacatcatggattcttcacattaatttgccctctctgcttattttagccttcaggtttccttaataatggccacagtaaggactcaaatacaaattttaatctttgtattctttagttttaccattttgaggggcagatgattgccttctcttccctccaccccaactatattttgtagatttttctgttcttggagtggcacggtagaaaaatgagaagctttggagtaaaaaatctctggatttgaatccctgctgtcattttgtgtctctgtgggtaa

SEQ ID NO: 599113 - DNA, 578 bp, Homo sapiens
agatgtacgagagatgcagagtttctatggtgtgtctagagcactgtacttgtagattctacttgccagccatgcatgaaagttcaggttactgacctagacctctgcagccatattctgtgttagaattattctaaacatcctccagactccttgtgaaagataactttgtaaacgacaagttgtacattttgtcctcatgtttcgctgttttatcctaaagttccttgagactctcaagtgtattccaaccactcctggggatttatttatgtccaatatgtcaattagaccgagaacatcatggattcttcacattaatttgccctctctgcttattttagccttcaggtttccttaataatggccacagtaaggactcaaatacaaattttaatctttgtattctttagttttaccattttgaggggcagatgattgccttctcttccctccaccccaactatattttgtagatttttctgttcttggagtggcayggtagaaaaatgagaagctttggagtaaaaaatctctggatttgaatccctgctgtcattttgtgtctctgtgggtaa

SEQ ID NO: 599114 - DNA, 311 bp, Homo sapiens
gttattattgactgcagtcaccctgttgtgctatcaattagtaggtcttagtcattctttctgactataagagtagaatatattgttaactatagtcaccatgttctacagttgacctgacaattgaccctctcacccaccctggagtgcagtggtgcgatcatagctcatcgcagtcttgaacttctgggctcaagtgattctcttgccttagcctcccaagtaagtrggactacaggcatgcaccactacacttggctaactttttattttttatttttttaagatagggtgtcactatgccacccagc

SEQ ID NO: 599115 - DNA, 529 bp, Homo sapiens
cagttccagccagtggactatgtatttcaagaaatatgccagagataagagatttgaactacaaaagcctttgaggcagcaataattttctggatttgatctgcagagtaacagggagtttgataaaggtcagcattttctaaaatgctataaacaggtcttatattttatttttcagagacagggtctctctctgtcacccaggctagagtgatcatagctcactgcaaccttgagctactaaactcaagtgatccttctgcctcagcctcccaagtgkctgggaccacagacccacaccaccatacccagctattttttttttatttttaatagaaatgaggtctcactgtgttgcccaggctggtctcgaacttacaggctcaagcaatcctactgcctcagcctcctgaagtgttgggattccaggtgtgagccaccacacccagccctaaacagacctttaaaaattattttatatggtcagatcatattattgatgactgatctttgtcgacctagtgtagat

SEQ ID NO: 599116 - DNA, 607 bp, Homo sapiens
  misc_feature 599: n = A,T,C or G
ttattgatgactgatctttgtcgacctagtgtagatctcaattcaagaatatttatggagtgtcaagttaataagtataatgatttataaaatagtctctgatatttggagtttatagactgtttggatggataggacatgtactcaaaaatcatggtgtatattgaggacatgaagagtattttaaagaagaaaaagagaaaaaaaattgagtatcatyacttttggcaggggtggaagagaagccatgagatccactcgggatccacacatgtgaagtgcttagagggcccctggttgaagatactctttgtcaatggtggagatggttcatgtgattaagcaagatcttgccaagtgttggagagggaagggcatgccagttgaaagaaacagcagtttctgctcaaaaccttctagtggtggcacagctccctcagaataaaattcagcagactcaccctgccttactgggctctcagtacaattcagtgtggtccttggatctctgctcctctgagaactgctatgggtctgtgaggagacaggttcagaagctttttgtagcagtagttattgcactgacattttaattgcantacttgga

SEQ ID NO: 599117 - DNA, 565 bp, Homo sapiens
acaacttaaaatttgtggctaaacatctgcttaaatccttcggtgcatagatgcaaaagttggttcaattcaattctacaaacaccactaacaccattctgtacaagccactgtgcttatgctgggaaatcaraaagaaatgagccaaagtccctgccctccaggaaactcatatttatttaaaggagacagacatgaacacacacaactgcaaggtaatgtattaaatgccttaatcggagcatatacaatgtgcagtggttacgcagattgattctgccctggggattggctttattaaaacatctaacaaattaataaacaatactggttgatttcatttcatcattccctgtgcttaatgtgttttgtatatgaggctgtttgcaggggctattgagctgaagtacagagcagtcactgatcatcatagtcttgatattctgtttacagaagccatgcccacatagtttgttctgttactgaaaatgcaaataaaagtgatacaattataaattgcaacacttttataaagaattataatttttataaaaaatttataatt

SEQ ID NO: 599118 - DNA, 569 bp, Homo sapiens
atacctaactcattagtctgtatgaggatcaaatgacataatccccccacctttttttttttttttttttttgagatgaagtctcgctgtgttgcacaggctggagtgcagtggcacgatctgggctcactgcaacttccatctcccatgttcaaacgattctccttcctcagactccggagtagctgggattacaggcacacaccaccttgcccaggtaatttttctgtatttttagtagagacggggtttcatggtttcatggttggtcagcctggtctcaaactcctgacctcaagtaagccatccrccttggccttccaaagtgctgggattacaggcgtgagccacagtgcctggccaacataatccttttaaatttttttttaatagctagcacatttgtaagcctttgatatattttgtcttatctattaaggcttttccctctactttcaattcttacactttcttttttaatgtaagagatagataaataatgttgtgacttgttttacttggctacacacagtacccaaattcatgctgatttttaaattccaatatta

SEQ ID NO: 599119 - DNA, 519 bp, Homo sapiens
ctttttttaagagggggcataatttttttaaattactggaaatgtatatgatagcacaaaatcatataataaaaaatttaacatcctttacttcatgttggactttcattagcttagtctaaaagaggccattttggtaaaagtttccaagagcttttttttccccaaagccctctcttaatcccttgataaacaaatcattctcttttgacatgtttataktaccactattgtctacttttcatcttcaatttttaactagtccaattctgtccttatatttgagcagtctgtctgcatctcatcaatctcattaaactgaacctttctgcaagattttcaatttacactattcttcattgccaagaagagtaatcagtaatagcatgtatttgtggcctttcctaacaattcatagggtcaaattttaaagtagttagtttataagcaaattttttcatgccataaaaatttttgcttcgtaattcatttaatagagatttccacatcgtcattatt

SEQ ID NO: 599120 - DNA, 519 bp, Homo sapiens
ctttttttaagagggggcataatttttttaaattactggaaatgtatatgatagcacaaaatcatataataaaaaatttaacatcctttacttcatgttggactttcattagcttagtctaaaagaggccattttggtaaaagtttccaagagcttttttttccccaaagccctctcttaatcccttgataaacaaatcattctcttttgacatgtttatagtaccactattgtctacttttcatcttcaatttttarctagtccaattctgtccttatatttgagcagtctgtctgcatctcatcaatctcattaaactgaacctttctgcaagattttcaatttacactattcttcattgccaagaagagtaatcagtaatagcatgtatttgtggcctttcctaacaattcatagggtcaaattttaaagtagttagtttataagcaaattttttcatgccataaaaatttttgcttcgtaattcatttaatagagatttccacatcgtcattatt

SEQ ID NO: 599121 - DNA, 668 bp, Homo sapiens
attttcttcttaacacctttctctggaactggaggcaatgaagttcctggggaaatagaagtggtgaaaaacaaaaggtctttccctgacataaaggaatgtttaagtaaagactgaaataattaactaccaattagaaacggagggggctttttgttttagtttgagtttttaaatgcttctgctaaccagaatagtattttagaattggaagtaattttcaagatcatgcaatcaatttctttcacttctggttatggaaactaagattcagagaactgatatgatagccccaaattgcataggtagttagtgacaaagctgggatcagaacccagtactcttgactcatgaaagatttttcctatttacaaaggtagttactcttactgcttgctatgtaacaatctctgcctaagttttcctattgctctcctctccacaagagatgatagataggtataacagttatctccattttacagagaaggaaactgaagatggttagagaagttaacatactttgacaaaattaaaaatcagttaagtagagatgccaggattctgatcatttctcactctggagtctgagattttaaccaaggggcaatactgcttctttgaattaatagtgcattgccatayttctcagctgaaaggcaaatgag

SEQ ID NO: 599122 - DNA, 598 bp, Homo sapiens
gaattctgtctttttaatgtacattccgggctgtccattttgatgctcagctaggtttggacaccactggattagataacattcaaagttatttttatcctttcctctgtgagtacaccctggtctcccaaacttatttaagctgggctgctacctgctgacagtggggcaaaagtgtctctttgcagcccagagtatagacaggaataggagaagggaaatagaagagaaaggaacgtggttttaaaaactattatggggctatgattctcttacttgatgaggatggtacttgaaagtcttggtactatttaagaaataccataaatatattactacattactgtattgatactgtttattttgggatkattcctgaaataactaaacacacactatttactaaatccaaaagcacctgatgctatatttaaatatatataaacgacaactagcaccaaatatttaagaaaaatgtataggagaaaatataaaaattgatttcttttcctttgggtaccaattgaaaaatgcccacttttgttgcttttaaaagaaatactgttgcagctgacaaaacaccagtgtttccaaggat

SEQ ID NO: 599123 - DNA, 627 bp, Homo sapiens
catatttccatttcatacttcctccgagggctgagcctgttcctgactcagagagatattgcaaaagaagctggtattatacacattgaaaatgacactccttctaaggagcaaaacaactttatcatatcaagcagagcaaagctcccctcttggaaaactcaaaaatgttcaaaatgcaaactgaacttggcagggggaaaaggcgatggtagcaaaagcagctgtgaaaaataaagaggttacttgtgagtgactgaaatgtccaagtgtcatgccaccagcagccacaaataaaagcagatgctgcaacattttttaaaagcatttctgtaagaagataaaaatggctgcatayaattaagaagtataattttattgaaaagcatgaatgacaaagcaaaaggaaatgtcaatatgatttttgtttttgtttttgttttttaaagagagggagtcttgctctgtcacccaggcttgagtgcactggctcaatcacagttcactgaagccttgaccttccaggcttaagtgatcctctcgcctcagcctcttcagtagtttagactacaggtgcaagccaccacgcccggctaattttttcattttttgtagagatagggtctt

SEQ ID NO: 599124 - DNA, 583 bp, Homo sapiens
agagggggagggaataaccccctccagagtggtcaacccagcactaaatttgtgtccatttagggggaaattaaattaaggagcaagaatatcatactcaaaatttcaatagaaggcccctttgccctccaatctaaagacatattatacattttaacttttccttccttaatttattttctttgattttyctctcttcgtgtttaaatgtactctccttgcttagtgtgaatactcaatgcaggaacaaaagacccatttgtcatgctggagactaagaacacatcaggtataatggaattctggcttgggcaacgctcatcatttgttcagacatgtcatcagtttattctgacattctgtgcgattcctctactcctaatctacatgacttccacacggcatcttcacaacattatgtaattaatattggtaaacaaatctttgttcactaccctgcccttgtaatttcctaaaaagcttctggcttattcctcaatcttagctgaatcaatacactctgaaagcaaagtcatatgcagaggacaagagcaattaatgatcacgtactcaagcacaagcg

SEQ ID NO: 599125 - DNA, 583 bp, Homo sapiens
agagggggagggaataaccccctccagagtggtcaacccagcactaaatttgtgtccatttagggggaaattaaattaaggagcaagaatatcatactcaaaatttcaatagaaggcccctttgccctccaatctaaagacatattatacattttaacttttccttccttaatttattttctttgatttttctctcttcgtgtttaaatgtaytctccttgcttagtgtgaatactcaatgcaggaacaaaagacccatttgtcatgctggagactaagaacacatcaggtataatggaattctggcttgggcaacgctcatcatttgttcagacatgtcatcagtttattctgacattctgtgcgattcctctactcctaatctacatgacttccacacggcatcttcacaacattatgtaattaatattggtaaacaaatctttgttcactaccctgcccttgtaatttcctaaaaagcttctggcttattcctcaatcttagctgaatcaatacactctgaaagcaaagtcatatgcagaggacaagagcaattaatgatcacgtactcaagcacaagcg

SEQ ID NO: 599126 - DNA, 565 bp, Homo sapiens
cccgccattctcctgcctcagcctccccagtagctgggactacaggcgcccgccaccgcgcccggctaattttttgtatttttagtagagacggggtttcaccttgttagccaggatggtctcgatctcctgacctcatgatccacccgcctcggcctcccaaagtgctgggattacaggcrttatgtttcttttttgcaacaaatcctagacaagtttgctgagagtttgaaggcagaatctctcagttgaagagggtgctcacttcatttaagacaaatgacagagactaagtgtattagtccattctcatgctgctatgaagaaatacccaagactgggtaatttataaagaaaagaggtttcattgacacacactttcacatgactggggaggcctcaggacacttacaatcatggcggaaggcacctcttcacagggcggcaggagagagaattagtgtcatgtgaaggggaagtcccttaaaaaccatcagatttttgagaactcactatcatgagaacagcatgggggaaagtgtccccccatgattcagctatctcc

SEQ ID NO: 599127 - DNA, 565 bp, Homo sapiens
cccgccattctcctgcctcagcctccccagtagctgggactacaggcgcccgccaccgcgcccggctaattttttgtatttttagtagagacggggtttcaccttgttagccaggatggtctcgatctcctgacctcatgatccacccgcctcggcctcccaaagtgctgggattacaggcgttatgtttcttttttgcaacaaatcctagacaagtttgctgagagtttgaaggcagaatctctcagttgaagagggtgctcacttcatttaagacaaatgacagagactaagtgtattagtccattctcatgctgctatgaagaaatacccaagactgggtaatttataaagaaaagaggtttcattgacacacactttcacatgactggggaggcctcaggacacttacaatcatggcggaaggcacctcttcacagggcggcaggagagagaattagtgtcatgygaaggggaagtcccttaaaaaccatcagatttttgagaactcactatcatgagaacagcatgggggaaagtgtccccccatgattcagctatctcc

SEQ ID NO: 599128 - DNA, 616 bp, Homo sapiens
tccacccccactcagaatcccaggtgcctgctgcttgcttgttccatgactcatttttttttgctctgccctttgcatactctccattgcctgccaggctgggtttttccctcagcatctgcagttgctcggtcacctggtgtcattctcattccaggccgattaggctgtgcctggctgtgtctctagtggtaatacttttaatgagctctctggttttctgcatttccctctcccccgggggtccaccacctaagatgtcaggtgggcagcctggttccccattctccccttttaaaacatcacttacctgtgtcctactgcctcagagatgcttctgtcttcagtgatcttgagaaaaacaattacgataatgatagccaccatttattgatcacctactatgatgtagtcaatagaggaggaggcactttccttttatatctcatttgctctcacaagtttttcaggtgtgtattattagtctcatttctactagaaaggcactgtgccttagagaggccacccagcctgtgcaaggtcacaccgactagctagacttccctttcatcgctaggagaagaaaagttaccastcagctctagctgactctgaa

SEQ ID NO: 599129 - DNA, 472 bp, Homo sapiens
ggaaacggtctttcttagaaattcctaattcagattagcatattaaaagttctgaggggaaaacaatttttaactttgcataagctgatgtttcgcaaaagtatttgaccccaaaattttcttatttataacacctattgatatttgtagaacattgatactatgtgggacatagtattgctgttttaggagaattttttaaatgctccaattgatttgttaaactacttagccggtctcagtctagggcaggggtcagcaacttataaaagctggcttgggatctgtttttataaggcccagragctaacagtggttttcacattagtaaagagttgtaaaaacaaaaactaagataacaacaacaaaaaacgattgagcaacagagacctaaaacatttactatctggccctttataaataatctttacgtacaccgccctaggaaattaacctttaaaaaattaaatcc

SEQ ID NO: 599130 - DNA, 362 bp, Homo sapiens
ttttacactacaaatgttgcttcagtacctacctattgggtgtcagtcaagctgcatgttagggaacaatgatgccttccataggggaccatgtcttgtctgagaggagaagacaggcataaaaacatacacttctagtaatatggaaaaaatggtggcttagtttgggcttcccccaaagcaggccctcttacaaagacatgggtgcaggtagtttacttggaagtggaccctaggaacacaaatgagtaggtgacctcgtgggctgctgggattcaatgccacygaggtcttgtgaggaaccacgtacagtgtattcagaatcatcctgctagaaatgggaaagcagaggtctccatcac

SEQ ID NO: 599131 - DNA, 562 bp, Homo sapiens
cattatgtcactgaaatgcagataaactcactcttttacactacaaatgttgcttcagtacctacctattgggtgtcagtcaagctgcatgttagggaacaatgatgccttccataggggaccatgtcttgtctgagaggagaagacaggcataaaaacatacacttctagtaatatggaaaaaatggtggcttagtttgggcttcccccaaagcaggccctcttacaaagacatgggtgcaggtagtttacttggaagtggaccctaggaacacaaatgagtaggtgacctcgtgggctgctgggattcaatgccaccgaggtcttgtgaggaaccacgtacagtgtattcagaatcatcctgctagaaatgggaaagcagaggtctccatcaccctcctcctcactggttgaaggttgtccctggaacttctgggctgtctggcccataaaaagcccttaggcagagaagcagagagatgcaggctcttgaggtggggagccatgggcacacaggggagacacccaccacagcttccygtgaactctacagtggccaagg

SEQ ID NO: 599132 - DNA, 550 bp, Homo sapiens
agccaggcatggtggtgcacacctgtagtctcagctactcaagaggttgaggtgagaggattgcctgcacctgggagtttgaggctgcagtgacctatgatcatgccactgcactccagcccaggcaacagagcaggaccctataaaaaaaaataataaaaaaaagaaagaaaaaagaaaagtcccctgaataactctatttattcacgtaacatttattcagcaaatgtgtacattttgctctgtgtatacacagtgctttataagtgttgcctactttctagctagcatacatttttctttaaccaaccagactgtaagcttcatagaggcagggatgatgtcttctatcttcagacccatctctaatgcattcttgctgtatatatagcactcagtatttgcaacttgaatgaccacctttattaaaaaaaagaagttttggttgttgttgtttttttttgagacagagtctcactctgtagmccaggctggagtgcagtggtgcgatctcggctctctgcaagctccacctcctgggttcacacta

SEQ ID NO: 599133 - DNA, 271 bp, Homo sapiens
gaatacctgtattagctcttgcactgctagaaagaaatacctgagactgggtcatttataaggaaagaggtttaactggctcatggctctgcacactgtacaggaagcatagcagcttttctggggaggcctcaggaaactttcagacatggcagaaagcaaaggggaagcaggcacatcttacatggctggagcaggaggaagagagagagktgggaggtgccacacacttttaaacaaccagatctcatgagaactctattacgagaac

SEQ ID NO: 599134 - DNA, 381 bp, Homo sapiens
aggatacagcaggaaaaaaaaaaaagtgacctgaattgaatatttcctgctgatattcctgaaaaccacaactagccttgagcaatcaagggatgaccataataacactttaagatgcttggttgaaagtcaaattatagaaatacagtctcattttcattaattcattcatccaatggatatctactgaacacgttctacctgccagctgaaatgctaagtattaggcatacagctataagtagatgtaaaaaatmactgcctacaatctcttagctatctgttctttatcgtccatcttgtactaagaactaagaggcagaattccctaagccaggtccacagctagccagcaaggcatctactaacctgctgaaaata

SEQ ID NO: 599135 - DNA, 494 bp, Homo sapiens
gaattctttttaagatattataaaacctcagtattctgcagagctctgtttgggaaatcctgaatattaatatctcctagagataacagaagaaaggatgctctttcctgaggattgtggtggcttaacaatttttcgtcagtcctgagtaagcaaactggtcttatagatttcctgcaacttgycctcatcttgtctctcattcccctcccctatcccactacatgatacgcaaacacattttataaaggggctgaaaggattagaaaactaatgattcttgtctcttcccccaccctatcccaattctatatctacatctgttatttgtgtctggcatgccttgggctccattagagaccaagatatttctcaagagaaaggatttgtggctaaaatacacctgccacatatatgtctgtcaattgagctatctatttagaatatttaagagcactcactgaagaatgaacaactgttctaatcagcagtca

SEQ ID NO: 599136 - DNA, 599 bp, Homo sapiens
  misc_feature 419, 442: n = A,T,C or G
tcaagcaatgcttctacctcatccccctgagtagctaggactataggtatgcgctaccacacccagctatttttatttttttattttctgtagaaacaggatcttattatgttgcccagcctggtcttgaactccttggctcaagcaatcctcccgcctcagcctcccagagtgctgggattacgggtgtgagtcaacacacctggactaacactgtatatagtgaaaataactgacaagggcatatttttaaaatgtctttaggtgatttactttaccactcagttcagtttactgttcatgtgctatcaagaaacaaatttaaagcaaaatactgccaataatatgaaactgataagcacacaaaaataattgagaactatgtaggaactgaaatatattactatataattttgtangaaatgtactttccatttacatngttggaatatattggtatattcatattttaacataagatatgcattgatccctatggcactaggaagcaatacagcacaattgaaagaatctgggatcagaaacacctgaatttgcttcttgaatctgcatgagtrctgattataaaactactgact

SEQ ID NO: 599137 - DNA, 577 bp, Homo sapiens
ttttgttttgtttttaggaaaaaaacccactttttatttaartaactatatcttgaatagccatctatactatataaacttattttgccattgtaccatattgaacagcatgaaaatattcatagttagggaggaagtggaaatacaagaatgttttggtcaaggatgaaccacatgttctatggtggtcctgtaagattataatgatgtgttttaaatgtaccttttctatctttagatacacaaatacttacttacctttgtgtttccactgcttacaatattcagtacaataatattctctaaaggtttgtagccttggagcaataggctataccctatagcttaggtatgtagcaggctacaacacctaggtttgtgcaaatacactctatgaagttcacacaacaatgatgaaattgcctaactgtgcatttctcaaaacatacctgtatcccacgtgactgtatatgtgtctgttccacaaagcactataaggcctctattagcatgtcatgccaataaatatttcaacagttacgtttaggtgtggataaacttccttcgagcattcata

SEQ ID NO: 599138 - DNA, 577 bp, Homo sapiens
ttttgttttgtttttaggaaaaaaacccactttttatttaaataactatatcttgaatagccatctatactatataaacttattttgccattgtaccatattgaacagcatgaaaatattcatagttagggaggaagtggaaatacaagaatgttttggtcaaggatgaaccacatgttctatggtggtcctgtaagattataatgatgtgttttaaatgtaccttttctatctttagatacacaaatacttacttacctttgtgtttccactgcttacaatattcagtacaataatattctctaaaggtttgtagccttggagcaataggctataccctatagcttaggtatgtagcaggctacaacacctaggtttgtgcaaatacactctatgaagttcacacaacaatgatgaaattgcctaactgtgcatttctcaaaacataccygtatcccacgtgactgtatatgtgtctgttccacaaagcactataaggcctctattagcatgtcatgccaataaatatttcaacagttacgtttaggtgtggataaacttccttcgagcattcata

SEQ ID NO: 599139 - DNA, 577 bp, Homo sapiens
ttttgttttgtttttaggaaaaaaacccactttttatttaaataactatatcttgaatagccatctatactatataaacttattttgccattgtaccatattgaacagcatgaaaatattcatagttagggaggaagtggaaatacaagaatgttttggtcaaggatgaaccacatgttctatggtggtcctgtaagattataatgatgtgttttaaatgtaccttttctatctttagatacacaaatacttacttacctttgtgtttccactgcttacaatattcagtacaataatattctctaaaggtttgtagccttggagcaataggctataccctatagcttaggtatgtagcaggctacaacacctaggtttgtgcaaatacactctatgaagttcacacaacaatgatgaaattgcctaactgtgcatttctcaaaacatacctgtatcccacgtgactgtatatgtgtctgttccacaaagcactataaggcctctattagcatrtcatgccaataaatatttcaacagttacgtttaggtgtggataaacttccttcgagcattcata

SEQ ID NO: 599140 - DNA, 632 bp, Homo sapiens
cttggtcaccttttgcccagcatgaacagataaggcaatgattcagcatcttacttgtccactgttttaaagactaactccttatcaaaggaagtcaaaagaccataccggctgacagcctttttaaattactaatggcctaaattttgcggtacatcattttcaatgatgactggacaactaggaggcttcctataattttttctttcagaaataaatgattttatttaacttaaaaaaagaattaagcgcatttattttatatcctcagaaccactgaaactgcttttagccaaaactaaagcaacatgattaagaaattaatagatttcaaactactgatttcagtcaacaatatgacagtgtaattaactaataaagtgtccygttaacaaacaaaaagagccgaatgcacatttcgtgatagtgcacttgcagaattactacatatactacatatacatatgaaactgcaagattactcagtaatctactgacgcagctgtcatttttagagaatattatgaacttccatatccttattaaggaaacaaatgctttcacaaatagccctgtgtttaaatatttatctagaattttagttttaaaattataggaaagctcaagaaata

SEQ ID NO: 599141 - DNA, 515 bp, Homo sapiens
aaagctccaggtagaaagcactatataaatattggttatttctaagcaaaagacagttcttggttaactcttaatttttgtcaccatatcctggctccaggagaatgtgtgttcctatatggctgatataaataatactgtgtgtgtgtgtgtgtgtgtgtgtgtgtgtgtgtgtgtgtgtgtgtgtgtgttcaaagaatgcctcttcattatttggatggcagttaactrctttggctaacttatgttggcatcctgaagctaacagcaaatcctcctcccatctcctgtaacttgtggccacaagacccagcatattttataagaaatcagaccagtagtatatttctacgatcttcagtttgttaagctatttatttgagttaagacaccgagttgtcttccaagtacttcttttatgataacagatccaagacagacacagctaatttgggcaacaagtagggacaaagaggaaaaacagagcctctgtcatcctaattatcaagttaatg

SEQ ID NO: 599142 - DNA, 595 bp, Homo sapiens
tcataactgagttcccccttcctggcatcaccctcagctgaaaagatgctcacccaagatgtaggagcagcccacatccaatgtttgggggattcaggatgataaaatctcatccttgttgccccatttccaaatatctttgaagaactctcccagctccagagttccccatagaattgactgaggtcttgatgtaactgtatcacagcccaacttctcaacctgtgtaatcctgattccctcactcccaaagaggggttgatctaaaggacacacccctataaacctcatgttgaaaatctgcctgagtctgcttcctcagagaactcaacatatgacaaatgaagatgctgaaaagaccaacctgacttattcagttgtaagraagctgcatgttctcattcagtaggcatagacactattccaatgctgggaacacagcagtaagaaaaacaagtcttttctcttatggatctgatattctggtgaggaaaacctaaatagacataatagaatgtcaagtaatgacgggtgctaagacaaaaaagaagcagggcaagaggagaggtaatgtttgtgtttaggactgcattgg

SEQ ID NO: 599143 - DNA, 377 bp, Homo sapiens
ccagggaatatttcctcaattgtcctctcaaataggtttctaaacattttattgttgtccccttctccttcttcttcctcttcctcttccttttctcctccttctccctcctcctcctcctcttcctcctcctcctcctccttcttccttcttcttcttctccttccttcatcatttttccttcttcttctggattgttaggttttgacattttatgtaatgccacatttcttggagactttatttctttttgtttttgttatttttgtctgattgggttaacttaaaagcctcatcttcaagctcttaatttytttcatctgcttggtctagtttactgttaaaattttcaactgcgttgtgtaattccctaagca

SEQ ID NO: 599144 - DNA, 624 bp, Homo sapiens
ggcttttccttagcactgattctcttcatcctcattcccattcatagtcagctatttctgtcccctaggctggaaaactttggtagatttactcactgggatcttggtttaatctacggcataattcattgtcttttgtatttctgccttggtttcacttttaagggcagatttgtattattagttccattggcatttatcatattaagaaacaaccttaaatccatatctttktcacaggatgagctatattttcatccctggaaaaatataagcttgtacatttgtaacagtcccagatatttcagccaagagcctcaagacaatacaggtaataccattgctatggtcaccacaaaaattcagcagtaacttcaagcattttctaccttcaacatatctctattttgtcttatgaatgcttcaccactgcactaatgtgtgcattattcattttatgaataatctacatgtttcttcattcttatatttactgatgctttttgccaatttctagttttactcaaaataatccatcatctttctagatcattataagtagatgcaaggtgcagaatataatatggaaataattattctgctgttaactagcacaaaaaatct

SEQ ID NO: 599145 - DNA, 591 bp, Homo sapiens
atgagatggataaagggtacagtaagattagattgattaaaataaaaatatattagaaaaaaactaggactcaacagacggagagattgggttgtgcaggtgatggagaacctctattgtacctgacattctttaaaggaggaaaattagcatattcaaaaaagaaaaaatattttgacaatagcatgaaagccagagacctttcttgcctccttgtttagaaatcattatagcaatttacgcatggaaatatcaaaaggaaggagaagtatggtgtttgtgaaaatgaaaaagtcttaagtttcaaaaatgccatggrgaggaatttggcagtggataggatgtaaatgagtaccaaagaagatggagaaggctaactttaccgaagactaaaatgagagtcaagaggaaatggtatgttcaacaaaatgcaaataggcaagaaaggcttgattctggaatatatcagatttcagatcttgctgacacaaacacctctgggccaaaagtttaagtcagctggagacccttgacattctaattgagagttagccctgcaaaggaggtgattgattaaattgattctaacac

SEQ ID NO: 599146 - DNA, 591 bp, Homo sapiens
atgagatggataaagggtacagtaagattagattgattaaaataaaaatatattagaaaaaaactaggactcaacagacggagagattgggttgtgcaggtgatggagaacctctattgtacctgacattctttaaaggaggaaaattagcatattcaaaaaagaaaaaatattttgacaatagcatgaaagccagagacctttcttgcctccttgtttagaaatcattatagcaatttacgcatggaaatatcaaaaggaaggagaagtatggtgtttgtgaaaatgaaaaagtcttaagtttcaaaaatgccatggagaggaatttggcagtggataggatgtaaatgagtaccaaagaagatggagaaggctaactttacygaagactaaaatgagagtcaagaggaaatggtatgttcaacaaaatgcaaataggcaagaaaggcttgattctggaatatatcagatttcagatcttgctgacacaaacacctctgggccaaaagtttaagtcagctggagacccttgacattctaattgagagttagccctgcaaaggaggtgattgattaaattgattctaacac

SEQ ID NO: 599147 - DNA, 591 bp, Homo sapiens
atgagatggataaagggtacagtaagattagattgattaaaataaaaatatattagaaaaaaactaggactcaacagacggagagattgggttgtgcaggtgatggagaacctctattgtacctgacattctttaaaggaggaaaattagcatattcaaaaaagaaaaaatattttgacaatagcatgaaagccagagacctttcttgcctccttgtttagaaatcattatagcaatttacgcatggaaatatcaaaaggaaggagaagtatggtgtttgtgaaaatgaaaaagtcttaagtttcaaaaatgccatggagaggaatttggcagtggataggatgtaaatgagtaccaaagaagatggagaaggctaactttaccgaagactaaaatgagagtcaagaggaaatggtatgttcaacaaaatgcaaataggcaagaaaggcttgmttctggaatatatcagatttcagatcttgctgacacaaacacctctgggccaaaagtttaagtcagctggagacccttgacattctaattgagagttagccctgcaaaggaggtgattgattaaattgattctaacac

SEQ ID NO: 599148 - DNA, 309 bp, Homo sapiens
tactcaagttaattaatccatgtttctcatttgtttgccttacacttgagttttatctgagtaacaatattacaaaatgtayttacacagtatgagaatattatattttacgcagggtatacccatgattcatctttaaattaacttcaggaaatctccaatcaaagcttcctaatgttaacttcagctccatttccagaggagaccatgttactaataaaaatagcttctagcaacttgataagagagtctctgtgtgtttatggccaagataaatgatcttaaagatgtagggcacaaaagagaatt

SEQ ID NO: 599149 - DNA, 309 bp, Homo sapiens
tactcaagttaattaatccatgtttctcatttgtttgccttacacttgagttttatctgagtaacaatattacaaaatgtatttacacartatgagaatattatattttacgcagggtatacccatgattcatctttaaattaacttcaggaaatctccaatcaaagcttcctaatgttaacttcagctccatttccagaggagaccatgttactaataaaaatagcttctagcaacttgataagagagtctctgtgtgtttatggccaagataaatgatcttaaagatgtagggcacaaaagagaatt

SEQ ID NO: 599150 - DNA, 309 bp, Homo sapiens
tactcaagttaattaatccatgtttctcatttgtttgccttacacttgagttttatctgagtaacaatattacaaaatgtatttacacagtatgagaatattatattttacgcagggtatacccatgattcatctttaaattaacttcaggaaatctcmaatcaaagcttcctaatgttaacttcagctccatttccagaggagaccatgttactaataaaaatagcttctagcaacttgataagagagtctctgtgtgtttatggccaagataaatgatcttaaagatgtagggcacaaaagagaatt

SEQ ID NO: 599151 - DNA, 419 bp, Homo sapiens
aaattaaattctccctgaaattatattctttgaatttgatgtttatccatcatttgtttactgatggtttacaaatccagctctgcttcttacctgcgttttaaccatttattaaatgattaacttgatttccaaaggttacataaatgtcaggatgaccaagattgaacctggcaggttttggccccaccatcctaacaaaacaccaatctaacctgcttcatttccctaattctttaacttagctaatcacatggacatgtaaatagtcatctaacctagacatctgtagtcgtcttcaacttactcttcaatttttataaattttaccttttaaatatttcctggatacattacygcctgctatcctccttgtcattgctgctattttagtttaagctctcatctcttacctgatt

SEQ ID NO: 599152 - DNA, 639 bp, Homo sapiens
atagcatgatgttgttataaaaacagacacatagaccaatggaacagatgacagggtccagaaattaatccacatatctacagccaacatttaatttttgacaaaggcgccaggaacagtcattgtgggaaggacaatttcttcaataattagtgctgggaaaacaggataactatatgcagaagaatggaactaggtccctgcttctcttcctacacaaaaatcaactcaaaatgaatcaaagactgaaatataagacctgaaactgtaaaactactagaagaaaacatagagaaaacaattcaggacactggcayaggaaaggattttatgaataagacctcaaaatccaggtaacaaaagtaaatataaacaaatgggattgtatcagactagccactaactttactatctccacactttttttctctataatgtcatatagttggatactttatttttaaaacatatatatcactatttgtattatttacatgttttattatttatttttttctccctctagaatgacagctgcatgaaagcacagtcattctcttactttttaaatgtcgtatcctcagtgctagactatgattgtctcagaaaagtcctcaataaatatttattagttaataa

SEQ ID NO: 599153 - DNA, 618 bp, Homo sapiens
aataaacaataaactaacttagattcataggcttcactgatggtattccatttctcagattgtagatcgtaagactttagagacatactacgtttatttgttttagttaaacaaataaaaataagttaaataaaccataagtgattttgaaacttctctgaggctgtgacaatgtggcacactttcttttctttgccaatgattccaataaatacaacttaagataattttttcagtaaaatttgctctattggaatttattacatrtaagtatctataaaatatattagttgttggtatattacatttgaggttatatgtgttagattttaagaaaaaaattttgtaagcataaaactaataattattgtagaatttttaatgctataattgattatatttacaaagaaattaaaatcatccataatcccattacttgtagataaatgtgatattttgatgtacttttttcatttttaatcaatgaaatatataaacatatacatgagtatggttattgactctatgcaatgtcatattctgcttttatcacctggcataaatttccatcttgttaaatattctttgtctttaattcttgcataacaaagcagcaca

SEQ ID NO: 599154 - DNA, 496 bp, Homo sapiens
gattgtaaattatttttgtacaatagcaataaataactccataggtaacagttttgtttccttgaagggtattaaccaattttttaactaactatattttctctcagtattcttatttctgttgactgtataaatattccagcctctcattttctcctttgaagcagctgacatcttactaaattcttattatgagttacaattaatctttgtacacgttcactgtatatttgtaagacagtcatgctttctttcagcttttggaaaattatatttggacctgcttcacattcctaaatgggaaccaatgtctagaataatcactagctgctcccattaagcaagggcagctctccaattcarcacagtttcctcctcccactcctgataatcttatttccagtcctttccctcattcatgtgtccttcttggcctcggtgagcctttgagttcttaacgtctgacttataccttgaggttttagtagagcagtgg

SEQ ID NO: 599155 - DNA, 607 bp, Homo sapiens
aacgtcaaagataaagaatggatcctaaaagtggcatagagaaaagaaatgaataacgtacaatggagcttcaatatatctggtagcagtcttctcagtggaaacctaacagatcaggagaaagyggcatgacatatttaacgtgctgaaggagaaaaacttgtatcctaaaatagtagatccagtgaaattctccttcaagcatgaaggagaaataaagattaaaaaacagacaaataaaactaaggggttttattaacatcagacatgtcctccaagaaatgtaagggagttcttcagtctgaaagaaaagtttgtaagtgagcaaaaaaaatcatctgaaggtgcaaaactcactggtaatagtaagtatacagaaaaacacactatattttgacaccataattttgatgtgtaaactactcacatcttaagtagaaagactaaagatgaaccaatcaaaaataaactacaacaacttttcaagatacagatagtgtaataagatataaatagaaatagcaaaaagttaaaaagtgggggacacaattaaaatataaacttttaattagttttctctttgtttatgcaataggtgttaatttgt

SEQ ID NO: 599156 - DNA, 441 bp, Homo sapiens
tgggtgtcataaacaacagaattcattttctcacagttccggaggctagaagttcaagatcaaggaatcagcaggtctggtttcttctgaggcctctctcctgggcttgctgatggtcacctcttggtgtcctcaaataatcctttctctgtgaatatatatwcctgttgtcaccaagtgtccaaatctctttttaataaggtcaccagtcagtttggattagggcccaccttaatggcctcatttaactcaattacctctttaagggcactatctccaaatgcaatcacattctgaagtactgagaattagcgcttccacacgtaaattttagggaacacaattcaacccacaacacctgcctaatgcaattttctttccatttttctctgattctgaaatatttgactcaacattgtttttattaaaatgcggggctta

SEQ ID NO: 599157 - DNA, 624 bp, Homo sapiens
aaatattgacttatctttaccctgcatttaatgtacaagactgagttgttcactacttttttctttcctcatctgtcaatcactttacgacctaccacagcatmaattccaaacacactgctactgaaacgctagaaataggtgcagtcttaactaacatggaaaggtagttaggacaccaaaggctgtgtactgtcaaagcaattccagaggatggtaacacacaattatatttatgatgatgtggattaaggaagaagcaatgtatctgaaatgggagttttctgcctaaaacagacatgaaatgatttgttacaaaaattggaaagtgagaatatgacaaataatagatagaagcaagtggcatcgacatgtaaaagcagtggcaggaatgccatccatcaaaacagacagacaattggaaaaatcaccaagaccaaagtgagaattatagaatctatattgttacttttgtttagtaatgtataaatttagagaaaatgaatgaaatgaagatttatctgatgtgaatagaatatgcaaataagtggaaccattcaaaaactcatttttgtttctatctgtttacttgaagagaaagagttcaaccagaatataggcatt

SEQ ID NO: 599158 - DNA, 595 bp, Homo sapiens
gtacattagttctaatggaacgggcttgaatgcatgtgaaagtgattggttaaaaatagttttctacgtacgtctcatcggagagtagacagactcacaatggatttcttgtaacacttcatttgatgcattacttcgaagcacgaaagtgcttttccattatcaaaattgagttgtttgacttcactttatttgggggccccaggaaactgcaggttgttttcagtgcattgctgttcagttgaattgaaatttgggaattaatggaccaaagatggaccccagaaggaagtttgcatktgaccacacaatgaatgtcttagcacacaggtagattttacccatgggataccactttgtagtttcctttctgaagtatttttatccaattagattttattatgcctcagctcaccacgtgaaatgtttcacatatagatagatctaaaggagaggaattacccagttggccctataccaaatgttatattagtatctggcaattgctgattagagtgtagctctgaggaaaaaaaaactgccatgattcattatgatcacacacaactctatctgataaatagctgtgaatgag

SEQ ID NO: 599159 - DNA, 673 bp, Homo sapiens
ctgattttgttatgccttaataaaataatctcttccttctctttgtgtacataaagtacttttacagacataattattttcctccaaattggcaagtagcaatatataattcagcagtcaatgaatattctgtgtctaattccaaggaaaatatgaatcattccacataggtcttgtcttctcatctcactgtttcttatctagggaaggactatctatgccatagataggtatagccaagtatatgttgtgtatcctaatatctcatttgatttcattctggcatttggaataataagtctatattcactcaacatagtaatttgtgctatgttatagtgaataattctataaggtaggctttgtagactgctatattaattaagggacatttaaagtcaatcagggaaaaataaaatcatttttatataataacatatatccactgtttcaatccttatcatcattaaaatctacattttgtttcagtgtggtagccattttgcacattaagagatgtccgctactsttcccaactgctgtgtttttcattgccctagatctccaaatgtgtgtaaatgtagaaaagaaacagaatttcacagttgcagcctctacgacttcttgattcttggagaagtttttgcattaagcataaatagtcttcagtttt

SEQ ID NO: 599160 - DNA, 565 bp, Homo sapiens
ggtttaaatgacaaaattctattttgtgcttttaaaaataagaaaaagcagcagcatagtttaaagacaacgagtcgcatctcgtttaattggctcaatagacttttcttctagttcattactattaagaagctaccccacacctggacagctcctaagagaatgtagcaatatgacaactcttcaataattttttattagaaatttttgcaacttwtaagtaagaataattgtattttaagatgtatgagtttataagactacctttttgaatcaataatttctagtaaggatttaaaagactgtcatgcaacttataagacgaggcttttaaaaatattaatcattatgctgattgaataagagcatgaatttatcagaagttagctgagttcaagactgtagaacttatctctctataatccccaccataaaggacagagtggattttataataccaagattatctgtcctgcctatttgaatatagaatgattggtccatatttgaatttgctgaggtcttcacaaaataattttaatcagcttgtctttgtagtaaggaa

SEQ ID NO: 599161 - DNA, 599 bp, Homo sapiens
ggactaccgacttctaaatccatattgttttaatgtagtttctggaaccactgtaaaggcagaatggcagattgccagatgcagcgggagctctgatttatagagctggacttgtgaacttgccaccacatcttcctcttaaccctcattcacatctagtttcctttaacttttgagtcatatcccagggggttaacttggccttttccctcttgcttttgccccgtatccagacaatcaccaagaccttttgatcttgagtataattaaaatttggtcttatcttccactgccagtcacctgcaccagaccatccacatctatctgatttattgctttgggttgggatcatcagtttagtgctccagttagcaactgaagagatttttctataatgcaattctgagcaaatcgcctttacraaaccccccatgtctcccattgttcctggaacaatattcaaatttcttaacatgggattttcatcccgctgtttacttctttcacttggtctctcattatctccctaagtacacttgcctcccgcaagctttgctctgcggaataactcacagtcctttggtggtctaacttctgaa

SEQ ID NO: 599162 - DNA, 480 bp, Homo sapiens
tatgtgtcacatgtcttctcttctttcagatgtttacttaaatgtcaccttctcagggaggtctttcytgttcaatacaaaattgaaaaccctctccatgacatttcatactcagtttatgtttcctttttccgttagtatttatcactcttttacacaccacacattttactcttgtataatatgttgttcattatctccccagttagaaattgggaggtctccatgcgggtagaaattttggctacttttgtttattgtatctccagttctaacaacagcacctagcacataatagctgctcaaaaactatttgctagtaagtgatttgtaccaccagtaatgctatttgcaagtatgggggactgggctcacttcctgccacagggatttttcttcctctactgagacacagtctaggtgattttattcctttctcatcctctgtctgttacttgagagcttcagaagtggtacttg

SEQ ID NO: 599163 - DNA, 586 bp, Homo sapiens
gggtctttctttaaataaagtagtatttagctccaattatgactgtatttgttacataccctttatgagccaggcactgtgtatagatacagtctccggatagctaacagactaacagatgttgaacaattaagtaacaatttataaattcaaatgtgttttaatacaaaccatgtgctatttattaatgatgaagacagttctactgaaagaaagatgaagccaccaatcatcagcagattgtagtagttagagatctctttttcacacaatgacagagacctctrctggacaaatggaaggacagaggccttgcaatatgggtttgtcaagcaatttctacagacttgtatctcaagggccaatatgaaataagtgattttgaatgaaatttaaggactgggaaatggggagatatttgtctttgttgacctaaataccaaatagagatgctctctaaaagaaaagatgtttatttaggaatagagcattgtgataagaatatgtatgtcatagtaaactataaactatgtgtatactcagggaaggaaaggaagacaaagatttttaaaggcaaaaaattaag

SEQ ID NO: 599164 - DNA, 579 bp, Homo sapiens
gtgcaaacctgatgattaaacacgagtaaatcaagaagctagaggcattcaagtagcaagtattaagaagcaaatgtacacaggctttcccataaacaaaaaatatatgtaagtgtttaaaactcttcactaccacccagggatgtgggagtgtagggaatatgaatatctaaaagagaaagtgaggtgggagagatgtaagagtaacctagcctctgctgcaaatgaagggtgtggtaattttccaagtgaaataacctcaatattgtcttcagtgcagctctgtgcctaagcactacttggaatagaataccaatattcatcaatacctcttcaatggcrcctgcagaaattctgtgacctgcaacatttattacatcatccactcgagacataacatacaaatagccttcttcatccatgtaaccagcatccatggtatcataatatccctgaaaacaagaaaaaataacatttgattagcatgtactgttaactaatgtaatcattttaaacttggtaaaacacacaatgtaatagaaatggatttactgtgaacatttgccgtttttcgtaact

SEQ ID NO: 599165 - DNA, 519 bp, Homo sapiens
acatagtttcctaatagacctcctgaagaatgagtaacccctagtttccacaggccagtgtttctcctctgaggcactcatcattttgagaatgacaagctaggccaggcatggtggctcacatctgtaatcccagtgctttgggaggccaaagtcaaaggatcccttgaggccagcagttgaagacctgcctaagcaacatagcaagacctcatctctacaaaaaatagaaaaactagccgggcatagtggcacacatctatagtcccagctacttgggaggaggatgggttgagttcargagtttgaggctgcagtgagctctgatggcaccactgcactccagtctgagagagactgagaccctgtttaaaaaaaaaaaaaaaagaaagaaagaaaaaaagaaaaaagaaacaagctgcagtttctctatttaatgaaggatgtttagaatccttgtcccctgtccaatatgtgccaatcattataatacccaaaaaaatgcaccctccctcaaca

SEQ ID NO: 599166 - DNA, 587 bp, Homo sapiens
tcttggtcgagtcctgcaaatgttaagtaaggaagtgtccactacaatgagagaagagcaaaagttgtcttcaatagttatttactgatrtagtgatgaaatttcttgcatagtctttgtgagagtttatattagcttaaatctttctacctaatcttgaccttaactggagtttaattttcttttattaaaaaaagtatataccttaactcatttaaaaatagtgagcattttcatttagctcgacttcagaacataggagtaagtccttatttttcaattacaacagataatttatgaattaattttgtaagtttagaaatcctgtgatatgtgtttaatgtacatcatacttttctttcttcttccttttattacaaagttatataaggtatacatattatatattgacactaaatgagaacttatgacctacttggtgataactatttttatcaagctcttttgaagaaatttagaattttttcaaaaaatattatgaagtttaaaaaacaacacaagaacctgcccagaacacatcgagttctggaagtaagatttatagtgaaggacataggagtcagcca

SEQ ID NO: 599167 - DNA, 587 bp, Homo sapiens
tcttggtcgagtcctgcaaatgttaagtaaggaagtgtccactacaatgagagaagagcaaaagttgtcttcaatagttatttactgatatagtgatgaaatttcttgcatagtctttgtgagagtttatattagcttaaatctttctacctaatcttgaccttaactggagtttaattttcttttattaaaaaaagtatataccttaactcatttaaaaatagtgagcattttcatttagctcgacttcagaacataggagtaagtccttatttttcaattacaasagataatttatgaattaattttgtaagtttagaaatcctgtgatatgtgtttaatgtacatcatacttttctttcttcttccttttattacaaagttatataaggtatacatattatatattgacactaaatgagaacttatgacctacttggtgataactatttttatcaagctcttttgaagaaatttagaattttttcaaaaaatattatgaagtttaaaaaacaacacaagaacctgcccagaacacatcgagttctggaagtaagatttatagtgaaggacataggagtcagcca

SEQ ID NO: 599168 - DNA, 471 bp, Homo sapiens
agtatgggctgtgagttgtttggtttgcatgtgaaaggtgtacttataggtgagtgatgtgctatttccaggaattaactatccctagggttagaggagcatcctctccagatgccagagcatcaagactatgcaaaataaaaaaatatgttcgaaacaccgcttttctgtttggaatgaaatcaagagaataaatatggaatatggaaaacaaaatgaactgaagttctgattcacaaaatgacatcttattagataattgagtagagctttcactcatgggacatcagatgaaaaagatttcaaagattcaaacttctattcagtgcaaaaatctattcctcagcatcttcgagatgtggtagtcagcttacacccaaacaytggaacactcctggaaccagataacttttatgtcctttttttaaaaaaaataaaggaatctatattattcttacatggcttgaatag

SEQ ID NO: 599169 - DNA, 560 bp, Homo sapiens
ttctccattctctcaacttgtaatagaaaacatatacttgagttcctacccaattggctatcatttatcccattatatgtgaaatattgcaaatacttaacgtgttgaaaaaataaacaaatctcacacgctgcatagatatttgctcttattttccataagaaaagtataaaaacagactttaagacttggggacartatatttaagtgtcttgtcagtgaacaggccacatttattatgttgccactgggtgcaacaaattatatccccataggtactgctttgttttgttttcattttctcagtgtatgtttatgtatgtacccatgccattttatgcatcttgggttagtaatataaggaaaatttttaaatgtgatactaaacagttgctcaactaaacctttaacaacctgacttcagaattgacacaacctatgcaacataatctgaatacttagttacttctcttcacaggaggctttatggagactgaagctgcagctcaggagtccctggggttaggcaaactcggaactcaagctgagaaggatcgaag

SEQ ID NO: 599170 - DNA, 511 bp, Homo sapiens
tttattggttttcccttttaaaatttgagcagtttctctgtaggctcctgacatttaaggggtgagtcacttattctcaatatttagtttmagtattaatattataattcttcatagtttattcaatgcggacttcatctggggatgccatgactctctgagatcttatccatcactctctgttggatttctttgaactccaggcacctcttcttatttaacaaaaatatcttctcttttactattacgtttagaacaaccagacctgaaaatttcactctttttcttttatacctttcgccctcatatttaagaacgtatttcccattcttagctttccagcctatgttttaacctaaaagcttcgaagttcaggatagccgattaaagccaaccacacaggccagtaatggtgactcatgcctgtaatccgagcacttggggaggctgaggtgggagaactgctcaagcctaggcatttgagacccagcctgggcagcagagtgagacc

SEQ ID NO: 599171 - DNA, 624 bp, Homo sapiens
gcctgaaacatataactattggttaaaaataatttgtcctcagacctttgaagttayggctcttcttgcttctagttatggctaatgatcaattgattgccattcttttgtatataacatgtaggatttctttttcctctctctctctctctctgttttatttatttatttttgctttatctttggtgttcagaaatgccgtaagtaggtgtctattcaaatgttttgtttcatttttctaccttattctttcaaactgaagacttgttatgctggactatctgacaactgttactctagaggactcacatttctacactcaattttcattccaagaaccttagtcttatagaaacttctgggattaaagatgaggatgtctgtttcaacagtaattcacctctctaattctcaagaccatcctgaataggcagtgaacatattaaaattgatagaatatccattgaattgttatttatctccagcaatataaatgatgaaatatttagcttaattctttatctgctaatgttttctcttgcctcgtaacattatataatttttttagtaaagcatatatccatgctgaaatcttctctattttgtaacttaagttgaaagata

SEQ ID NO: 599172 - DNA, 596 bp, Homo sapiens
tcttgcttctagttatggctaatgatcaattgattgccattcttttgtatataacatgtaggatttctttttcctctctctctctctctctgttttatttatttrtttttgctttatctttggtgttcagaaatgccgtaagtaggtgtctattcaaatgttttgtttcatttttctaccttattctttcaaactgaagacttgttatgctggactatctgacaactgttactctagaggactcacatttctacactcaattttcattccaagaaccttagtcttatagaaacttctgggattaaagatgaggatgtctgtttcaacagtaattcacctctctaattctcaagaccatcctgaataggcagtgaacatattaaaattgatagaatatccattgaattgttatttatctccagcaatataaatgatgaaatatttagcttaattctttatctgctaatgttttctcttgcctcgtaacattatataatttttttagtaaagcatatatccatgctgaaatcttctctattttgtaacttaagttgaaagatatcatacgaatgttaatatactaatttatcattttc

SEQ ID NO: 599173 - DNA, 587 bp, Homo sapiens
gtcacaaacacatatattctccttcatcccattccaaaaatgaagtccttagatgaaatccttttatggcctagtttggaacagatatttgtgcttggatcagtttgtttattttagtcgagggtttatttagtacagacacaattactgcaggaaaattcctcggcaactaattcaatgaatataataatatacaacattttagaacctaaaaccaatgctttcaaaatttctctggaaaaatatgtcccagtttcctacttggaactccagaagcctgtcttctctgttttcactaaaatagagctgctgttgctttgccatgtgatcatgtatagccctacctaccttcaaccaargacaattataagaattccctgaacgtaaataataataatatcccaaggataagggtcagaatgcactgaaatttgttagtaaaaagaaagctaaggaaaaccaaagtgttctcttttagatatatttagatatatttgatctatttagaggaaggaaaacagcacaaaaggaatagagttgctgttttgagccagcagttcaatgttaatatattaacaaagtgagta

SEQ ID NO: 599174 - DNA, 593 bp, Homo sapiens
ttaatgtgatgaggaaccacatttaaacttctgaaccatttctttcatttgtaagaatcactagaaacatgcttaaatatttatctttaaaggccccatcatctgtctttaagtaggaattttaagcagttcttgatgtcaccctcgtatgctctgatatccacatagatcacccattcaaaaactaaccttttgattttacaactttattgcttccattgttgttcattaccccaagtcagacactcttcatggtcctattctgaatcttgtcatcaccacaaatcatgcttctttcaaacttaccaattcaagcatctcatttcttgctaatcacagtyttcccacctttgatcttgctttatgaactttttcttctatcatctttatttaacctctatccttttccagtgcattatcacctttctgttttcccctctctcctggtttagcttagatcacgtccataatttcaacaccctcaaaatttgttaaatttcttcactccactttcatttggtcacatctacatataacaaccacacccaatgatgaattttctttctccatgtgtacattttggcacatctgtg

SEQ ID NO: 599175 - DNA, 359 bp, Homo sapiens
ctactacatccagggagcaagtgggttcttcaaaagctatatgtgtatcaatgtcgttttagtgatgatttctggtaatattggtgaaccaatataatttatggatgtttccccaaaaacaacatttataaacaccctattcaaataattaaatatttctaccactgaaagagccacaatagacacaaacttgatgtttattttgccagtcaaatagagaaggaagtaatatggccacygaagaagaggaatagaacatttttacactttcttatgttctgattactagccatatatgtttaccaaaatagtaattattattacagcattggttggaataataacattatggatctgga

SEQ ID NO: 599176 - DNA, 632 bp, Homo sapiens
atgatttctggtaatattggtgaaccaatataatttatggatgtttccccaaaaacaacatttataaacaccctattcaaataattaaatatttctaccactgaaagagccacaatagacacaaacttgatgtttattttgccagtcaaatagagaaggaagtaatatggccaccgaagaagaggaatagaacatttttacactttcttatgttctgattactagccatatatgtttaccaaaatagtaattattattacagcattggttggaataataacattatggatctggaatggactttacacatttctattgcsagggattgtgttgaggaaattgaagatcagaatctgctaataattttgaccaaactgtgtatgagaaatagaatctagattttcagatcctcaaactaggaaggacattcttcacttcaagttgctgcccattctaatgtctgctgttcttttttcttgggccttagcagtaggcttataaagctatataaaaatctaagtgccaattaataagttattgtttctactggtaaaatagcatggaagtggcctgaggtaaagaatgtcctttaccaagatttcttgatttcctcctgggatgtactcgaggct

SEQ ID NO: 599177 - DNA, 491 bp, Homo sapiens
gcagcctggaagacagagtaaaactctgccaaaaaaaaaaaaaaaaaaacaacgaaacaaacaaacaaacaaacaaaaaacagtaagaaagaagctcacatttattgaccattgccttttgtgtgagttacttttgtaatcatattacacatattttcttacaaaacctttgtaaaaaccctattagatgggttatcagcttcatgttccacatgaggaaactgaatcacagcaaaatacagtgacttgttatggatgygcagcccaaaaggacaggcaaaggaatcaagctcaagcaatttgattttgggagccactttctcacccactctgccataaagtttatcttccaggcagattttttttttctttaatgtcagtgtaagaagcctggagagaaggaccaattaaaggctgagaaaaaaactgtggtagcagtgacaatagaaagtaaaggaagatacattagaaagtatgaaggggaaaatgac

SEQ ID NO: 599178 - DNA, 585 bp, Homo sapiens
gcaatattgctttgtaaatttcaatgctgttcttttttaaataattgttayttctctcaaaaggaaaagcacatctggagttaccatcatgtagcacacagtcctggtgtaaaacctagccatccctcccatctgatccgtttttccacagtctcaagtatgtcagccctaagacagatgctagagattttgccctaactgttggaaaccaaaggatttgagctcccttatctcattttcttagactgctattactaaagtcatcctgttattagagtttgtgatttaaacaaaacaaaaaccaagaaaataaaactttttcagtggccagattgctcaataatttcccaaacaattgtgttatcaatacttctgttcatagaacagaactatttgagcacattgggttgcctcttaaccaaattctcaccaggaatcccaaatagatcagactcttgggatcagctagaatcagtactattgtgagaaagtgggaaataaaagctcaagaggaggtaagatgcaagaaaaaaatttgttctttaaaatacaaaatgttgtacatggttataaggtaaaatagaa

SEQ ID NO: 599179 - DNA, 585 bp, Homo sapiens
gcaatattgctttgtaaatttcaatgctgttcttttttaaataattgttacttctctcaaaaggaaaagcacatctggagttaccatcatgtagcacacagtcctggtgtaaaacctagccatccctcccatctgatcygtttttccacagtctcaagtatgtcagccctaagacagatgctagagattttgccctaactgttggaaaccaaaggatttgagctcccttatctcattttcttagactgctattactaaagtcatcctgttattagagtttgtgatttaaacaaaacaaaaaccaagaaaataaaactttttcagtggccagattgctcaataatttcccaaacaattgtgttatcaatacttctgttcatagaacagaactatttgagcacattgggttgcctcttaaccaaattctcaccaggaatcccaaatagatcagactcttgggatcagctagaatcagtactattgtgagaaagtgggaaataaaagctcaagaggaggtaagatgcaagaaaaaaatttgttctttaaaatacaaaatgttgtacatggttataaggtaaaatagaa

SEQ ID NO: 599180 - DNA, 540 bp, Homo sapiens
aacattttacagttcttcttttcttcatttatctcacactagacgaaataaagatagcatcaggtttccatcaaccccaagccttagcaatagtgcctggcaaattttagatattatgtaaatattcaccttaaaataatcattgtatagatcactctacccacatatttcatatactctgctgaagtataagaaacgtgtggccttgagatcagaaagggaaactctactaaggaaaataagcatgttgactggtagatttagtacaggattatatagattaactccaaaatgtgcaatagaagtgaagtgtgatggagcttcaagaaaggagaaatcactacaagctggataaggcttcaracaaaaatgaacatttgaaacataaaaaatatattgtttatagcatttaagttttatatgtttattgaactaatacatgatcctgtataacatttgtaaaatacagaaaaatacaaagatgacaacaaaataatttaaaaacattaaaaaatactgattttagagataatcaatgtt

SEQ ID NO: 599181 - DNA, 616 bp, Homo sapiens
aagttttatttgtagaaaaaaatagactgaatattgtttttaagtacagtaaaaatatctacacttttccagtttccctaagtaaacattttatgagtaattattagaaagacaaaaaagtgtgtaagttattgttagaaagtcattcatgcttgcaaggatgtagagaaaagggaactcatacacggttagtaggaatgtaaattagtacagccgttatggaaaatagcatggagatttttcgaaaaactaaaagtagaactaccataaggtcttgcaatcccactactgggtatttatccaaaggaaaataaattagtatgtcaaagggctacatttacccccatgtttgttgcagcagtgctcaagtagcaaagatatagaatcaacytaagcgatcatcaacagatgaatgaagaaataaaatatggtaaatgtgcataatagaataatacttggccataaagaaataataaaatcctgccatttgcagctatttggatggaactggatttcattatgttaagtgaaaggatccaggcacagaaagacaatatctatcctcattcatatatgggatctgggatagtttatcttacagaaacagagagtagaa

SEQ ID NO: 599182 - DNA, 621 bp, Homo sapiens
aaaaactaaaagtagaactaccataaggtcttgcaatcccactactgggtatttatccaaaggaaaataaattagtatgtcaaagggctacatttacccccatgtttgttgcagcagtgctcaagtagcaaagatatagaatcaacctaagcgatcatcaacagatgaatgaagaaataaaatatggtaaatgtgcataatagaataatacttggccataaagaaataataaaatcctgccatttgcagctatttggatggaactggatttcattatgttaagtgaaaggatccaggcacagaaagacaatatctatcctcattcatatatgggatctgggatagtttatcttacagaaacagagagtagaatgataccagaggctgagaagggtatgtgtgtgtcaagtggtgaaaggacatgaaaagagatcggttaatgggtacaaataaacagttagatagaaggaataagttctaatattcagtagcaaagtagagtgtctatagttaataacaatgtatagttcaaaatagctagaaattaggacttggaaygttttcaacacacagaaatgataaatactcgaagtgatggataccttaagtaccctgaattga

SEQ ID NO: 599183 - DNA, 642 bp, Homo sapiens
cagcttaggtggcagagtgagatcttgtctcaaacaaataaacatacaaacaaacataaaaacccgatattaaatctgctctgatcttgcatctccttctcaactactgaaaatgatttatcaccttcccaggaatgctaaaatgagttggaagttcctagcacaatacctatccacctctgtaactccatctcctccattctcactctttttgttctctgctttccagccacattggtctctttgaggtatgaatggtgcctaygaagtccttccccagggtttttgccccaaccccttctccttgcctaataaatatctactcatccttcagatctactcattgttatttcctaaagaaaaagtttttgaggcccatatctttctgcaaaattggttgcttttgctgtatctttcatataaaaaaaattccccagagcccttatcacttttgtatttagacatttagaatagatattcataattatttattaatatctgtctccactactagactgaaagcatcttgaagcaatacgctatttttgatcacccctgaacccagcgaatgtttgcaacacaggagtcatttagcaaatattcattgaatgaatgaatagaagaaagaacaaggactgccag

SEQ ID NO: 599184 - DNA, 642 bp, Homo sapiens
cagcttaggtggcagagtgagatcttgtctcaaacaaataaacatacaaacaaacataaaaacccgatattaaatctgctctgatcttgcatctccttctcaactactgaaaatgatttatcaccttcccaggaatgctaaaatgagttggaagttcctagcacaatacctatccacctctgtaactccatctcctccattctcactctttttgttctctgctttccagccacattggtctctttgaggtatgaatggtgcctatgaagtccttccccagggtttttgccccaaccccttctccttgcctaataaatatctactcatccttcagatctactcattgttatttcctaaagaaaaagtttttgaggcccatatctttctgcaaaattggttgcttttgctgtatctttcatrtaaaaaaaattccccagagcccttatcacttttgtatttagacatttagaatagatattcataattatttattaatatctgtctccactactagactgaaagcatcttgaagcaatacgctatttttgatcacccctgaacccagcgaatgtttgcaacacaggagtcatttagcaaatattcattgaatgaatgaatagaagaaagaacaaggactgccag

SEQ ID NO: 599185 - DNA, 575 bp, Homo sapiens
aataattactatagaaagatgcttgggaatctcaggaggttcgtatatcagcttacttaggcagtgaagaaggacaacgcttcattaatcctttcttgctgtcttgcagctttatttaagactaggttatactctcaccttcttttcctacatcccccttctcccagtgcgataggaacaacagagtgataacgtctttcatgagaatccacactgtaagaackgtagagagtttgaactctaggtaactggtgtgtccctattgacaaactgaacttaataagaatacttctaaaatagatttactctagcagcttccttgcaccaggtagtagaagtaacaaaagcatcttgaaggtggtatctcctttcctaatgtgtctgagaagcttctcttcctattatcatcttatttgttctgtgtaccttcttttaagcacctcactctacaagactgcttcctgtcatcaccctgctctggtctctcatatccatttcgaaggatagctgaggtgagcacctggacatttctgaaaaaacagagggggaaatgctgttaacacttctgaccatgc

SEQ ID NO: 599186 - DNA, 588 bp, Homo sapiens
atattattgcatgaggaaaaaagagagacacagattattttgtgtttaaaatatacatgccagacattattttaaaatttgktttatcttatttgacaactagtggttgaccaaatgatctgtcatatccaatatattacagtgtcagtcactatagtgtgagtggttatttttgagtattaattttgctaacatcatagtcatatttatttatatttcaacatatatattcatcttagttgccataattgacactttacttttaaaatatatttaattgcccttatcacttaaaattttatatttttatttcatatttaactttgatgagaaattcctaaatcattagaaattttgccaacaatattctgtcaaaatcaaggtatgcaagatataagttaaagtctagaaaagtatagaacctttgagaaacttagcctttattactcattttcactgactgtgtgttttaggtcagagcagataagaattaactcaattactattatattctcatcaaccccaccaaagtcagaaactagcaaaagttaattcaggtcacagtttatacctgggaaagtttctgag

SEQ ID NO: 599187 - DNA, 588 bp, Homo sapiens
atattattgcatgaggaaaaaagagagacacagattattttgtgtttaaaatatacatgccagacattattttaaaatttgttttatcttatttgacaactagtggttgaccaaatgatctgtcatatccaatatattacagtgtcagtcactatagtgtgagtggttatttttgagtattaattttgctaacatcatagtcatatttatttatatttcaacatatatawtcatcttagttgccataattgacactttacttttaaaatatatttaattgcccttatcacttaaaattttatatttttatttcatatttaactttgatgagaaattcctaaatcattagaaattttgccaacaatattctgtcaaaatcaaggtatgcaagatataagttaaagtctagaaaagtatagaacctttgagaaacttagcctttattactcattttcactgactgtgtgttttaggtcagagcagataagaattaactcaattactattatattctcatcaaccccaccaaagtcagaaactagcaaaagttaattcaggtcacagtttatacctgggaaagtttctgag

SEQ ID NO: 599188 - DNA, 631 bp, Homo sapiens
tggatttcccttctaggacaatggctagttacaaaaacgtggatcatttggtttaacctagcagatacatttataaaaagatacttcagattttttttttattcaaggcggaaatagatattctgtgaagtcagtgacttctccagccctggaaaggtgaacccagatttagtgaaatcctctgtttaaacagtctgtcatctctgctccttttatcagaaaaaaatgttttgtgttgagacatttttaggggtttctgatggtggaagacgttaaacacatttctctgttagtatttcagtgccatttttatatctagttgtaagaaatagttaagctttcttccctcatgtaacttcagtacagaagtttctcaactggcttgcagacagtacaggttaaacatttawaaccaaggaatcagtgactttatgactgataatttttatgttttgtgattgtttagagattaaaatcataatgtaatattaaatagtataataataaaaaaaaacgcaggatccttttaggaaagaaaagaaaatcctttttgtctaaaaaacaattaatttaatataacacatttattgagtaccttatgcaaacttgtcactttgcatacatttttaaa

SEQ ID NO: 599189 - DNA, 550 bp, Homo sapiens
cataaaatacgaccaatttaaatgcaattttcaaaaaccacaaattttgcatatttttaaataacttttttttcattttacaggttatgtatagatgataaagttaacttacatacaaaaaaaatatgaataagtaaataaagttcctgtactctcacytctcagcaattacatcattaacttcataatatacatgactatctacatttttttggtatagattcaggggtacattacaagttcgtttcatgggtatattgcataatcctagggtttgggcttctagtgaacccatcacccaaatagtgaacatagtactcaacaggcagtttttcaacccttgcctccctccctcacaccttttggactccccagagtttctagttttcatcattatgtccatgtgtacccattatttagctctcagttataaaagataacatgcagtatttgattttcagtttctgatttgactttccactttttgacaaacattttacaatggcgaatcaatttatttttgtgtattgctgttttcccttaaccttgt

SEQ ID NO: 599190 - DNA, 550 bp, Homo sapiens
cataaaatacgaccaatttaaatgcaattttcaaaaaccacaaattttgcatatttttaaataacttttttttcattttacaggttatgtatagatgataaagttaacttacatacaaaaaaaatatgaataagtaaataaagttcctgtactctcacctctcagcaattacatcattaacttcataatatacatgactatctacatttttttggtatagattcaggggtacattacaagttcgtttcatgggtatattgcataatcctagggtttgggcttctagtgaacccatcacccaaatagtgaacatagtactcaacaggcagtttttcaacccttgcctccctccctcacaccttttggactccccagagtttctagttttcatcattatgtccatgtgtacccawtatttagctctcagttataaaagataacatgcagtatttgattttcagtttctgatttgactttccactttttgacaaacattttacaatggcgaatcaatttatttttgtgtattgctgttttcccttaaccttgt

SEQ ID NO: 599191 - DNA, 618 bp, Homo sapiens
gggttttgtcactctaattatgggctgcttcaccccacatccattcagagataataaaatatagcagtgtcccacataaactgtaatttttttcttatagccattagtgttatttcaaatacttaaaagtaacaactattgccttaaagcattctatggtttagattgtcaccaattcacaattattttttccctctgtattcctaaaagaattttattgtgcagatccagggttctgagatttcattataaattacttgatgatgtaatatgttatgacaaacagtagaatttgattcctctcttaggttaacagtgaaactagatatttgaatatattataaatctttttgtattagaaaggtaaggtagaaataatcggaaaacaaaggttaccaccaagatttctctcyctcctgctctctctttaacaaaacagattttgaaaccttttttcagaaactccttttatctataagagcaagaatttctttttgaaacccacattgccagcagccattccactctaacttatcaacttaaaaaggattcacatattccaatggctgcctgcagtatgtgtaggatgtttttatatttaacatctataacatttca

SEQ ID NO: 599192 - DNA, 495 bp, Homo sapiens
gcatgaaagaaaattttaactgcaattgcctttcttcctagcacagtgctcactgttattaaagccataggtctctggctctttctctctgatggacaaacgttttyctctgaccagatccattgttgctattggaagtgtggcctgttcaccctgtgctgtgtcctgcaagccatggtggggtgcaagggagttgtatggaattgtctgagtggcttttactttagtgcctgacaatttctcattcttcagatatggttaacgatgcctgttcacatatttacagcttcacgtaaatgattcagtcactgcgttgccatcttgggaaagagccaaggaagctttcttttcatctgggtatcctttgagtataactaagcatgtcacataattataatcctgctcctttctaaatctcatatacagttttgagtgtgatattttattagccttataacagcactatgagttaggcaatgggcagacattatcctc

SEQ ID NO: 599193 - DNA, 435 bp, Homo sapiens
taacccagatctctctagggaacaggcttcaatttatttctattgctatggaaattccagatggagaagtgaaaaatagaccatcttttatctaggataggaggcatctaggagtgtaatatttcgattggccaggaatgtattattttccagggtgatggacatcctttgtcctgccctrgttatttaaggattgctcagcactctaatgcttcccttcccacatggctgtcactgctgcctcaattattcacctttccccttcagaatgatcttttaggaaagggaattctctaagaggactctcaattcataattggatgagttgtaccaaaactccctctttcactctgcttggcagaattggggaaggtatcacgtggtgatagcatttgctttcaaatttgaaggatgagtataggtattaactagttc

SEQ ID NO: 599194 - DNA, 566 bp, Homo sapiens
atgcagtagtccctattatccgtagtttcacttcatgcagtttcagttacctgtggtcgaccatagtccaaagttattaaatggaagatttcagaaataaataattcaccttttaaattgcacaccattctgaataggtgatgaattcttgtactgtcctgcttagtcttgccaggatgtgaatcagccctttgtccagtgyatccatgttttctacgctactgcccgttagtcacttagtagccgtcttggttatcagatcggctgtctaggtgttacagtgcttgtgtgcaaccaacctttattttacttaacaatggccctaaagcacaatagtactgatgctggcatattgttctaagtgttctattttgttattagttgttgctgttcatctcttactgtgcctaatttataaattaaactttatcatagctatgtatgtataggaaaaaccttattatatgtagggttcagtactaccatggtttctcaggcacccactgagagtcttggaacatattccatgtagataaaggggaactactttgtgtgtgtgtgtgtgt

SEQ ID NO: 599195 - DNA, 566 bp, Homo sapiens
atgcagtagtccctattatccgtagtttcacttcatgcagtttcagttacctgtggtcgaccatagtccaaagttattaaatggaagatttcagaaataaataattcaccttttaaattgcacaccattctgaataggtgatgaattcttgtactgtcctgcttagtcttgccaggatgtgaatcagccctttgtccagtgcatccatgttttctacgctactgcccgttagtcacttagtagccgtcttggttatcagatcggctgtctaggtgttacagtgcttgtgtgcaaccaacctttattttacttaacaatggccctaaagcacaatagtastgatgctggcatattgttctaagtgttctattttgttattagttgttgctgttcatctcttactgtgcctaatttataaattaaactttatcatagctatgtatgtataggaaaaaccttattatatgtagggttcagtactaccatggtttctcaggcacccactgagagtcttggaacatattccatgtagataaaggggaactactttgtgtgtgtgtgtgtgt

SEQ ID NO: 599196 - DNA, 589 bp, Homo sapiens
attactaagttccatgatcactgttgcatctgctttcaaacaaaatttacacttcatttaaccttgtttaatactaggtcattattaaaactgtattctagtggcttcttagatactactttcccctggttctcataatatctctgattttcttttctttttttttcctcagtggagttttttctttgatatttctgcaacactgatatttagccgtagaactatttttcctgttttatactctctccacgaatcatctcaccaatttctaagatttctgtaattacctagctacacatagtgagcatatcaatatatccacccaggctcatctgtcttctgatttcagacatatatttattgacatattacttgataactccatttatgatgccacaggttgctaaaactcagtaactaaacaaattatttgtcacctctctacttctacaaatcccaaaatgccacctctcctgaaaatactgcttttactrtattgcgctctttgcgttggcatcactattgatctagaatagaaactttctgtttccatctagaatataaactttctatagaaactttcaaagag

SEQ ID NO: 599197 - DNA, 379 bp, Homo sapiens
tactctaaatctactgacttaaatgttaatttcatctaaaaaatgccttcacagaaacacctagaatgcttgaccaaatatctgggtaccctggtcaagctaaattgatgcatagaattaaccatcacacctattcataatgttgaggactatttacacacacacacacacacacacacaagtgttgattagactgagcagaccatttatacttgtgcactcattattcacttcattttgaagcccttattgctataccttacatattttaagaaatcaatatctatttgctgattaactgactgaatagaaagaatgaatgaaacaaagaaaygcatgaaaggaaggaagggtttaggtacgttggtcacacagcatg

SEQ ID NO: 599198 - DNA, 567 bp, Homo sapiens
catatttaatagcaatcacctctgtaatccaaagggaaccagctagacatatgatgtccctctataagggtggctttaattccagagagaaagtgwagagctgagattttctattcttaatgattaagattaaaggtacttttgatatgattaggatgacctatttttaccactgaagtacattttaggttgggcttttcattgaacagaggttttaatatttggtgattgttaccaaccttcgaataattagatgaaagccaaagacattctcctgggaaacatacagacaagttctacgttaaatttcagggggttcaaaagagtcctcagtgttcatgcaccccatggtgtgttattcttaatccccagggtctacaggtatatataaacttactcagacctttcttgtaagaatgagtgatggtatgaaaatgtgtattgtccttgttcttcaggaactttgtgcagatatttaaagttttgtgcaacagctctggaagcctgtgtccttaaggcttagttttttctgggagacgacgtatgctttcatcctgtaggcatcaa

SEQ ID NO: 599199 - DNA, 567 bp, Homo sapiens
catatttaatagcaatcacctctgtaatccaaagggaaccagctagacatatgatgtccctctataagggtggctttaattccagagagaaagtgaagagctgagattttctattcttaatgattaagattaaaggtacttttgatatgattaggatgayctatttttaccactgaagtacattttaggttgggcttttcattgaacagaggttttaatatttggtgattgttaccaaccttcgaataattagatgaaagccaaagacattctcctgggaaacatacagacaagttctacgttaaatttcagggggttcaaaagagtcctcagtgttcatgcaccccatggtgtgttattcttaatccccagggtctacaggtatatataaacttactcagacctttcttgtaagaatgagtgatggtatgaaaatgtgtattgtccttgttcttcaggaactttgtgcagatatttaaagttttgtgcaacagctctggaagcctgtgtccttaaggcttagttttttctgggagacgacgtatgctttcatcctgtaggcatcaa

SEQ ID NO: 599200 - DNA, 567 bp, Homo sapiens
catatttaatagcaatcacctctgtaatccaaagggaaccagctagacatatgatgtccctctataagggtggctttaattccagagagaaagtgaagagctgagattttctattcttaatgattaagattaaaggtacttttgatatgattaggatgacctatttttaccactgaagtacattttaggttgggcttttcattgaacagaggttttaatatttggtgattgttaccaaccttcgaataattagatgaaagccaaagacattctcctgggaaacatacagacaagttctacgttaaatttcagggggttcaaaagagtcctcagtgttcatgcaccccatggtgtgttattcttaatccccagggtctacaggtatatataaacttactcagacctttcttgtaagaatgagtgatggtatgaaaatgtgtattgtccttgttcttcaggaactttgtgcagatatttaaagttttgtgcaacagctctggaagccygtgtccttaaggcttagttttttctgggagacgacgtatgctttcatcctgtaggcatcaa

SEQ ID NO: 599201 - DNA, 378 bp, Homo sapiens
ataaattctatacatatatttgatgtctagcctgtggaatttttatgtgcctcgaatttgcttataattatgaatctttaccacccatttccatttgttacttaagtatatatacaatcaaatatcacttaatgcagatatatgttctgagaaatgagtcatgaaacaatttcttcgttttgagagtaccatagagcatacttacataaacytaaatggtatagactactgcacacctaggctatgtggtataacttattgctccagggtacaaacctgcacagcatgatactaagctgaatactgtaggcaaatgtaacactgtggtaagtatttgtgtatccaaatatgtctaaacatagaaaaggtacagtaaaa

SEQ ID NO: 599202 - DNA, 600 bp, Homo sapiens
gttgtctatatttattgtcattcatgctgttgcatatttcctaggagaaccaaaatcaagtcgttgatttctgtgcttttaaaagtagaatrtctttcagctttttctgagttaattttgaatcagtattaggaggcttaactgtgatttcatacaacatactgttaccttgaagacacagagatttttttttaaaagtacaaaatctggcttttgtcttaaaggcattttcccaagcaggagagtttaagcacgatttttaaggtttcacagaggtaagaaaataagacaaagccgaaggtgagaagtttaatgggaggcctcccataaagccaggaccttaaagagttacaccttagcacacagatgaactagaaataaacctatccccatcctcaggggactacaaagaaattacctgttccaaactttggcagcaagtaaaaacggaaagaaaatttctcctgaaaatttgcaactacaagcaacctttgactggcatcggatctcagatgaaaaccatcttggtacactgtgaacctcaggccaggatttaatttaaaatggctggtcctggactagaaggtatccccagacacc

SEQ ID NO: 599203 - DNA, 572 bp, Homo sapiens
cttaatcaaatcctagaaaaaagcctcatcttttttgttgtactgtycttcaattatagtagcttggcaaaaatcccaatcctggaggaatccaagtatttatcttctctaaacctgtaatcatacagctgaatatcacagaagaaaatcatgccattgaaaagctgagcttatgataaattcataatcaccaaatacaaatagaaactcaaaactgtcagaaagtacctttctactctttgaattctctattttcaaatttctccacttcccactctcatctcactttcattcagctactgaccttctctcaaaaaacactgaaaaaatataaatcatcagaaaggatttctctgatttccccattgccagctttccaaatttactggagataagtctcctattaaagacaagtgcctcaccttctcaatgagcaaggtcctggagttatttctcacttctccaacattatcatctcctttctctgccagcttaaaaccattacagctccctctaatctttaaaaataaaacaaaaatcttccttagcctttatccccctctaacaactga

SEQ ID NO: 599204 - DNA, 558 bp, Homo sapiens
tcattaataaattaaatgccaattaagtcaaatccaataattaaaaaattagtaatgataacattattatcatatgacattgaacacatcaaattattttcaagttattaacctttttaccgatagcatatctaaaactgcacagcattttaagcaaaactaggagacatttgagcaaaagcttctatggtcattcattttagattgagtatgattcagctgccatctggataaaaacacaatattatctcttcagaaagaaaattaactttgacatactgtctctgctcctctatgattttctgactttttacttatctgaaaacctacatgtaagggacaaaacactctctcacaaatgtaagcctgcagttttcaactaaaaatcctgcatasacatgttaccacataacaccacattggaacacaagttattgagtatgttgttgctactaataatccctatggctttgtgcctgtcattaccttcaggctatcagaattttatgagcacaaaccaataataatgatatttcctttttgctttttatccacacc

SEQ ID NO: 599205 - DNA, 512 bp, Homo sapiens
aatttacaaattttatatattactggtactgattcatcctgatataatcaaatcaactcattcaaagagaaaattggacattacagaccacaagcaactggattgaagttatgaggttagtaaaatgtggtaattgttgatttgatttccttatatctctcatcatatgtcctggtaaaattgttgaaatcagctgagaacattctctgctctagctagagaagtatcatatggtcttaatacaatattaaggaagagatgaataaaggagttaatactttttaaatctccatatggtaaaaaaaaaaaacaagtaaaaataatgcaaataatatttaatcaataggacaaagacatttatggatcaaatgtgtcagacggttagccattcaccaccacttcccctgccatctacactcytgtgcactgtatgggttagaagcttgaatgctacatttccaagaatcctttgctagttaggttcaactttatgttctgcaaaatgaaaagca

SEQ ID NO: 599206 - DNA, 595 bp, Homo sapiens
aatgaagaaagtgtttcaaacgtaaaatgatcattacaaagtgtgcttaagaaagcaagtcagctaccatgcagactggattttgcaacatggaattaatttttgagttgacaagaaaagtttgagtaaatgataagaatgaaagcttaattgggggattttaaaagaaaaagagaagagagaaatcaggcttttgctctaagagtgtaaagatataaaaatagtctgggtggagtaagtcaagggaatttttaccaggatcaaaatattttaacattctacagagggaagaataattgagtagagaaggaaaaatggatgtttcaaaagacaagaaacagctcaacgtgaccaacatcctagagtagacaagaggatggagtccggtacagagtggaggcattggcctatatcatagtacagaccttcattcactgtgacaaatagcaagggaagcagagtatayaggaattgataggtgagatgcacagggttggaggcgtaagaacattgatttgtttattgcttctaatattttagtgaaataaaagcagagtaatcagatgagagtgaggagggataacagaatgtgaac

SEQ ID NO: 599207 - DNA, 430 bp, Homo sapiens
ctcaagtacccagggacacaaacactgcggaaggcggcagggtcctctgcctaggaaaaccagagacccttgttcacatgtttatctgctgaccttccctccactattgtcctatgaccctgccaaatccccctctgtgagaaacacccaagaatgatcaataaatactaaaaaaaaaaaaaaaaaaaattaaaaattaaaaataaacagcctgcctgcaagcctttgagctatttaaaatagctcaaaatttatttatttaaaataaataaataaataggtagttggttaaaattaaatatgaaaacyaattgctgtatataaagaaataagaaccattcaatcatgcagatacatatactaggaaaaaagattttattcaaaataaccaaaataacaaaaagcataagatatctaaatatatatttag

SEQ ID NO: 599208 - DNA, 558 bp, Homo sapiens
gcgattctgcttctgatatcaaaagttaagtataaagtcaattaaactggctttgtaaaagttctttgatagcattgaaacataattcagaaaaaaattgataaaattttaatgccctaactgaactgtttttaggttacttaagaaaatgatatttttgtaacaaattagacctaactatataagaaaagatgggtgtttttctgtctcattgatataartagtgaaattaggagggcctgaattctaaactgggtaaatattgccttccttttttgcttaggaaaagtgaattatggctaaatactcaacataaatctgcctcattacttttgagttgataccatctgtgttctcctttgtttccatatactctgtgttctccatatttttctagattattggagccaagataggctgttcaaacaaacttaaaaatgttttcaaataagaagagggataacacttaccttgaaaacttgatcaacttgatgcatagagcctgggaagcagttaagttttaattaaagcattgagcctgcgtgtgacagtttcata

SEQ ID NO: 599209 - DNA, 624 bp, Homo sapiens
tttcacaagtctaagtaatgtgttgacttctcaacatctagcctacatmtttctattgtgttgtggagtcaaattaaaagtctaaaaaacacaaaggggaaaggcaatctgaaaaaaataatgctttcatttggcaagaattgtacttctggccgggtgtggtagctcacacctgtaatcctagcactttggggtgctgaggtggttgggatcacttgaggtcaggagtttgaaacccagcctggccaacatggcgaaaccctgtctctactaaaaatacaaaaattagccgggcgtggtggtgtgcacctgtagtcccagcttactcaggaggttgaggcaggagaattgcttggacccaggaggctggggttgcagtgagccaagttggtgctactgcactccagcttaggggacagagcaagactgtctcaaaaaaagaaagattgtacttctttgtgagaaaataaaaagctgggaaacagccagctgtgttttgaaatgttatttttatttcctcattaaaaattcaagaaatcaattgattaaatatagcaaaaggcacttttcacagtacgttttcttgaaatgtttatacaactaatactgttaatgaaaataaat

SEQ ID NO: 599210 - DNA, 566 bp, Homo sapiens
ctaaccacagctggcttctgaatggatgagctgctacaaaatgtagtggtcaaatatgttacctaatactacaattggggaaaatggatatgggctgctgctttgccctatgtgtttcctcacgcaggaaacacagatttctttgtggatattaagaacatgattatctacaaagtcctggtgggggagatctctgatgctcacagggacacagatccaagacatggagaagatgacgcagatatgaccgaaacctctgcaactgaggtcctgggcagaggagcagcttaacttgcccagccattggcatcgtgtctactgatgcgactgcagactgtggaaggacatgcagctctgacggtggaaactgagcaaaactaggggggaaggacacgctgaacactaaaggcacatgaagaacctcaatgtcaatgcccaaaaacatgaggaagttgagagttgaatacatcagtcaaattctgtggtgaaggctgaaaaaaggtagcaagatattmaaaaattcaagccagaaaagggaatcgttaagatgaaatgctcaaaggctg

SEQ ID NO: 599211 - DNA, 588 bp, Homo sapiens
atgatagtagtaccagagaacctaatgctatgtctagcagtatgtcttggggaatcaaggatccagtttagaaaccagggaccatttccctctctgtagcctggacagcctacatgagggtactttctcctctgcttttcatctgcaacaaaggaaccaacactgcctctgcttccttctttagctggggccctgcaggtggggcaggaacaaaggggaaaatagggattgggcataggactcmcaggggcctatggctgaggaactgggtagggcctaggcagtgcaaggccagtccaggctggctcctgattgaccctctctcttcaattctcttcatgtcagggattgtcttgccattttaataccttcgttcttttattccttcttttttccatcaaaaattttaggtgcctattacatgtcagacactttgctcggtactgtgcaggtcctgagataaataagactcaagaatgaaacttttactaaaatttaagctccaaaagagaaacactcattgaatctccagtgcttaggagatcatctggcacatagtagctactcaatagatatttgttgactgag

SEQ ID NO: 599212 - DNA, 560 bp, Homo sapiens
gctgctataagctatcagtctagggataaacccccttctgtgatagcacaatgggctgaaacatccaaccaggaagtgggacattaaaataattcttcactgagttgtggagtgagtaggtatcaactctcttataattgatattcaaattgatcataagcaccaaaaagaagttccatatgataaaaaggaaaatgcatatgcaatagtaagaattcgagttcagcagatcttaactggcactaggaaagtccacttagcatgaatgcactttaaacaagggccaaacatcatgataaatactgacaaaaaagttttaattagacttcatcttttaaaatggtaataaacttatgaaaaatgcattatattttaggtaatgcaacttaaattataattacacaatgtgtttcttcttagaatgattaaagattaagtgaagtgttgaattttttgagcatagtttttttgatraaacggtgtttgacttttacagtataatcataaagtgagtcatttttatgaagatattcatgggcctgatcatttttttcccaagg

SEQ ID NO: 599213 - DNA, 560 bp, Homo sapiens
gctgctataagctatcagtctagggataaacccccttctgtgatagcacaatgggctgaaacatccaaccaggaagtgggacattaaaataattcttcactgagttgtggagtgagtaggtatcaactctcttataattgatattcaaattgatcataagcaccaaaaagaagttccatatgataaaaaggaaaatgcatatgcaatagtaagaattcgagttcagcagatcttaactggcactaggaaagtccacttagcatgaatgcactttaaacaagggccaaacatcatgataaatactgacaaaaaagttttaattagacttcatcttttaaaatggtaataaacttatgaaaaatgcattatattttaggtaatgcaacttaaattataattacacaatgtgtttcttcttagaatgattaaagattaagtgaagtgttgaattttttgagcatagtttttttgatgaaacsgtgtttgacttttacagtataatcataaagtgagtcatttttatgaagatattcatgggcctgatcatttttttcccaagg

SEQ ID NO: 599214 - DNA, 606 bp, Homo sapiens
ctctttcttatgttagctattaggtttttccttctgtgaatggtttgattcagtgtttcattgggttaacttgtctttttcgggacaagaatataacttttcacttgactctattattttattytttcctggtactttcaaaaataaaatgaatataccaagtctatagtaacagcttaagagactgacaattattttctatttcaatgccttgttagcttccttcctagtgctaattacacctttgaactgtattatttatttgtggtttacttgctattggtcaatctctcccactagaagatattctctatgagggcagagatcctgtctactttatctaattgtcttatccctgcactcaggtgagtgtctagcatatcataggtgcttaataaagaactactgattgtgttcatcaattgaatattgaggtgcctgtgtcaggtactgagttggccctgaggagtcacaagagaaagtcactgccttcaaaaggagcttgtaaatcatcttggtaagacaagaaatcatagaattacaacaaactatggcatttgctagttcaactggaaacttgtctccgtcaaaagactcaagcccttt

SEQ ID NO: 599215 - DNA, 606 bp, Homo sapiens
ctctttcttatgttagctattaggtttttccttctgtgaatggtttgattcagtgtttcattgggttaacttgtctttttcgggacaagaatataacttttcacttgactctattattttattctttcctggtactttcaaaaataaaatgaatataccaagtctatagtaacagcttaagagactgacaattattttctatttcaatgccttgttagcttccttcctagtgctaattacacctttgaactgtattatttatttgtggtttacttgctattggtcaatctctcccactagaagatattctctatgagggcagagatcctgtctactttatctaattgtcttatccctgcactcaggtgagtgtctagcatatcatagrtgcttaataaagaactactgattgtgttcatcaattgaatattgaggtgcctgtgtcaggtactgagttggccctgaggagtcacaagagaaagtcactgccttcaaaaggagcttgtaaatcatcttggtaagacaagaaatcatagaattacaacaaactatggcatttgctagttcaactggaaacttgtctccgtcaaaagactcaagcccttt

SEQ ID NO: 599216 - DNA, 606 bp, Homo sapiens
ctctttcttatgttagctattaggtttttccttctgtgaatggtttgattcagtgtttcattgggttaacttgtctttttcgggacaagaatataacttttcacttgactctattattttattctttcctggtactttcaaaaataaaatgaatataccaagtctatagtaacagcttaagagactgacaattattttctatttcaatgccttgttagcttccttcctagtgctaattacacctttgaactgtattatttatttgtggtttacttgctattggtcaatctctcccactagaagatattctctatgagggcagagatcctgtctactttatctaattgtcttatccctgcactcaggtgagtgtctagcatatcataggtgcttaataaagaactactgattgtgttcatcaattgaatattgaggtgcctgtgtcaggtactgagttggccctgaggagtcacaagagaaagtcactgccttcaaaaggagcttgtwaatcatcttggtaagacaagaaatcatagaattacaacaaactatggcatttgctagttcaactggaaacttgtctccgtcaaaagactcaagcccttt

SEQ ID NO: 599217 - DNA, 497 bp, Homo sapiens
tgagccagcttccccaaaccctgccaaggcatggctgaatgacctacttgaggtcagtgattaacaaggtcagcagatagcatttttctgtatgaattttataccaccccggcctttcctgaaagacagttgatagatacaagaaccggttcttttaaaatgagagcatcacagaacataggtaaactgaaaaaagttatctccttaaaatgaatttgcagtctctcaacttcagaacttcttacagatttactataaaattagaacaaaatscttcagacgatctaagaacaggacaataataacaatatatttctttcagctttgagtctaaccccaaacaaagaatgccaactaaatcttggaaatatattaagtttcactgttctgtgttttctgaaaaatgtagatttcaagaccaacatggaaaagctgaaccttttgcaataaaaggaaatactcagtactttgtcctttgttgcttggcaactaagggc

SEQ ID NO: 599218 - DNA, 497 bp, Homo sapiens
tgagccagcttccccaaaccctgccaaggcatggctgaatgacctacttgaggtcagtgattaacaaggtcagcagatagcatttttctgtatgaattttataccaccccggcctttcctgaaagacagttgatagatacaagaaccggttcttttaaaatgagagcatcacagaacataggtaaactgaaaaaagttatctccttaaaatgaatttgcagtctctcaacttcagaacttcttacagatttactataaaattagaacaaaatccttcagacgatctaagaacaggacaataataacaatatatttctttcagctttgagtctaaccccaaacaaagaatgccaactaaatcttggaaatatattaagtttcactgttctgtgttttctgaaaaatgtwgatttcaagaccaacatggaaaagctgaaccttttgcaataaaaggaaatactcagtactttgtcctttgttgcttggcaactaagggc

SEQ ID NO: 599219 - DNA, 582 bp, Homo sapiens
tgctgtacttagaagtcatttttccttattctttaaagccatgttgatagcttgctgaatggattccagtatagaaagcatatatagctggtagtatgcaaagcaatatggcagtccaagctagagtcctctctgtaggatgacttagaatgaatgggatttgctttctgactggtttggcagggatgcagtggagacatctcagggttttgaccctgaatcaatcccctttgggctgagaagaagatgatttcatggcctggacagtccagaagccacttgtacaaacaccgcactaaatgtgcgtggtgcatctggttctcccttgtctgggcagggtgtttgtggycttcctttggaggaagctgcctcccactgctaggctaagagaggcaaatatgtgaaggggatgcaaaggcattcatgcttcagtcaggaggtgagtgctatcacaacagtggcggcagcacaaatgaaaggttttctttccccattgtggaggtaaaaggacccatgctgggtatatggagcatatggcccttgtgagttgaaaactccaggcttcagcttttactgactgag

SEQ ID NO: 599220 - DNA, 593 bp, Homo sapiens
tgtttttattatcacccaattccctcaatctcaaaatcaatattaattaaatatataataataaatggattcataatggrgaataaaaaaatgcaaccagttatggccaactgtatagtgtttaatggctgaaatatattacaaaattactgatcattcagcataaatattcagccagaatcttagagggacagaatagtttcttccttgcaatgagttccattttcccttttagataaatgtatgtagctgggattacaggtgcacgccaccgtgcccagttaaattttgtatttttagtagagatggggtttcattatgttggccaggctggtctcaaactcctgacctcaggtgatccactaacctcagcctcccaaagtgctgggattacaggcctgagccactgcgcctggcctcaggtagtctgttttacagaggaaatacagagtgtcagacaatccagtaagttagctcattaattgaagtcagttacaagaaatactagcaacataatcagcagatttcactttcctagctgacttccctcaagttcaatgtggtatttggttttgttttagaatataacttct

SEQ ID NO: 599221 - DNA, 436 bp, Homo sapiens
agagaagggaggaggagaacagtcaaaggtaagtcatttyaaattttcactatcaagaattcctttaaaagtttctccgttgacccatgttttgatagcttttactctactaagtagatggtatttatcactcaataacttatttctccacttttattaatcgaagacctatatgggattgttaggaatactgattagcatgagctaagtgtaggggaggtagggatacccttcactgcacctttactcttctatgggctctttggctgggtctgggagccaaactgacacgaggcaaattagcaagagaaaagcatgcatgttttacctgagtgtgggggcatctccaccagagtgtgaagtcccaagaaatggccaaagcttttataatttttagacaaaaataaatttgtgaagaaatgacaggacaaagaaa

SEQ ID NO: 599222 - DNA, 573 bp, Homo sapiens
cctcattttatacttaagtacccaaaccaagagagtttaaatgagtcttgctcaagaccacatggctcctggtggcaaaaatagagcagaatcttatctgttgctcttcacagcctcaacatgtttaaacaagtgcttgttcccgaagctgttagaaatctttaaaagcatctctaattgtttagctgctaggtttctccattcaagaataaatcagcatctcttgcagcaaggccaaagattcaggatttcaagagtctttcctactgttagtcattaagagcccagttaggaatcaaatatgcacttaaatttaggtaaaacatgcatggattttgcaggcagagagcttgagtttcgatctaccttactttgggcaagtttcttcacctctcttcatctggaaaatggatgcaatactagtaccaatctcacagagctactctgaggagtaattgaaatagtgcatgcaaattgttcacttaccrtagtgacaagactatatatgttttctgttttttgttttttgttttactagacctccacacggatttctgatgatagcagctggat

SEQ ID NO: 599223 - DNA, 605 bp, Homo sapiens
tggcttcatctgtattttaccttatgattacatgctactattcttttttgcattttcagatttccctttaataattttgtaatctagaaagtaagtgtgcttttcaaaagggtaacatgatctactgtgtcttattgaaccccaggcactaagggttgaaactaagttttatccagactagtttcctgtggagcaacacagcaaataggatggtggtcaagtttgcacaggttggcttctcaccttatgtaagaatgtcagagatggtccacttgctgtctgtcccctcactccctgctgtagtcagatgtttatgacttatctgtagaccccagactcaactaaagcataggagcagctcaatgctgggttcttggtgctagcatctaccgcaattcagggtgaaaatactggggtaggggagatgacattacgaagactgactagccactgggcaaggtgctcacagcctcagatgctggacacartcagccgtgtgtgtcactgtggacttggctaactgtgaatctccttcctctggcatttcctatttttattctcagaaggtaactataattttagaggatgcaaaatggcaatccaca

SEQ ID NO: 599224 - DNA, 606 bp, Homo sapiens
  misc_feature 318, 331: n = A,T,C or G
agatctataagagtttatatttgctcacctagattttaatataaggcattgataagatttgtgaaataccaaaaagagaacctttccagartgctatcattttacattttagaatgtaaaaatgttgaagatgaaatagatgaaatggtaaacataatttgagtatatattagacaacctacaattcaccttcttgtccatgaacatattttaacaaattgtcaaataccttggtgacatcaaagcctacaacatatccctgatctatcgttttagaaaaattatgaaacagtaaatccaatacatactggactatanctggttcatgtancttgaacagttcaaagataggactgggttgatgcagatgctaaagtaatgtcacccagacctagtctctcttcttggttcagtgctcctccattttgacctccatcttagggtttacataatacatgatatatgctggcagctcccagcctacaccctcccaggcccactacatacaaatcactttcattgtttgaggagttacaagaggcatacaactaagtaagacagcctttcaccacaaaaggcagtatagtctaatagagaaagcatgtg

SEQ ID NO: 599225 - DNA, 594 bp, Homo sapiens
  misc_feature 300, 313: n = A,T,C or G
atttgctcacctagattttaatataaggcattgataagatttgtgaaataccaaaaagagaacctttccagagtgctatcattttacattttagaatgtaaaaatgttgaagatgaaatagatgaaatggtaaacataatttgagtatatattagacaacctacaattcaccttcttgtccatgaacatattttaacaaattgtcaaataccttggtgacatcaaagcctacaacatatccctgatctatcgttttagaaaaattatgaaacagtaaatccaatacatactggactatanctggttcatgtancttgaacagttcaaagataggactgggttgatgcagatgctaaagtaatgtcacccagacctagtctctcttcttggttcagtgctcctccattttgacctccatcttagggtytacataatacatgatatatgctggcagctcccagcctacaccctcccaggcccactacatacaaatcactttcattgtttgaggagttacaagaggcatacaactaagtaagacagcctttcaccacaaaaggcagtatagtctaatagagaaagcatgtgctttgg

SEQ ID NO: 599226 - DNA, 519 bp, Homo sapiens
aagggattgttgtgagagttaattaacagatatgcaaagcacatggcatagtgcccagcacctagtaagtgwtcactaatagtcactaatgttattatcattactgatgagcaggctgagctcaaagcagaaggaacttgccaaggccacagagccaggaaataggagaactaggtctcaaactcggttctatctgatgccagggacactgttctgctctgctaccttccttccttcttccctacctgtaataggagacccctaatccctatttggagcagatagatggcacacagtgggaagagcaccaacccactgccaccttccaagtctgtctcttcccagtaaggaatcttagcacatggattccaggtattattctgggcctagataaaaaaactaaatgtcctatcatggaagtctcttaaggagcaccagaagacaggaatggaaacattcactggcttaaacacctggttccttggcattcccagagatgaagctaatgtcctattgatg

SEQ ID NO: 599227 - DNA, 618 bp, Homo sapiens
ctgttttccgtccataggagccaccctgccagtgacaaagaagcagatatgagacactagattctggggttacagggatctctagcaggcagtggtatttctcaactcaagtaaaagccaaaaatggtcttaacattgagtggcaggcatccatttgccccacaaagacctgattgggatgctcatagtaacacttttcatactagccccaacctggaggtgactcaaatggccgctggcaatagaaacggattgaactgccccacctgccaccagcacctgtgcttactgtcccagggcctgaggataggatcgcctcacctgccattgttgctggtgcctgtgcgcatctgggggaatgggggtmaaactgtcccacctgcggccagcacctgcacacaccattagggaacctgaagacaggctcgccccacctgccaccagcatccacatgtgctgcccaggggccaggagattaacccgtcctctttaccaccagcagcacaggcacacaccatccagaggcctaaggatgggcccactctgcctgccactagtgaccacatgtgtctcccaagggcctggggaccagcctacccagcttgccatcactgatgc

SEQ ID NO: 599228 - DNA, 573 bp, Homo sapiens
gcgacctttggggtcactgcatccagctcaccccttttattatgggcaaacaaggcctgggaaaaggaaaggccaggaccctgaactaggtggccctattcaccttttgtccctttgggagtctgacttcctgggttcgaatcccctcttggccacttctctttttttttttttttttttttgagatacagtttcactctgttgcccaggctggagtgcagtggcacaatctccactsactgcaacttctgcctccagggttcaagtgattcttctgcctcagtcttctgagtagctgggactacaggtgcatgccaccattcccagctactgtgtgtgtgtgtgtgtgtgtgtgtgtgtgtgtgtgttagtggagatgggatttcaccatgtttcccaggcttgtcttgaactcctgacctcttgtgatctgccagccttggcctcccaaagtgctgggattacaggcatgagccaccatgcccggcccccttcttgaccacttctgagctgggagacctgggacgagtccctctccttccttgagcctcagtttcgtcatctgtcaaatgg

SEQ ID NO: 599229 - DNA, 586 bp, Homo sapiens
caaagctcagatctggatgcgacctttggggtcactgcatccagctcaccccttttattatgggcaaacaaggcctgggaaaaggaaaggccaggaccctgaactaggtggccctattcaccttttgtccctttgggagtctgacttcctgggttcgaatcccctcttggccacttctctttttttttttttttttttttgagatacagtttcactctgttgcccaggctggagtgcagtggcacaatctccactcactgcaacttctgcctccagggttcaagtgattcttctgcctcagtcttctgagtagctgggactacaggtgcatgccaccattcccrgctactgtgtgtgtgtgtgtgtgtgtgtgtgtgtgtgtgtgttagtggagatgggatttcaccatgtttcccaggcttgtcttgaactcctgacctcttgtgatctgccagccttggcctcccaaagtgctgggattacaggcatgagccaccatgcccggcccccttcttgaccacttctgagctgggagacctgggacgagtccctctccttccttgagcctcagtttcgtcatctgtca

SEQ ID NO: 599230 - DNA, 461 bp, Homo sapiens
  misc_feature 6: n = A,T,C or G
gtgttntgcctctctgggcctcagtttccccatctgtaaacaggaagtggagagagatgtggcataaatcaaaagctctcaaatgaggctgtaggaagtgggttacgacattgccaaaatgtaacaggtcataggtctttctgcaaagtgaatcctggtctgatactgtcagcactccgtaaggagttcatctcacctgatgttatctgcaagtgaggacaatgacagccacctcgggaggtgtgctgagcattcaaccagggggtcccaaactggccagtccaaccacaaatgttttgtaatgcatgwcccaaagtgttcttgtgtgtttggttttcaggtgaattcatgctgacattttaaaaataagagatcaggccgggcgcggtggttcacgcctgtagtcccagcactttgggaggctgaggcaaggggactgcttgaggctaggagttcgagac

SEQ ID NO: 599231 - DNA, 436 bp, Homo sapiens
tttccccatctgtaaacaggaagtggagagagatgtggcataaatcaaaagctctcaaatgaggctgtaggaagtgggttacgacattgccaaaatgtaacaggtcataggtctttctgcaaagtgaatcctggtctgatactgtcagcactccgtaaggagttcatctcacctgatgttatctgcaagtgaggacaatgacagccacctcgggaggtgtgctgagcattcaaccagggggtcccaaactggccagtccaaccacaaatgttttgtaatgcatgtcccaaagtgttyttgtgtgtttggttttcaggtgaattcatgctgacattttaaaaataagagatcaggccgggcgcggtggttcacgcctgtagtcccagcactttgggaggctgaggcaaggggactgcttgaggctaggagttcgaga

SEQ ID NO: 599232 - DNA, 547 bp, Homo sapiens
  misc_feature 517, 541: n = A,T,C or G
tagcatactctcttccatttcttcacttccagttgatttcacaaccactgcaatctggcaggtctaacattatattgatgtctaataccaggagtgacaaattggtacccttgccctggagagactttgtacagtgttctgctttgtttttttgatgagattgttgcctttagatgggtcagacacttctaaagtgatctctagctagacagtcccttttgtttgacacacactgaccggccctgggaggaaactgccttaggtaaacccatgccacytacgctctgtaatctcttttcctcacacactccatggctgtcactgccagggcatcttggcttctactgctttttcctgagagaaaacagtagatattttattgtggtaaaatatacaaacataaacatttatctttttaacgatttctaagtgtgcaattcagtggcattaagtaccttcacagcgtggtgcaatcatcaccactgtcactactgtttccagaatttttatcatttanacagaaactctgcacccattaaancattac

SEQ ID NO: 599233 - DNA, 713 bp, Homo sapiens
aaaagattttctcccaccattatcatccaaccacccagctgatctttccaaagtaacagtattaccagttccttgtatatatttccagagatattttgtgtgtaggcaaatatgtattttgttttcttatttttctcccttaacacaagaggtgacatgaacacattgtacacattgcttattttcatattctattatattctatacagtagtttacataacccactgttcacaatttcttagatttgttccaatattttattatatgaaataatgctgcaacaagaaaaccttgtatatatgttatttcatacttatttgagtatatctgtaaaataaattctcataaataaaattatagtatcaaatggttatgtgcattttatcataacaaattgtcctccaatataagttataccaatttactttcaaagcagtcatatgagagtgcctggttttccattgttgccaasctagtatttattcttacctcttaattttcgccaatctgataggtgaaaatagtttatcagggtagcttttgaaaaaatatttaattgacaaataaaaattgtatatattaatgtgtacaatgtgatttgatatacagtatgtacacattgtctaaagatcaccacaatcaaattaatacatctattaccacccatgctgtactttagatccccagaatgtgttcattgtacaatggaaag

SEQ ID NO: 599234 - DNA, 556 bp, Homo sapiens
ctaaaaagtgaacagattgaagagttttacttttcacttgttttgtagagatacctgttggcctggttttctaaggatttgcctgttttcttttttatattaaagatttgcttttgaatgkgtgtttttgttaacttcaggtaaaacatggctaaaagcttacggagtaagtggaaaagaaagatgcgtgctgaaaagagaaaaaagaatgccccaaaggaggccagcaggcttaaaagtattctcaaactagacggtgatgttttaatgaaagatgttcaagagatagcaactgtggtggtacccaaacccaaacattgccaagagaaaatgcaatgtgaggtaaaagatgaaaaaggtgagtgtgcttctcctttttctttctctttttttttttttttttttgaggcagggtctccttcctctgtcacctaggctagagtgcagtggtgtgattatagcttcctgcagccttgaattcctgagctgaagcggattcttcccacctcagccttccaaagcactgggttacaggcatgaaccacagtgcccagcc

SEQ ID NO: 599235 - DNA, 615 bp, Homo sapiens
taatgaagacaataacaaaggtctgtatgtgcaaatattcagcatatttaggtttaaaaatcctagtaatttttcagatcaaatgtcctcaagactcattctgacaattccacatttacyctctcattacatagcatcgttcttgaatttttgccttttttgtcctccatgatgatactcagtatttttttttcctacatactgactgtttcttctgttttcttaactagctcttcttctggcctgtataatgtacccataggctgaatttgttgatcttcttattttgtcttagaggtttcatataatctcattcttcatctatcaatctctaagtcaactactttgatatttgtgtcatcagccctaacctgccctgcagattctcttctcacctcctgcatttattgaaaaatttcatttggatttcttgctttcatctcaaatcatcatgtcccaaactgattgtttcctagaaaatcaacttccttgtttctggtcacatgggccaaggtaactctgagtaattttgactgactgattaatactatcttcagaaggatttactgagcacctcgtagtaggtacctatatctaataagtcaccaaatcttg

SEQ ID NO: 599236 - DNA, 615 bp, Homo sapiens
taatgaagacaataacaaaggtctgtatgtgcaaatattcagcatatttaggtttaaaaatcctagtaatttttcagatcaaatgtcctcaagactcattctgacaattccacatttaccctctcattacatagcatcrttcttgaatttttgccttttttgtcctccatgatgatactcagtatttttttttcctacatactgactgtttcttctgttttcttaactagctcttcttctggcctgtataatgtacccataggctgaatttgttgatcttcttattttgtcttagaggtttcatataatctcattcttcatctatcaatctctaagtcaactactttgatatttgtgtcatcagccctaacctgccctgcagattctcttctcacctcctgcatttattgaaaaatttcatttggatttcttgctttcatctcaaatcatcatgtcccaaactgattgtttcctagaaaatcaacttccttgtttctggtcacatgggccaaggtaactctgagtaattttgactgactgattaatactatcttcagaaggatttactgagcacctcgtagtaggtacctatatctaataagtcaccaaatcttg

SEQ ID NO: 599237 - DNA, 656 bp, Homo sapiens
aaaaaaaaaaaatagacaagcttaccctcactctgtatcaatgcaaggcaggtggtaccaaaaggttgtttgtatgtttaggtgtgttccccatctgccacctcaactaagcttcttttagtctttggacttaaaaaaaaaaaaagattgtcccattgtagagcttttttcacaaatctcataactcacttttcccttaagtctacaaacaatttttgaaaatgttaaatgctggagaaagaactctgttttaatttaatatggcacctagaatactggcacatgtaaagacattccaatttagtttgatttggtgggtggtctagctgaaaatacacttacaggttggtttcattaataggaaattaatatggactaaaatagtcatagcatttaaggctggaaaacgttttagagatcatctattttaacttgtgcttcttaacagatgaggaaactgaggccaatttccccaagaggttrgtagttcatggcagagaccaggagcccaagagtctttgtattcacagaccaatctttttcaaaaccataaataggtgacaattaaccacacaaataataacatttggactaatgtcaaaattaattgtattcttttctataaaagaggggttgttaaataaagctatggtgtg

SEQ ID NO: 599238 - DNA, 507 bp, Homo sapiens
ctgctgtcatttctaatagtattagtagtaatagcaatagcatatgatgacttctgaacccccctttctaacccaaatctttccaatgaacctgagtctggaacttacttttcacatccaccctaaactaatccagttcagaacttacctcctctccttcaacacttcctcagaatgttctcctcctcttacactccttggctcagtgaacagtgtcacagtccacttcttagcacaaagcataaactcaatgtcactctttaccatttttcttcactttctacgtccaactaatcaaattctgttgattatatttctgtcatgmatttttaattcacttattaatctctatccccactaacattcttctagctcagtgcactaccatctattgccttgacatactcaccagtctcttaactgaaattcgacgttagtctcattccttctaaaacataaatccaactatattgctcccctagttaaaatcagcaatgctcataggct

SEQ ID NO: 599239 - DNA, 575 bp, Homo sapiens
tcactacaataaatcctgcctattaccaccaggtggatttgtttaaagtacattatttttaaccagtacactaccctgccttattactttcaaaatctagccatcgcctatatgataaagtttatatgcctcttgtgtgcatttaagttttcctcagtctaactcaagtgtacttcatcttccattataaactctctccttcttttaagaaacataaaatagagcaatcaaatttatttaacacatagagtggatggcattctcaaaaacctgttaataaatgttttttcttactatacgtaaaactgtaggtttattaccaacttttgcatataagaaatctgagactagaaaaattaactaaatttcctaaggtcacacaaataataaatgataaaactaggttttgaaatcaagtgtttcctagcctcttctcgccttgtgattctcttcactgtttcccacatattttccagcctctaagcttttcttatgctgcrctgtggcctggaatattcaaccaatccctgctatgtttatccaaatattactcatactttagagtccagctcaag

SEQ ID NO: 599240 - DNA, 519 bp, Homo sapiens
tttctatttatattctctagtatacaagtgactattctagacattggtgttgcagcaataaaataaaacagatgaagactcttmgtgcatgatatttccgttggcaggagggatgtggggaggagggagatagacaacacccatataaacaaatgatatgaaatatgttagtggtcataaatataatgacaaaaataacaccatgtaaggagacagggttgagggatgctactttagataaagtgtttagggaggattcttcagggaaggacatttgagcagaaagtggcataaaaccctggggcaaaacagagagctacctagatgtcttggagaggacattctagactaacactaaacagagattgaactgaattgaattccttgttctcacagagatcatgatatctattactgagctcaatattttacaattttccaaaaatgattgataaagaaagaataaagagtaagtttgttatttggctgatagaaccttttatttttttgaaattggaa

SEQ ID NO: 599241 - DNA, 542 bp, Homo sapiens
gtggtcataaatataatgacaaaaataacaccatgtaaggagacagggttgagggatgctactttagataaagtgtttagggaggattcttcagggaaggacatttgagcagaaagtggcataaaaccctggggcaaaacagagagctacctagatgtcttggagaggacattctagactaacactaaacagagattgaactgaattgaattccttgttctcacagagatcatgatatctattactgagctcaatattttacaattttccaaaaatgattgataaagaaagaataaagagtaagtttgttatttggctgatagaaccttttatttttttgaaattggaatgaaattgtcatgggatttgaacacacatggaagcagatctgggttttgtagaggccgaagcatatagagttttgaaagttttatataagaagacakgcacaaacttttattttcataaattttacaaaacatatgacttagcgtacacattgctagggcctcaaaaggtgagaaacctgaaaatttcagctt

SEQ ID NO: 599242 - DNA, 417 bp, Homo sapiens
caagttatttacatgccctccttcctgattctggaacaaagacataatggttgaggttgaagcaaccatcctgcaactatagaaaaaatccaaaatcatgttaggatacccataaccaaacacatttgtaacggatacacttttcttctttccctaaatttcctacctcattcactctcccttctcttcaaactaataatttgctgaaaacaatagaagctgtcagtagatttcctcgtttactgtgatctcatcagcaggcctgactctttatgcatctktcatctcttgctttcctacgatgaggcaggctctgtcctcctccaatcaaaggccaaccccttatgcatttcacatcctcttctcaaggactttgggcactcccattatccactctagctttttaaattagcctta

SEQ ID NO: 599243 - DNA, 417 bp, Homo sapiens
caagttatttacatgccctccttcctgattctggaacaaagacataatggttgaggttgaagcaaccatcctgcaactatagaaaaaatccaaaatcatgttaggatacccataaccaaacacatttgtaacggatacacttttcttctttccctaaatttcctacctcattcactctcccttctcttcaaactaataatttgctgaaaacaatagaagctgtcagtagatttcctcgtttactgtgatctcatcagcaggcctgactctttatgcatctgtcatctcttgctttcctacgatgaggcaggctctgtcctcctccaatcaaaggccaaccccttatgcatttcacakcctcttctcaaggactttgggcactcccattatccactctagctttttaaattagcctta

SEQ ID NO: 599244 - DNA, 566 bp, Homo sapiens
gcaatgcctgaggataggaacagatggatgtcccagcacagaaagagagaattcagtcttcctccatctttgtgttcactttgggcccacaacaaattaaatggtgccttcctacactggtgaggatgaatcttcttttcttattctactgattcaaatcctaatctcgttcataaacaccctcccagactcacccagaaataatrttttccagctatttcggcatcccttaccccagttagggtgaccctaacattaccatcacacttgtaaatcctataacattgcttctatacaagcacttcagtgaaaattatcaatgttgctatgtcaagcatttcacataggtaatgataccctaagaggccatattttcccattcaccatattagtattgtaaatgattttagtgattggatgataaagataagaacttctcaataatgcagacagactctgaggagtgatgagtcattatagaccactataacccaatcaagagggcaatctagtgacttacagcatcatttgccccttgaaggcacggctgcttggaagtttgggct

SEQ ID NO: 599245 - DNA, 566 bp, Homo sapiens
gcaatgcctgaggataggaacagatggatgtcccagcacagaaagagagaattcagtcttcctccatctttgtgttcactttgggcccacaacaaattaaatggtgccttcctacactggtgaggatgaatcttcttttcttattctactgattcaaatcctaatctcgttcataaacaccctcccagactcacccagaaataatgttttccagctatttcggcatcccttaccccagttagggtgaccctaacattaccatcacacttgtaaatcctataacattgcttctatacaagcacttcagtgaaaattatcaatgttgctatgtcaagcatttcacatagrtaatgataccctaagaggccatattttcccattcaccatattagtattgtaaatgattttagtgattggatgataaagataagaacttctcaataatgcagacagactctgaggagtgatgagtcattatagaccactataacccaatcaagagggcaatctagtgacttacagcatcatttgccccttgaaggcacggctgcttggaagtttgggct

SEQ ID NO: 599246 - DNA, 584 bp, Homo sapiens
taacatatgtgtataaatataacttatgtgtatatatacacatattccttgaaaaattatagaaactaagagacataaatatgtacatatcctttcacttcatgtgtgaacccacgtttacagagcattttggcattaatggcatagatttcactttcttccaagccaagggggttcaaattcttcttccaagtaaaggagccttctgatttcagttaaggtttgtgattgcccttggaaacgtccaatgggctgcaggaaaccaagtggtattgtcacgatggttggtcctgctcagcatgaagtgaagaaagagggatggagaaggcatggccaacacagtgctccataacattcaaaaatgtattgttgatcttytctccatcgttatccaatctacagatccttattctcaccactctttgtattgctcttacactttcatgctacagcaaatgcatattctactcttttgtccttctttcctgccaactgtttctaaggacttgttggacactccttggctcttaggataaccttgaagatgggagaacttattgaacatgattagaaggatccttgat

SEQ ID NO: 599247 - DNA, 549 bp, Homo sapiens
cataaatatgtacatatcctttcacttcatgtgtgaacccacgtttacagagcattttggcattaatggcatagatttcactttcttccaagccaagggggttcaaattcttcttccaagtaaaggagccttctgatttcagttaaggtttgtgattgcccttggaaacgtccaatgggctgcaggaaaccaagtggtattgtcacgatggttggtcctgctcagcatgaagtgaagaaagagggatggagaaggcatggccaacacagtgctccataacattcaaaaatgtattgttgatcttctctccatcgttatccaayctacagatccttattctcaccactctttgtattgctcttacactttcatgctacagcaaatgcatattctactcttttgtccttctttcctgccaactgtttctaaggacttgttggacactccttggctcttaggataaccttgaagatgggagaacttattgaacatgattagaaggatccttgatactcaagaatgttggctgtaacataagaggacattcag

SEQ ID NO: 599248 - DNA, 525 bp, Homo sapiens
aaaacccacagggaatgccctctagttgaagaagatttggcttattacttgttgtatcgaaaatcgtagggtatctcagtaagttgtctttggctgggtaatttgggggagaacctacaaaagtgggggttcactcaaagttgtatgctgtctgaagcagaggagcatctatgagagcgtatctcgataaactttactgataagaaagagatgtaattgataaatatcagtcacaaactttgaagaggtaaaaggatgtttgatactttgtgggtgtcatagtgaccttgtttctatctgtgtttagacagaattatgaaatgtccttgacttgtctcctttcatcatgatcttgtctgaggttagtaaacttgtctgagtttagtattctgtgagattgtttatgtctagtcagacaataataagacctagtgtgagagccaagycagcctccaaatgtcagatactgctccttttttctctttcccaatcagaactcagaaaatcatgtttcttctaattatg

SEQ ID NO: 599249 - DNA, 525 bp, Homo sapiens
aaaacccacagggaatgccctctagttgaagaagatttggcttattacttgttgtatcgaaaatcgtagggtatctcagtaagttgtctttggctgggtaatttgggggagaacctacaaaagtgggggttcactcaaagttgtatgctgtctgaagcagaggagcatctatgagagcgtatctcgataaactttactgataagaaagagatgtaattgataaatatcagtcacaaactttgaagaggtaaaaggatgtttgatactttgtgggtgtcatagtgaccttgtttctatctgtgtttagacagaattatgaaatgtccttgacttgtctcctttcatcatgatcttgtctgaggttagtaaacttgtctgagtttagtattctgtgagattgtttatgtctagtcagacaataataagacctagtgtgagagccaagccagcytccaaatgtcagatactgctccttttttctctttcccaatcagaactcagaaaatcatgtttcttctaattatg

SEQ ID NO: 599250 - DNA, 558 bp, Homo sapiens
attagcaacaattcaaaacaaaatagaagccctgagtaacattatagagaatgaaagctgtgagagttgagaggaggagaggtgaatgtagacaaatgtgttcaaaaagtcttcagaggctaaaaggaacacatttgattttttaaagagcagagttaaaatagaggaagaaatttttatgtataatgtttgatttcagtttattttgtttaaaaattccaagccaatgttagaaggattaattaattctaggcaggatactcggaatttaaattgtactaactaaaatgggatgccctgtattaaatctagagagcccagtaacagtcatctgagtcttatcacttagtatacaactaaccagttatgtcttttctatgaaaacatgcattcattgaatgattcaaatatatttattaattcacaaatataatcaaatgccatgcactaggttgaaaccscagcacactttgacaagtaaaacatgatctctgctttcatgaatatttctcagtacaatgggaaaagtataaaataaaaataatcaacaaataaata

SEQ ID NO: 599251 - DNA, 375 bp, Homo sapiens
gctatcataggaatacagctaacaagagaagtgaagggcctcttcaatgagaactacaaaccactgctcaaggaaaacagagaggacacaaacaagtggaaaaacattccatgctcatggataggaagaatcaatatcacgaaaatggccatactgccctaagtaatttatagtttcaatgctattcccattcaattaccattttttttaatttgcagaattaaaaacaaaatctactttaaaattcraatggaaccaaaaaagagcctgtgtagccaagacaatcctaagcaaaaagaacaaagctgcaggcatcgtgctacctgatttcaaactacactacaaggctacagtaaccaaaacagcatggtactg

SEQ ID NO: 599252 - DNA, 375 bp, Homo sapiens
gctatcataggaatacagctaacaagagaagtgaagggcctcttcaatgagaactacaaaccactgctcaaggaaaacagagaggacacaaacaagtggaaaaacattccatgctcatggataggaagaatcaatatcacgaaaatggccatactgccctaagtaatttatagtttcaatgctattcccattcaattaccattttttttaatttgcagaattaaaaacaaaatctactttaaaattcgwatggaaccaaaaaagagcctgtgtagccaagacaatcctaagcaaaaagaacaaagctgcaggcatcgtgctacctgatttcaaactacactacaaggctacagtaaccaaaacagcatggtactg

SEQ ID NO: 599253 - DNA, 565 bp, Homo sapiens
aatacttagttttataccattctatatacaaaggattatgttgcctagcagtatatggaaatattggctcattcaaatccaaggtctaaactattaaaatgttccttgttgttattccttcataatttactgccattacttaaatatgtgatatttatgatagtaatatagtaaagattctaagaaaaattttcaactctctccttaacagattaaaataaatataatgctgcgggggcgtttcttctcagaaaccagtttttgttgcttttgacagaatagtgcagctacttgaccatagaatagttattatttcaagagaacaggcrtcttcagggggagtacctaaagattagtgaggaaagaagatccacctaagcagccaggaggatttgtaaaattagttcatggatgataaatgtcacattcaaactgactgaatattctgttactgcttccagcccagggatgacaaatgcatggcttgaatgatgccaatcccccttttcatggccatgccagacattgctaattgacaacagcaatcctcttctgtgtttgaatg

SEQ ID NO: 599254 - DNA, 276 bp, Homo sapiens
ccccatgcatccacaaacttgtttgcatgtaatgtcctgccacttaaagyccttatcctcattcctctattgctgcaaaaggagtcccttctgctttctacagttaattgattgacttgtgttctagatttcattctttccatttcctcccgggcattttcttcatcatcatctctctagccttcccctttatgcagagcattttattctccatcagttcctttctcacagcctgtgaataaacactgattaaggctcataaattaaatatggatc

SEQ ID NO: 599255 - DNA, 559 bp, Homo sapiens
ctgtttcttgtatcctaatttataacagggtgtaggtaattgcttggggacagccaatagaaaagcagagaaaacccatttaccacttgttcagctctgtatagtccagaatacttatcctgaaaagggcacatattcaaagaggagaaacaattatctaccgctgaaacaggtaatgaagttttctatgtgctataattttaatttaaagagcatgtttgaaaggctaagatacccagacaggcagatatttccttcttcacrgttataaaatctgtcacatcttagaaatactccctcattgagtggcaatcacaatttttattctaaaggttccacatgcgtggcatattatgtaatggacagcacttcagaataatctaataaaaagagaactcttttccatgctaataaacttcagattctgcttgtttcaagaaaatgaattcaggctttgaactgctgaggtccacataaattcaggttatccatacagccgtgcggaaaatctccaagatgagttctttattaatagcaagaatgagtgagtcagtcagct

SEQ ID NO: 599256 - DNA, 473 bp, Homo sapiens
atgactcaaaaagggaattttggtatattccagtgattayctgttgttcacagtcattctggaccacaaaatatgcagacaagaaaattcattctaaagaaagaagaacagaaaggagacaggcttggacataatctcacaacctgaagttatttttaaaaagcagtggctctaatgatgataataatgttgtctgctttcaggtttttaaattattctttaaaaaatcagatgcaaaataataagcgaggccaggctaaagttgaaattgattttcccaaaataagacaccttgcttttccagcacttcatgtaaatgcaaaagttatggaagtagtgaaaagtgttgaacctacaattatgccttttgccttaaaattttagctgtgattttgctttgaaaaagcttttgttccatttcttccccattcctaacactgccattttgtttgtgtgtgatcagacaaaaatgt

SEQ ID NO: 599257 - DNA, 390 bp, Homo sapiens
acagtggttaataagaaacaaggctgcttatcagaaagcctggtgtacagttagcacaaaataagatgtctccccctatagcatccttctagtctactctctctaaatccctccctgaatttaaaccacttcacaggcattaattaatgatatttaatttctgctgaatataatgaatatataattaagattaagatactctgagggcttcccctagctttgaggccgattcttctttctgcttagaagtatgtcatttaacctctttacctctctccttctataattggggaccatgaaacttacctgccctgaaatttctgaagattcagcgataaygttagccaaatgtttagcacataaaaagtgccaaagaacagctatgtgatg

SEQ ID NO: 599258 - DNA, 533 bp, Homo sapiens
agattcagcgataatgttagccaaatgtttagcacataaaaagtgccaaagaacagctatgtgatgtgctgggcaaaagatctctttcgaacacctgtgatacttgaccctttctgtggttctttttttcttgaaaattatgtcctattgcttcaatgcacaggagggaagcaagaagatataatgtaaataattaaagccatttttaaaccatctatttacataaaataagaacaagraacagcaatgatatgccaccatagtatctgaagcaatttgaagccaaatattttaatgaaaggtgttgaaaaagaccaaatagcaatatagggtactgctgggaacgtcacttcttcttcttcttctttttttttttttaaagagttccatgtccctaggtaacaaagcaaaagaacatgctatatatgattacaactgccttctggattatttagaatctgggagttatctttgattcttttctctccctcaccaaacctgttgattctgccagtatctttgaacctgtcgat

SEQ ID NO: 599259 - DNA, 533 bp, Homo sapiens
agattcagcgataatgttagccaaatgtttagcacataaaaagtgccaaagaacagctatgtgatgtgctgggcaaaagatctctttcgaacacctgtgatacttgaccctttctgtggttctttttttcttgaaaattatgtcctattgcttcaatgcacaggagggaagcaagaagatataatgtaaataattaaagccatttttaaaccatctatttacataaaataagaacaaggaacagcaatgatatgccaccatagtatctgaagcaatttgaagccaaatattttaatgaaaggtgttgaraaagaccaaatagcaatatagggtactgctgggaacgtcacttcttcttcttcttctttttttttttttaaagagttccatgtccctaggtaacaaagcaaaagaacatgctatatatgattacaactgccttctggattatttagaatctgggagttatctttgattcttttctctccctcaccaaacctgttgattctgccagtatctttgaacctgtcgat

SEQ ID NO: 599260 - DNA, 572 bp, Homo sapiens
ctactacagtatgtttgttggtgttttgattgtatgtgtccatatgtgtgtaaatcaaggatgrgactaagctctacatttaggatagcacaattcagcaggaacaagctgttggaatcagagaaagtcatgagaagatatattttctggaaatatgaagataatttgggaaagcctttcacagggtgatagaatctattttattcagctctctagaggcactcagaccttaggtatccaatataccccaataattggattaccccagaacactgctataactcaccactttgcttttcctgacaactattttggaagtataatgcactcagaaatgataaatgtttccaaaggtttagggggatttgcatagaaatggtggatagatggaggtttatcagactttgcacaatagattcaatgctgcttcagtggcacaaagattattttataggtaatcttgacataaggtctaatttataaagtcagggaaggttctgcagtaatctggcactagctctgtaacttgtaagccttctaaataattgaattataaaaatgttttattacaa

SEQ ID NO: 599261 - DNA, 572 bp, Homo sapiens
ctactacagtatgtttgttggtgttttgattgtatgtgtccatatgtgtgtaaatcaaggatgggactaagctctacatttargatagcacaattcagcaggaacaagctgttggaatcagagaaagtcatgagaagatatattttctggaaatatgaagataatttgggaaagcctttcacagggtgatagaatctattttattcagctctctagaggcactcagaccttaggtatccaatataccccaataattggattaccccagaacactgctataactcaccactttgcttttcctgacaactattttggaagtataatgcactcagaaatgataaatgtttccaaaggtttagggggatttgcatagaaatggtggatagatggaggtttatcagactttgcacaatagattcaatgctgcttcagtggcacaaagattattttataggtaatcttgacataaggtctaatttataaagtcagggaaggttctgcagtaatctggcactagctctgtaacttgtaagccttctaaataattgaattataaaaatgttttattacaa

SEQ ID NO: 599262 - DNA, 672 bp, Homo sapiens
ttcaataaaagctagtagaatttagtagtgatatcacccgactgcctgacagggtgacttgctttgcctttgaaaacatgggagaactggctacagtgtctctgtcaatagatagaattactgaaacctcaagaaaataccagcccctcataccttccaaaagtgtggccagacatacttttcgaagtaatagatgcttttctcctcccatagtttattcttattaatctctagcaaagaatagccaattcttgtaacattttagatggcatggaggagcactgctgagaaggggctgctgtggggagcattgctgactgacagcctgggagctgaggctatgcttcccccaagctgctaccagccgatgactgagcatagcagtgactgggctggtatggggccawttctcttgaatgcaacactcttctaataggcaggaactgccctccggcctggctgagactttctcagtactgtgctgtggtatgcagctatccctactcaattctctctgctgcctctcctttcacaggtgtcagatctatatcgctacctgaaagctcttcccacctatttctgctctttgctcctctggacttcatgggtgatagatttactggttctcgtgagcatgtctaatgccgtctttgtgtcaatgtctcagaggac

SEQ ID NO: 599263 - DNA, 489 bp, Homo sapiens
tatccctactcaattctctctgctgcctctcctttcacaggtgtcagatctatatcgctacctgaaagctcttcccacctatttctgctctttgctcctctggacttcatgggtgatagatttactggttctcgtgagcatgtctaatgccgtctttgtgtcaatgtctcagaggacctgaactggcccatgtggtatatayaccatcccaagtgaaaattgtgccatataatattatgatgagcacgctcagtatctgaaatcagcctgcagaggttgaaagggtaagaaggatgggaatggcattaggagacttagatttctcaatttgatctcagtggggttatattttgggcactgcattttatttaagaaatcagagcaggaatcttaggatattagactcttaggagaattctttctttttaaaataggatttccaagtttgggatgtatttcagtttctaggacaattaaatcactcagagc

SEQ ID NO: 599264 - DNA, 489 bp, Homo sapiens
tatccctactcaattctctctgctgcctctcctttcacaggtgtcagatctatatcgctacctgaaagctcttcccacctatttctgctctttgctcctctggacttcatgggtgatagatttactggttctcgtgagcatgtctaatgccgtctttgtgtcaatgtctcagaggacctgaactggcccatgtggtatatataccatcccaagtgaaaattgtgccatataatattatratgagcacgctcagtatctgaaatcagcctgcagaggttgaaagggtaagaaggatgggaatggcattaggagacttagatttctcaatttgatctcagtggggttatattttgggcactgcattttatttaagaaatcagagcaggaatcttaggatattagactcttaggagaattctttctttttaaaataggatttccaagtttgggatgtatttcagtttctaggacaattaaatcactcagagc

SEQ ID NO: 599265 - DNA, 489 bp, Homo sapiens
tatccctactcaattctctctgctgcctctcctttcacaggtgtcagatctatatcgctacctgaaagctcttcccacctatttctgctctttgctcctctggacttcatgggtgatagatttactggttctcgtgagcatgtctaatgccgtctttgtgtcaatgtctcagaggacctgaactggcccatgtggtatatataccatcccaagtgaaaattgtgccatataatattatgatgagcaygctcagtatctgaaatcagcctgcagaggttgaaagggtaagaaggatgggaatggcattaggagacttagatttctcaatttgatctcagtggggttatattttgggcactgcattttatttaagaaatcagagcaggaatcttaggatattagactcttaggagaattctttctttttaaaataggatttccaagtttgggatgtatttcagtttctaggacaattaaatcactcagagc

SEQ ID NO: 599266 - DNA, 489 bp, Homo sapiens
tatccctactcaattctctctgctgcctctcctttcacaggtgtcagatctatatcgctacctgaaagctcttcccacctatttctgctctttgctcctctggacttcatgggtgatagatttactggttctcgtgagcatgtctaatgccgtctttgtgtcaatgtctcagaggacctgaactggcccatgtggtatatataccatcccaagtgaaaattgtgccatataatattatgatgagcacgctcagtatctgaaatcagcctgcagaggttgaaagggtaagaaggatgggaatggcattaggagacttagatttctcaatttgatctcagtggggttatattttgggcactgcattttatttaagaaatcagagcaggaatcttaggatattagactcttaggagaattctttctttttaaaataggatttccaagyttgggatgtatttcagtttctaggacaattaaatcactcagagc

SEQ ID NO: 599267 - DNA, 574 bp, Homo sapiens
gctagtcccttgatcttgacaaataatttctatcatttatgagttataagttacccggtgtctggtattttttttatagcagcaagaatggatgaagacagatagtgaagttggtataatgtgaaagaggtattgattcatacgtgatttttctgagtgtsaatttttttaagtaattggagcgagctctctcacaattaaagaaaagccttagcaatatataaacttcatataaaactctacaaaagtatctcttttagtgcaagctatgcctgcacttccccatataaagctacagtgaaacacaagtgaacgtgaaggtgatgtgctgacatttctttccttattaaaacaatggattaacaaaacaggctacagtctggataagatttttgattctgatgaacatgtctctattagaagcaaatgccctccaggaattacatttcaggaaactgcataagccccagggtttaagatgagaagaactaactgtgatagtagacaccaatcccaagcatattttaaatgcatttgtgagggttttttaatggattgctattgtttttgtgtt

SEQ ID NO: 599268 - DNA, 585 bp, Homo sapiens
cttctgccatttgaaaatatagcaagaaagtaccatcttggaagcagagagaggccctcaccagacactaaacgtgctagtcccttgatcttgacaaataatttctatcatttatgagttataagttacccggtgtctggtattttttttatagcagcaagaatggatgaagacagatagtgaagttggtataatgtgaaagaggtattgattcatacgtgatttttctgagtgtcaatttttttaagtaattggagcgagctctctcacaattaaagaaaagccttagcaatatataaactycatataaaactctacaaaagtatctcttttagtgcaagctatgcctgcacttccccatataaagctacagtgaaacacaagtgaacgtgaaggtgatgtgctgacatttctttccttattaaaacaatggattaacaaaacaggctacagtctggataagatttttgattctgatgaacatgtctctattagaagcaaatgccctccaggaattacatttcaggaaactgcataagccccagggtttaagatgagaagaactaactgtgatagtagacacca

SEQ ID NO: 599269 - DNA, 439 bp, Homo sapiens
ttcttgggaacatgtgggaaaactgcrtaagtggtgtccttggagtttgctttaaaagtaagatcttttgaaaaatgtttattcatgttctttgcccactttttgatgggatttttttcttactgatttgtttgagttccttgtagattctggatattagtcctttgccagatgcatagtttgcaaacatacttgggtgacgggtgcactaaatctcagaattcaccactatagaattcatccgtgtaaccaaaaaccacttgtacctcaaaagctactggaataaaataaaataaattaagatgtctgggttgacatgtcttttcctaaatgcttagctttccaaagtagccattcatcctcagggttaaacagtgctctctcccagctgaatattttacaaagacttgcaaaatagtgagccaattatactatcact

SEQ ID NO: 599270 - DNA, 540 bp, Homo sapiens
aattatatccaattacagtttagtgaggtattaataataggatattatatcatattttgcttcaggaattttatctattatgataagaactcttayatacagaggtgcttattctccaaaaatatcttaggagaaaacacacaacggctgactccaggatgggatttagggagccctgggaaagcctttataggcctcaaatattttcctcaccatctgtctgttattcaacctttaaaactaattgcttggcatcttaaagtctttgtcattttagaaagtttctttttagaatgcagacgtacctgggttatttaatgtgttagccaacttttagcaaattacatcattaaacaaaatgcagatataatttcagtgtctgagaattctctagaaaaatttaattttgaaaatgtaatataatatatgcatattctggatcatctgaatgaataccttataaatgagtgctcccttctagcttaaagcctgaattcatgtttttgttcttgtcagtaacaactactattacttaatcgt

SEQ ID NO: 599271 - DNA, 594 bp, Homo sapiens
atgagtcctagcaaagtgtgttggaagcagattgcacctggtgagttattatctgggtgactactgatttgaggcaagtgaatatttaaatcttgctcatggagtgctctgattgaaatcaagctttatcaattatcccctgaatttgaattgaaggacgtcatttttgcccattaacttgacccttataggaaaatatcaaatgacagattctcagttgtgaaaaataggatgcattacacaattgcaagagattaaaattatttggagagatttttcaccacagagccacatagtagcttactttttctttttaggaattttttgattgattggtcatatacagactaggtttagaagattctttgatgttgatttaccagtttcaagsgttatagatccaaaaattgttttcctttctcctttaagtggacatacaccattgagcttaatttatcccctgagttcaggatattatttaaatttctgaaaaaaatggctaaaggctctgaagattgcatttgttgtcatcttcaataaggcccattagttaatataatactaaatctctgttaacagaaactagaaacgaca

SEQ ID NO: 599272 - DNA, 602 bp, Homo sapiens
gtctacattgtttaccatcagaatttatattcatcaagaacagaattaacattatcgtttcagaactgaaagggtaaagacatataaaaattaagttaacttagacataaggattacaaactaagtgtatttatctttagaggtatttatcattgcttgtgctagagatctataaaagattggcctcagaacttactacagggaccttatcctttcctctacaaattgctcagttccaccaaagcaaagacactattccccactgagggctaaataaatgacaagcttgaagtggtgaaaaataaattccttctccgagttacttgagtaaaaakctgtgtgaacaaaaaattcacacatttctcttcatataatggaaacttaccactttttacaacactgcttatttgagaagcttgggaaattcattatgagggggaagcatgtttaggatattagttccaccatgcccacaaataatggagaaaaacattgggaattgaaattgcctggtctcttcgacccctaaaacccttatctatgttattatagtctaaatacttttcatacatgtaaacattttcaggtaaccaggggacaac

SEQ ID NO: 599273 - DNA, 643 bp, Homo sapiens
tcataccacagactaaacatcagcatgaacatatgcaaacaaacagagacaattccacccctgtaaaaacactgcttacaaaatgcttttagagatggtactagccatttctaatcgagaaaatcaaaatgccacataggacactctgttacattgtccttttttaagcagcagaactttatcaggtagtttgagaaaatcttttgtaatactatggttctgacctatacagcctttagtaaatgaatttttctctgaaatactggcattacgatagaaaagttaattgcaaacaataaaattacaatagttcttagtcaatacattttttgctgctaccaggacaggacatattgttctagtgatatttactagaattattcttttttttaagctaaggatgagtactctttttcatcactgaattttctactattgacataacatgagctttaggagcagtaaagaatataaatctttatacctgttgttgattccaacaatcacctttakctctcctgattcatttagaaattgatctcgtcttgtttttataccttaaaaggaaaaacgaaaatgaatttaaatttgatatggtaaagctcaccatataaaaagcatcttttttgctattggtgttcat

SEQ ID NO: 599274 - DNA, 443 bp, Homo sapiens
atacgcagtaagaattccatataaaactgttttgaaatttcctggaatgtttttgctaatattctaaaggaaaaaatcttaaggaaatatgagttttatgaaacctgccttactcaagaggacatgagcagccttctcttgttaaaaggctcttactttgtaygtacatccattgttcatctattctctcaagccataaattctttaaaaagatgagagttttgctttgttttgttctttgcttttgtcttcaatgttattagaaatcctatctgaaactattgcttgcatttttaaaaaaagaaattattaccacattaggatccagatttggttgaattttcttggtcatgaaatacatctgtgatactgggcaaaccatttagtttctctggagccaagtttcctcatctgaaatgtaaggagcttaatatggtttggcc

SEQ ID NO: 599275 - DNA, 443 bp, Homo sapiens
atacgcagtaagaattccatataaaactgttttgaaatttcctggaatgtttttgctaatattctaaaggaaaaaatcttaaggaaatatgagttttatgaaacctgccttactcaagaggacatgagcagccttctcttgttaaaaggctcttactttgtacgtacatccattgttcatctattctctcaagccataaattctttaaaaagatgagagttttgctttgttttgttctttgcttttgtcttcaatgttattagaaatcctatctgaaactattgcttgmatttttaaaaaaagaaattattaccacattaggatccagatttggttgaattttcttggtcatgaaatacatctgtgatactgggcaaaccatttagtttctctggagccaagtttcctcatctgaaatgtaaggagcttaatatggtttggcc

SEQ ID NO: 599276 - DNA, 555 bp, Homo sapiens
gagatgaatctattgcttttctctcaggcaatcctccataaagtttgtttttctctactaagctttagaaaaatattggaagggtgagagtttggaactacattccctgttaagtaccacgagtacctacaatgcagctatgttgggcagccaggtaaatgcagagccggtgtgagaaaaataaacctctctacatattcttttgtgaaatttgcgttgcctaaccaaccaaattttgttgccgagaggcaaaccgaagggttatcagctcataagcaaaatcaaagttttctgtagaatgtaattctaggtttattcacacggtaatgaaagaaaaagagagagaataaatatgagtttctgtgattttatgtcataactggggaaaaagaattgtagtcttaaaatcccttcattcatcttgcttttctcaaccactatttttcctaagtcaatcatatggcaaatgtgctcaggggaaaactctaaaaatatttaaaacwataacagaagggaggaggtatcatttttactatgttcagaatatcccaacaa

SEQ ID NO: 599277 - DNA, 474 bp, Homo sapiens
gctaaattaatataattttaattatgaaaatatttaaatgaattacattgtctctttcttaagctgagcattgctcatctgtggaattttttaaaatttatgtgataatgagctcaataatctcccttacttcccctgaacaaggcagggattcaccatgttactgagataatgcagtaatgaatacataaccgtgcaatgtatggcacagtaacaatcaaatgaaagaagaaaagtattttggcaagctgttgacactaggtctttggtctgactgaatttctcattgcatttgctagtttgggtaccatataaacaactcttyaatcgatattctctttactattttacatatattttacttatttctgcctgattttttgactgcccccattagttgtttcataatctcctccctgtgcctgccaccactcttgaaggagctccctcagacagcaactggcaatgagtgtg

SEQ ID NO: 599278 - DNA, 585 bp, Homo sapiens
actgcatttacacactcattatatactagtgacattttattcttatagaattggacatattgcacttttctgtatatgatttatgcaaacacagctattaaccaatacacaccaatagaagacaaacaaaagtaaaaaggcaataatacaattaaacaaaccaactctcaattgttttaaaaattaaaagaatatgtcaaatagaatgtcaaagaaacatatcttactaattttataagacctacatgatcttgattccactgtaatttgaaatacaagtagacacattatgataaattgcaaaacaattaccctatacactakttatatttatcatgtgagttattacaataaatactaaaacaaaaacctgtatcacataagtaaagtaaaagttatttgagagcttgctttctttaaacagtgattagtacagcagaagttcaggacatttttttaaaaggcagaaaaagaacatacctgtttgtttcaatggtaccatatctgcagtttatatctttttctatgttgaagctgccacataccatcaacaagaaaataaagcaagatatcaggaaagaaaag

SEQ ID NO: 599279 - DNA, 584 bp, Homo sapiens
tctcacaaagcaaagtaatttctcgtacccccaaaagccaaagaaatcaggtaataaaatagaaagcagagctttagacctgagaagagtctgcctacaaatcttgaacctccacaaggaagacagaagatcccccaaaaggcatgagtggcaccttttttctgcattccttaaggggtgaatgacaccttttttctgagttccttaaggggcctgagtcgtcaaaagtcctctaatgggacaaggagaaagaaaaagtagatggagtaaaagtaaataggagaatgatttttaagaaaggaagcaaatggcagtaccaagcacaaaggttttgggggggaaaaaagattttaatccactgaaatatttttccaaaaccagcattgaaagagaaaaagcaaaagggccttttaaatatatacatatatatatatatagcttgggtattagcttttaattaagcrttcctcagagagaatagatggtaaatgatgtttttgcagacttttaaaggtatcagattcagttcatctctcccaggtccaggaaatgcctagaaagaaaaggcctggctacattaatga

SEQ ID NO: 599280 - DNA, 558 bp, Homo sapiens
taatttaaagctaattgttggaatctaatattagttttggtagtaactagaagaaaagtgatgaatagccaaaaattgtaagtatctgaaatttagtacctaattgccgaacataggaagcaataatgatttatttacaaataagctctatatttattatatataaccagttattttttctttaaagaaatttaaacaaagacctttggatattccaaaagatttaaatgactgattcctagaatgctattttaaamaggtttttctaacattattttgagactcttgtatccaacaaatcttgtagtagaaatgtcataattaccaacccaatttctttagctaagagatttaagggagcaactaaatactttctgaaaatccatactgtgtttggtctatttgagaatcacattcataagaccaatttgtgctcttccacaatgcaagacaagaatttagcttttattaactatccataaatctgagggaagagaaattatcagatctttaagcaatttagacatgttactcatgtgagcaggtcaagaaagtctg

SEQ ID NO: 599281 - DNA, 558 bp, Homo sapiens
taatttaaagctaattgttggaatctaatattagttttggtagtaactagaagaaaagtgatgaatagccaaaaattgtaagtatctgaaatttagtacctaattgccgaacataggaagcaataatgatttatttacaaataagctctatatttattatatataaccagttattttttctttaaagaaatttaaacaaagacctttggatattccaaaagatttaaatgactgattcctagaatgctattttaaacaggyttttctaacattattttgagactcttgtatccaacaaatcttgtagtagaaatgtcataattaccaacccaatttctttagctaagagatttaagggagcaactaaatactttctgaaaatccatactgtgtttggtctatttgagaatcacattcataagaccaatttgtgctcttccacaatgcaagacaagaatttagcttttattaactatccataaatctgagggaagagaaattatcagatctttaagcaatttagacatgttactcatgtgagcaggtcaagaaagtctg

SEQ ID NO: 599282 - DNA, 558 bp, Homo sapiens
taatttaaagctaattgttggaatctaatattagttttggtagtaactagaagaaaagtgatgaatagccaaaaattgtaagtatctgaaatttagtacctaattgccgaacataggaagcaataatgatttatttacaaataagctctatatttattatatataaccagttattttttctttaaagaaatttaaacaaagacctttggatattccaaaagatttaaatgactgattcctagaatgctattttaaacaggtttttctaacattattttgagactcttgtatccaacaaatcttgtagtagaaatgtcataattaccaacccaatttctttagctaagagatttaagggagcaactaaatactttctgaaaatccatactgtgtttggtctatttgagaatcacattcataagaccaatttgtgctcttccacaatgcaagacaagaatttagcttttattaactwtccataaatctgagggaagagaaattatcagatctttaagcaatttagacatgttactcatgtgagcaggtcaagaaagtctg

SEQ ID NO: 599283 - DNA, 551 bp, Homo sapiens
catttagttgatatggaaaccaaatctcagctaatttatatgacgtatctgagaacaggctcctgtaactggtaaaggaggaactaaaacttagggttttaaaattcatccatattatctcctatccattcattttgggtagacacttaataaayatttgtgtaaaaaatgaagaaattaacctccctgcccattacttcaaagcagatacaatctcaagggacagctttctattgtcagaaaagtattaaaatattgcttttatcaaaagctttgtaatagaatgtttgacaaactgcacaagagtcccttgtccatcaaactcacaaaatgccattttggcaagaacagtggataaaattacaagtagtctaacataagcttaaaagagaagaaaagatagggagggcaaagctgtacctctcatcctcgtgggcagtagccagtttgagtttctatcccagactactcctaggagataggtaggaaaataaaagtggcattagtcttgttttaccaaaatcaaaacaaaaattagacaacaatagggg

SEQ ID NO: 599284 - DNA, 551 bp, Homo sapiens
catttagttgatatggaaaccaaatctcagctaatttatatgacgtatctgagaacaggctcctgtaactggtaaaggaggaactaaaacttagggttttaaaattcatccatattatctcctatccattcattttgggtagacacttaataaacatttgtgtaaaaaatgaagaaattaacctccctgcccattacwtcaaagcagatacaatctcaagggacagctttctattgtcagaaaagtattaaaatattgcttttatcaaaagctttgtaatagaatgtttgacaaactgcacaagagtcccttgtccatcaaactcacaaaatgccattttggcaagaacagtggataaaattacaagtagtctaacataagcttaaaagagaagaaaagatagggagggcaaagctgtacctctcatcctcgtgggcagtagccagtttgagtttctatcccagactactcctaggagataggtaggaaaataaaagtggcattagtcttgttttaccaaaatcaaaacaaaaattagacaacaatagggg

SEQ ID NO: 599285 - DNA, 551 bp, Homo sapiens
catttagttgatatggaaaccaaatctcagctaatttatatgacgtatctgagaacaggctcctgtaactggtaaaggaggaactaaaacttagggttttaaaattcatccatattatctcctatccattcattttgggtagacacttaataaacatttgtgtaaaaaatgaagaaattaacctccctgcccattacttcaaagcagatacaatctcaagggacagctttctattgtcagaaaagtattaaaatattgcttttatcaaaagctttgtaatagaatgtttgacaaactgcacaagagtcccttgtccatcaaactcacaaaatgccattttggcaagaacagtggataaaattacaagtagtctaacataagcttaaaagagaagaaaagatagggagkgcaaagctgtacctctcatcctcgtgggcagtagccagtttgagtttctatcccagactactcctaggagataggtaggaaaataaaagtggcattagtcttgttttaccaaaatcaaaacaaaaattagacaacaatagggg

SEQ ID NO: 599286 - DNA, 509 bp, Homo sapiens
tgtttaatattctttttcagagagatcaactgacactttgatgttatttcagagatgcaaaattctcccacattaaaaaaaaaaattcctgcatcaacaattttggaaataatgaagaagcctgtttctcattttgacttattgtattcttttcatggaacacttaactcaattaaagttgttgacatgtcacattccaatttttaatgtcatgatgcagcaattgacctcttttactccagggtattttttttttttattaatcgtgtttatatggcacatgttggctcaagactcagaatgacagacccttcgtgactgacttttaattaattgattttaccagaaatatcttctcaatactataagacacagaacattgaaacwcatactgggatttaatgttttgaaactcagataagctgggctcattaaaaattaaataatagtgggcaactcttattaaattaccacctattggatatgggattaataaatgaaaaggataa

SEQ ID NO: 599287 - DNA, 526 bp, Homo sapiens
aaagccgaagaagtaggagactagcaaagagaagcctgtgctgcacataattgacagaaaacagagactgatgtgattcaragatggtactaaaaaattgagttataattcctcacaaggacttactccagggaactgggacaaatgttctaacactgacgaaaacacttgaggtagatgagcctaagagataccttatggatgtgagatttttttttgcttctcctcatttgctggcctgtcaatcgatgtgagtctacaaaatactgaatagtttgtgactcaatcgcattgaaactcaactccatccctgtgttcaaggactatcaggctcaatcaaggaactcttaacagttggtagacttcacaaatcagaaggaacaagacaatttccaggaaggactgtgattcttatagttgtttcctttcctcactttataatggtatcattagttagacttccagatactacataaagtgaaaccattcactcaggctgacatttatacaggctaatcaaatgctt

SEQ ID NO: 599288 - DNA, 536 bp, Homo sapiens
ttcttagtgtgcacataagtggattaaattggttaatgaatttatctgatatgccacctttgcacagtttcccattgagtgattgatggttgagcagaacagaaatcctgaggggaaaatagcgacttacataggcttcagaacatgagacctttgattaactgtttaaagtcatttgtaaaaaacttgtataccatgcaggggcactttgcttgaatatagatatagatayagatatatctatagatagatagaatatatctatatctatattcaggcaaagtgtacccgcatgctatacaagatagatatagatatatctgtatctatagatagatagatagatagatagatagatagatagatagatacatagatacatacatacatacatacatacatacatacatacatacatagagatatattctacctacttatctatctataagcacaaccagtggagaggtgatactcccaagaaagggtaaaatattggcaactgagggtattgaagaaccagtgcaatgcctcat

SEQ ID NO: 599289 - DNA, 536 bp, Homo sapiens
ttcttagtgtgcacataagtggattaaattggttaatgaatttatctgatatgccacctttgcacagtttcccattgagtgattgatggttgagcagaacagaaatcctgaggggaaaatagcgacttacataggcttcagaacatgagacctttgattaactgtttaaagtcatttgtaaaaaacttgtataccatgcaggggcactttgcttgaatatagatatagatacagatatatctatagatagayagaatatatctatatctatattcaggcaaagtgtacccgcatgctatacaagatagatatagatatatctgtatctatagatagatagatagatagatagatagatagatagatagatacatagatacatacatacatacatacatacatacatacatacatacatagagatatattctacctacttatctatctataagcacaaccagtggagaggtgatactcccaagaaagggtaaaatattggcaactgagggtattgaagaaccagtgcaatgcctcat

SEQ ID NO: 599290 - DNA, 536 bp, Homo sapiens
ttcttagtgtgcacataagtggattaaattggttaatgaatttatctgatatgccacctttgcacagtttcccattgagtgattgatggttgagcagaacagaaatcctgaggggaaaatagcgacttacataggcttcagaacatgagacctttgattaactgtttaaagtcatttgtaaaaaacttgtataccatgcaggggcactttgcttgaatatagatatagatacagatatatctatagatagatagaatatatctatatctatattcaggcaaagtgtaccygcatgctatacaagatagatatagatatatctgtatctatagatagatagatagatagatagatagatagatagatagatacatagatacatacatacatacatacatacatacatacatacatacatagagatatattctacctacttatctatctataagcacaaccagtggagaggtgatactcccaagaaagggtaaaatattggcaactgagggtattgaagaaccagtgcaatgcctcat

SEQ ID NO: 599291 - DNA, 536 bp, Homo sapiens
ttcttagtgtgcacataagtggattaaattggttaatgaatttatctgatatgccacctttgcacagtttcccattgagtgattgatggttgagcagaacagaaatcctgaggggaaaatagcgacttacataggcttcagaacatgagacctttgattaactgtttaaagtcatttgtaaaaaacttgtataccatgcaggggcactttgcttgaatatagatatagatacagatatatctatagatagatagaatatatctatatctatattcaggcaaagtgtacccgcatgctatacaagatagatatagatatatctgtatctatagatagatagatagatagatagatagatagatagatagatasatagatacatacatacatacatacatacatacatacatacatacatagagatatattctacctacttatctatctataagcacaaccagtggagaggtgatactcccaagaaagggtaaaatattggcaactgagggtattgaagaaccagtgcaatgcctcat

SEQ ID NO: 599292 - DNA, 591 bp, Homo sapiens
cacgtgggagctacactgtcatggcagctttgattcacagagatcaaatccaccaacgatgcttcccctttaatctctacatcatcactatgaaaagcaaaagagcaagtatcgtttttcccatgctatagaaactgattggcaaagtactaaagtaatatacctgctgttatattaatcattggctaagctgaaatttcctcccattgacttcccttgccartagtttgaaagccgctaattttaaagctgaagtaaagaaaaaaagaatatacttactgtatagattccaaatctttagcctagagatcagacttgacaggtgggagttctacttgccaaggaaaaataaagattgttttctcttcagaaattccatagggcaatttttttctgagctagaagtggaaaatccataaagaatagattggtcaaaagttaattttgatctctgggggaattatttaattaaaagaacaattccccactcaaccaacaagtatttgcaaaatgtctgcaatgaacctagcactgttagatgctagggattcactgctaaattaggcacccagtcatagcaatgtgaggcac

SEQ ID NO: 599293 - DNA, 591 bp, Homo sapiens
cacgtgggagctacactgtcatggcagctttgattcacagagatcaaatccaccaacgatgcttcccctttaatctctacatcatcactatgaaaagcaaaagagcaagtatcgtttttcccatgctatagaaactgattggcaaagtactaaagtaatatacctgctgttatattaatcattggctaagctgaaatttcctcccattgacttcccttgccagtagtttgaaagccgctaattttaaagctgaagtaaagaaaaaaagaatatacttactgtatagattccaaatctttagcctagagatcasacttgacaggtgggagttctacttgccaaggaaaaataaagattgttttctcttcagaaattccatagggcaatttttttctgagctagaagtggaaaatccataaagaatagattggtcaaaagttaattttgatctctgggggaattatttaattaaaagaacaattccccactcaaccaacaagtatttgcaaaatgtctgcaatgaacctagcactgttagatgctagggattcactgctaaattaggcacccagtcatagcaatgtgaggcac

SEQ ID NO: 599294 - DNA, 526 bp, Homo sapiens
ttatgcagccctttttatagacttaattagttcccaacaggtcccacctattaactagtacagtaatttccccttatcggtcagtgtctttgctttgcacagtttcagttacctgcagtcaaccatagtccaaaaatatgtatggtatagtaagacattttgagagagagagattacattcacataacttttattcttttattacaatatattrttacacttattctattttagtattaataactactgttaatggcttattctgcataatttatgatttataaaatttaatttataaataaaaactttattataggtatgcatatttagggttcggtactatccacaatttcagcatccactgggggtcttggaacacatcctctgtggataaagggggactactgtactatcaaaatagaaattaagtttcaacataaatcttggagggaacacattcaaacaacagcaccatggtctgtccaagatttatttaataatcattattagaagatatataaacctt

SEQ ID NO: 599295 - DNA, 616 bp, Homo sapiens
cttggaacacatcctctgtggataaagggggactactgtactatcaaaatagaaattaagtttcaacataaatcttggagggaacacattcaaacaacagcaccatggtctgtccaagatttattyaataatcattattagaagatatataaaccttggtctgtctcagaaagaatctttatctatatcccatctataggaattattgtgaggaaggtgagatttgaaggctgacttcttccttccttttgtttttacccatctccttcatcatgcccttgccaccccagtaaccaatattcacagacaggtccttcccaccccaccatcacacactgcatcaagacacctaggcatgccatcctgtcggtatcctctattctaaacatacctatcctcagcctcattcacataacgcctgttattcctaggaagcgtaaatcatgcctcatttttccctcctgacctgggcaagggagttaagacttggaattctgacagaattcagtcatgggctaaaggcttccccagggagatatgaactcccaggtgcttctacctcagggcttgctatggattgaattgtgtcctcccagaattcacatattgcagccct

SEQ ID NO: 599296 - DNA, 523 bp, Homo sapiens
tgggcattcacatatatatcaagagtttcaaagctcagtcatgtcaattcttattgcagtgcggctgtttcatcagaggctgaggacactctttatgttaagtaagggatggaaayagatggaatgagtttcatctggagttctagttctatcacggagaacataaaatggccctgtgctgaatatagtttattttcccctccaaagtcaattcatcaccttctgcatcctattctggcctcaaaagctggcctatatgaaattcatcagcaggcccctctgcccttttgcttatagctgattttagccatttggaggtacagataggcaatgtgagagcaaaaggagtgcaagttggcatttatctctccagttctctgtctgccaggtgtctatgagtcatggggcttccctaaggggaagggcaccatttatctaaggcagatcaccccatatagtcacccctttgagagtggcactaggcatggtgagaactcttcttactctactcagggtatttcaa

SEQ ID NO: 599297 - DNA, 649 bp, Homo sapiens
ggctacagatgacaacatgcaggataaaatgttttacctgcaagacrataagtaaaacttcatgattcagaaacaaatcagcaaaacttcatgattcagaaacaaagcagtgtccttttcagtgtcagtaggttacgtattaatcagtatgacagcggtttgaggaactcaggagaagattagagggattcatggtaagattctttactgaaggacaggatgtaagccatgaatcataagaccttccccaggcagttaatttggaagcccatcaaatgcgatctgtgggttatcactaggaaagacacaaaaacaaatttcacccctaattacccggtttgatcattacacattgtatgcatgtatccaaatatcacatgtgtcccataaatatgtacaattatcatatataaattttttaaaacgtttgggaaaattcaccaattaagaagaattttttttctaagaagctgtttccccatgcctcacccaagtccactggtagggcttaacccctttgttcttgaattcctgccattaagctaatcttgagtctggtattcctgctgttccctgttatttgatccttcccatctatttttctgaactcgacctataagactgaagtgattagttttataatatatgt

SEQ ID NO: 599298 - DNA, 649 bp, Homo sapiens
ggctacagatgacaacatgcaggataaaatgttttacctgcaagacgataagtaaaacttcatgattcagaaacaaatcagcaaaacttcatgattcagaaacaaagcagtgtccttttcagtgtcagtaggttacgtattaatcagtatgacagcggtttgaggaactcaggagaagattagagggattcatggtaagattctttactgaaggacaggatgtaagccatgaatcataagaccttccccaggcagttaatttggaagcccatcaaatgcgatctgtgggttatcactaggaaagacacaaaaacaaatttcacccctaattacccggtttgatcattacacattgtatgcatgtatccaaatatcacatgtgtcscataaatatgtacaattatcatatataaattttttaaaacgtttgggaaaattcaccaattaagaagaattttttttctaagaagctgtttccccatgcctcacccaagtccactggtagggcttaacccctttgttcttgaattcctgccattaagctaatcttgagtctggtattcctgctgttccctgttatttgatccttcccatctatttttctgaactcgacctataagactgaagtgattagttttataatatatgt

SEQ ID NO: 599299 - DNA, 575 bp, Homo sapiens
tgattttttaagttattttgtcatttcttgcttataaaatcataaattacagggccagatgatatcttagggtacattgagttcaactctcaactctctggggttaggaaayggaggtccaaagggggtcaaagacttctcaagaccagcatcttgcacagagatgagcctaggccccagctcaccaatttctaaggctctctccactgcatcacagggagaaaaagcaagccgtgtcaaagggaagaaacagaatcccctcctgccgacgaggaggcatgtgactccttccacatattgcatgtttgttactctgggaattaatggctcaatctggtattaaacaaaatgggtctcgtggctgatctggcccaagtgaaggatcagcaaaatggagacgtgagcttccctgcatgataattagaagtagtccctgaatgggtaagacaaacacattaagcctttctgcaaagccaattttgggcaatggtctgattgctggataaatcacaccaagaagttgaaatgagtggtgaggatggcacaagcagggtacattagagggtagcaaacgg

SEQ ID NO: 599300 - DNA, 575 bp, Homo sapiens
tgattttttaagttattttgtcatttcttgcttataaaatcataaattacagggccagatgatatcttagggtacattgagttcaactctcaactctctggggttaggaaatggaggtccaaagggggtcaaagacttctcaagaccagcatcttgcacagagatgagcctaggccccagctcaccaatttctaaggctstctccactgcatcacagggagaaaaagcaagccgtgtcaaagggaagaaacagaatcccctcctgccgacgaggaggcatgtgactccttccacatattgcatgtttgttactctgggaattaatggctcaatctggtattaaacaaaatgggtctcgtggctgatctggcccaagtgaaggatcagcaaaatggagacgtgagcttccctgcatgataattagaagtagtccctgaatgggtaagacaaacacattaagcctttctgcaaagccaattttgggcaatggtctgattgctggataaatcacaccaagaagttgaaatgagtggtgaggatggcacaagcagggtacattagagggtagcaaacgg

SEQ ID NO: 599301 - DNA, 380 bp, Homo sapiens
tcagttctcctggttctctggcctttgagctcagactggaactgcacaatcagttttcctgggtctccagcttgccgactcatcctgcagatctttggacttgtcagcctctataatcctgtgagtttattccctataatatctatttatctatatggagaaccctgactaatacaggcaggaaaaggagttgacactttttggtgaacagtgtggaacragtgaaagggtttggcaagtggactttggaaagatgaattcagcaatggagtgaggcgtttcctccctgggagaaatactcagttcaagggcacctcttcaaccaccttttaatagttgggaaggtctttgattgaaggattggtcggaaagtgctgtgg

SEQ ID NO: 599302 - DNA, 597 bp, Homo sapiens
tttaatttaaaaaaaataatttctaggctgagtgtggtggctcatacctataattccagcactttgggaggctgaggtgrgaggatcacttgagcccagtagctcgagaccagcctgggcaacatagtgagatcccatgtctaaaaaataaattagccaggtgtggtggcacacagctgtgatcccagctacttgggaggctgatgtgggaggatcacttgagcccaggaggttgaggctgcagtgagctatgattgtgctactgcatttcagcttgggcaacagagcaagaccccacccccaccaaaataataataaataatactaatttataatggtacttcattgtttgtagatgtgagtagcactgaatataaacgtgggatcttagataggttaatctctctgtgccttagctgcctcatctggaaaatggagatgctaatagtagctttctaataggattgatcctagaatacacaataaatgttagtgattgaatcaatcacggtcaagctaggaaataggaaccttgttaagtctttcaaacaaaggaaaaataacaaagaaaactagtgttggaagaacaaagaagcc

SEQ ID NO: 599303 - DNA, 609 bp, Homo sapiens
gttgtttggtccactctctatatgtggcctcccaaagttagatattctaccccaggctttcttacatgatagaaggagcatcctaagaggggaaaagtagaagctgaaaggtcgcttaaggcctaggatttggaattcacaatgtcttctttgacacttggttaaaaacaagttgtaagggcaagtcagattcaatggggtaaggaaataaactctaccttttgacggaaagagctgcaaaatattgtggatatgatataccacaacccagatgcatggctcactcttcatatgyttgctcaaatgtcaccttatcagtgaggccttctttgattccatataaagtaactttccctcaccttgacatttactatcccacattttactcttctctacagcacatatcaccacctgacatatgcatgtttacttatttgtttactatctgtctccttccactacagtgtaagcaccatgaagacagaaattttttgtttccgtactgtatctccagtacctcagacacagccttgtatatagcaggcactcaatcagtatctgttgaatacattctatcaagcatgtgtcatgaattaacaaagcaagtat

SEQ ID NO: 599304 - DNA, 453 bp, Homo sapiens
tctatcatgagctcctttaataacccctcttccccaggtgttcatccatatcatgttccttccctgaccctgatcaaaacccagggtagactctgagaattaattttagtccacgagacatctttctgaaggatatttgcaacttaaatcttatcttgagtggtaaaacaaagctctggccactctcccaggaattttaggcatcagcaaccaggaaagactttttatcaagcagccagcattatcagtgcccttaatattgcagtattttagtggtggatcttggagaatgctggacctgaacagaatagtaattcaaagtcagatgtataagatgacatatcagttaakaattctgttcagctgctaatggcagaggcccaactacaaccaagtaggagtttattctctcacatagaagaagcccgcaggtaaaaacttcagaggggtatc

SEQ ID NO: 599305 - DNA, 453 bp, Homo sapiens
tctatcatgagctcctttaataacccctcttccccaggtgttcatccatatcatgttccttccctgaccctgatcaaaacccagggtagactctgagaattaattttagtccacgagacatctttctgaaggatatttgcaacttaaatcttatcttgagtggtaaaacaaagctctggccactctcccaggaattttaggcatcagcaaccaggaaagactttttatcaagcagccagcattatcagtgcccttaatattgcagtattttagtggtggatcttggagaatgctggacctgaacagaatagtaattcaaagtcagatgtataagatgacatatcagttaataattctgttcagctgctratggcagaggcccaactacaaccaagtaggagtttattctctcacatagaagaagcccgcaggtaaaaacttcagaggggtatc

SEQ ID NO: 599306 - DNA, 567 bp, Homo sapiens
aattttagtaatacattttgtttgctgcaataatagctaaaatgttatcatctcaacatgaaatcactataaaattattaacgagatattttactttctttttttaatactaagacttcaaaatcaggtgtgttctatacttgtaacacatcacaatttggattagacacatggccagggtccaatagctacaagtggtagtggctaccatgctaaacagggcagttccaagaggctcctacctcccagggttccagcagaaaatggagcgcaagctctttccctttgagttccccaaacatatgtaaggattaaactcagttaattttgaattttcccctctgccttcttcattccctcttcccaagggctgatccaagttctcccccacctggttttagctaatctcagagatcctaccataatgtaacactctggtttcttgtccagcttcttcttctsttggtggtcccccttctatccctctgctcatggaataattttgcataactggaagacacgtatcacagtagctcaacagtaattatccaagtcttttaccctcac

SEQ ID NO: 599307 - DNA, 538 bp, Homo sapiens
catgcttctagtaaagcctgcaaaactatgaaccaagtaaacctcttttctttataaattacccaccctcaggtatccctttataataacacaaacagactaagggagtgctcttataaaaagggctgcaggaacttgtttaccccttctgccatgtgaggagacagagaaagcatcgtctattcagcagagacactgaatctgctggtgccttgattctggacatcttccaaaactgtgagaaataaattcctgttgtttataaactacctagtctaaaggtattttgttatagcagctcaaacaaactattaataaaacaatactaacattcacaaatgagggcagcaaatgctaagagtgatgtgaggagcaacagcaaaaagtggtgcaagagttcagaatactgctaatcatcccagacaagcacagagttgtacaatcatycatcaccttctagaacagtttcatcatctcaaaaagaaaccttgtgccccttagctatcacctcccaactccctagcttccccagtcctaa

SEQ ID NO: 599308 - DNA, 475 bp, Homo sapiens
ctggttcttggtctgcttaactcagtcgtctttcagaattccctagaaaccttgcttccctggaggacttccgtgatttcttaggctatatttggctatttttttaacttgtcctcctagtaccatgcttcaactaacaaaacccaaattataatttttggaagttactcattgaattaactgtcctccccagtagaattcttcaagagggcaggggctgtatctgtttcgytcaccattgtagtctcaataccaggcacagaatagacacatgataaatctttattgcatggataaataaataagcacatcatatctgtgtgcttatgggagatggtaaagaaaatgtgtcctgtgtaataggaagcatgacacaatatggaaaaacattgtgttatggaaacaattaactgaaaatcaggcagcaggcccaacaacagagatcagatatgcacatctgctggtggttctgtgt

SEQ ID NO: 599309 - DNA, 602 bp, Homo sapiens
ctatttcaaatgcaaatgacaaatccagcttgaaaaataactagccatccctggaccaataaatgatgattgatcaagggagtggaaactctcatgratccagtttgggtcaggtgtccagccaatcagtggtggccagggggcctgggatgggtgagatgatatcatttgaaccatgatgagatgggagtttctacaaaggtgagtgtgcatgggagttgttctggatagaattcaaaaagcatttactgcaacactctcatatatcaatcattgcatttctaattatttcttagcataaattcccatgtgaaatcactgggtcaaataatattaatattttgacagcttttaccaagctttttgccaatctttattctcacctgctgagtattagaaaatcattccatgtcccttctccatctcagcatttactactattttttaaaaaaatgaagtatttgaaaagtggaaaatggtttctcattgttgttttattttttaaaaaaccagtaagcctgaatccaggtaaaaattggcagtaaccaacatatgcattaatagtccactcattggggtatttaacatggtggaactaaaag

SEQ ID NO: 599310 - DNA, 608 bp, Homo sapiens
ggaaaggggacagctgcagcactacagcccctttctgggatatccctgaaagacagtggtgaaggaaaatcctcccagtgggcagaactttgagccatgcacctggttgttcactttgcttagaaggagaaatggccagacatgcaattatataccagttcatgggctgtggccagtggcatggctggatggtcaggaacttgaaagtgaaacaattgagaaaatggtgaccagaaatttgaagaaaaggtatgtgtagaactcttggaatgggcaaaaatgtgaagatggctgggagcagtggctcacgcctgtaatcccagcactttgggaggccaaggcgggtggattgcctgaggtcaggagttcgagaccagcctggctaacatggtgaaaccccatctttactaaaaatacatttaaaaaaattagtgggcctggtggcaggcgcctgtaatcccagctactcaggaggctgaggcaggagaatmgcttgaaccctggaggtggagttgcagtgagccgagatcctgccactgccctccagcctggtgcaagactctgtctccaaatatatatatatatatttgggtcctatgtgaatgctc

SEQ ID NO: 599311 - DNA, 400 bp, Homo sapiens
gtatgtgtagaactcttggaatgggcaaaaatgtgaagatggctgggagcagtggctcacgcctgtaatcccagcactttgggaggccaaggcgggtggattgcctgaggtcaggagttcgagaccagcctggctaacatggtgaaaccccatctttactaaaaatacatttaaaaaaattagtgggcctggtggcaggcgcctgtaatcccagctactcaggaggctgaggcaggagaatagcttgarccctggaggtggagttgcagtgagccgagatcctgccactgccctccagcctggtgcaagactctgtctccaaatatatatatatatatttgggtcctatgtgaatgctcagcaaagagtgatttcagcagaagaggattctaataatcag

SEQ ID NO: 599312 - DNA, 593 bp, Homo sapiens
tggagcaacagacattctctaactaaaagaacttgagggaggggcaaaagctggacaatgatatcaagccaaacaacagataaatggagataaaaggactgctgataagttctgaatttatttaggagtaaaaatgggctgggcatggtggctcacaccattttcccagcactttgggaggccaagaggggtggatcacttgaggtcaggagttcaagaccagcctaactaaaatggtgaaaccccatctctactaaaaatacaaaaatcagtcaggcatggtggcacgcgtctgcaattccagctactcaggaatgaggcatgggaattgcttgaactcaggaggcagaggttgcagttagctgagatcatgccactgcactccaagcctgggcgacagagtgagactctgtctgaaaaaaaaggagtaaaggccgggygcggtggctcacatctgtaatcccagcactttgggaagccaaggcgggcggataacctgaggtcaggagtttgaggccagcctggctaacacggtgaaaccttgtttctactaaaaatacaaaaaaattaaccaagcgtggtggtgcacgcct

SEQ ID NO: 599313 - DNA, 499 bp, Homo sapiens
gtgtactttcaaacataggtaagtattttagatgtaactgagagtaaaaagaaattatttgtgtgctttggactttgaactcctatcactcagttgaagtataaatgtatatttttaatttgccagagtaaaatgctggaatagttcatgatgattatgaaagttctccatgttatgaaaaaaaatttcaagaaatttctaacatgtaaatagagatagcattaactagaaaactttaggcagaatataatatcctttttgaatcaaaaagctttataaaaatttaaatrgcattaggcagaatatagagattagattatttcataattctaatttttatataattatttgttttagccctcttaacattaaataaaataatctccaaagctatatttagcttttagtaatttaattctgtttaggccatgaatcttcagttgtgttttcagaaagtaattagcatgcagcctaatgaagcagaatgactgactgtaaa

SEQ ID NO: 599314 - DNA, 642 bp, Homo sapiens
gagccactgcacccagcctaaaagtcatatacttatttaartaaaagccactttcatacaaaagaagaggaaacatgaattgttagcctttgaaaatttagcataccatgaggtgcttcaaagttttacttcttgtcaacagatgctgtaccttttctgagttagtggctcagttttagctattggctacatataaaacatttcttaagtaagtactggaaattgaataacagtctcaatcaatatctcattaaaatgcatgaaaacattgaaaaggtaccaaagataaccagtgacctatatagtatgtggaaaagttatctaacttctagggctttgataactgatttggatataaaagaaagataaactacaataccttttgaatcttttgaatagacaataagaaatcagttccatgggtctttacaatttgttgtaacaacacacaatatcacatgttcaagttaactgctacacatttcattaaaggtgatctatttgtgggaaagacagagaccgagaacagagaaaaataatagattgactcacctcacctcctcagtttaataggctctaagtccaaaaggtcacaaggacaactgagtcagtgggggaacccagagaagctaatcattcata

SEQ ID NO: 599315 - DNA, 540 bp, Homo sapiens
tgtccctatactcacaggtggtgttcacataacattgctgtgtaacaagctactccaaaattgcgtggcttaaaacagcaacaatcactgatttgctcataaatatgcaatttgggcagggcttggaagaggcagcttgtctctgcaccatatggtaatttgactgggggccagagaatccacctgcacaccactgtatccccagtgcccagaacatggcctggaacataggaatatattgctataaaaaaatttgactggccaaatcaatcrcagcctgaaacaagccccacttctagatttgcagtcatttgagccaatatactttcttttaagtcagtttgagatgcattttctgtagcttacaacccaaagattgttaactgataggaaggaggtgaggaagtgaaggcagaagtaaagagtaaagtgtctcagagatgcaagaagtggtatccagattaccagagattaaggagagctgtccccagcaatggaggaggagtaggagtcccagacatctcttggtggcagtgtccc

SEQ ID NO: 599316 - DNA, 656 bp, Homo sapiens
atttgactggccaaatcaatcgcagcctgaaacaagccccacttctagatttgcagtcatttgagccaatatactttcttttaagtcagtttgagatgcattttctgtagcttacaacccaaagattgttaactgataggaaggaggtgaggaagtgaaggcagaagtaaagagtaaagtgtctcagagatgcaagaagtggtatccagattaccagagattaaggagagctgtccccagcaatggaggaggagtaggagtcccagacatctcttggtggcagtgtcccaaagaaatggcaaggctcagagaggcagggggtggactagggaggcagcaacatggccaggtgagggagagatcccagcagcaagaacaaaaygaaccatgattctgtaactaacacacaaaatcagcagatagccacccagatctgaaatgaccatataggagagtggccatctgtgcagaggccagtaggaacagacggagggcccccaaaatgtgggtactgcatggggccgcatagtctgatgactcccaggaagtaaaagggaaactcaaaaaaatgactgaggtcagtttcttaccagcctggcagactaggggcatggcatgaaaaattaagttgatttttagaaaataaattttctcaa

SEQ ID NO: 599317 - DNA, 656 bp, Homo sapiens
atttgactggccaaatcaatcgcagcctgaaacaagccccacttctagatttgcagtcatttgagccaatatactttcttttaagtcagtttgagatgcattttctgtagcttacaacccaaagattgttaactgataggaaggaggtgaggaagtgaaggcagaagtaaagagtaaagtgtctcagagatgcaagaagtggtatccagattaccagagattaaggagagctgtccccagcaatggaggaggagtaggagtcccagacatctcttggtggcagtgtcccaaagaaatggcaaggctcagagaggcagggggtggactagggaggcagcaacatggccaggtgagggagagatcccagcagcaagaacaaaatgaaccatgattctgtaastaacacacaaaatcagcagatagccacccagatctgaaatgaccatataggagagtggccatctgtgcagaggccagtaggaacagacggagggcccccaaaatgtgggtactgcatggggccgcatagtctgatgactcccaggaagtaaaagggaaactcaaaaaaatgactgaggtcagtttcttaccagcctggcagactaggggcatggcatgaaaaattaagttgatttttagaaaataaattttctcaa

SEQ ID NO: 599318 - DNA, 637 bp, Homo sapiens
tggctgggacaaacttatttttaaatagagcgctggttatattttcaaatgatctacttagtaagtttttatttaatctccagacaacttttcaggtgattcctcagcactgctaaatttaaagcaagggctttggtgtttaatctaaaaaaagaatacaataaatacactaccaactatcccaaagcctgaaaacatagggaaaatatgtattgttttctgtctgcatgtttttctcccttcaccaggccatgtgctcctgaaggaaatacattttatgatttcttctactgctagctcctaacacaagtctcaacacacaactagcagaaaatatatgcttgagaaataattttttaaatgaggtcagaaaataaaacagttgaacaaataaaatattctctttayaaatatttaagacattcttctgctatggattggaaataagagtgtgtaatattatatctaacagctaatatgattttacttcataaaaatgtcctaaattattgatgctgtgttttggaacttacagtgtaatcagtgtttgacagtgagtttcttttaatttgtacatcatgaccatatgtattatgtaatactcaggtgagagggctttctgaattttggtaaatat

SEQ ID NO: 599319 - DNA, 583 bp, Homo sapiens
tgctaattttgtcatttctacaataaagcttggtccacctgttttcaccttagattgtcccttttctaaacgtcaaaaakgtagtgcaaattaaaaaaaaaaattatcttttacattaattctaccatttgtcctaagggatagatatctttgaaaacatgtttatattatagtgagagtgaatggcagggatgaaatgtatcatccaaaaacccaccaggttgtccaaatagtagaaaggtgagttttactggcaatatcagtttgcaaattgggaagagacagtctccagtgtgtaccaaagatgctctctcttcgaagagggaaagggtagttgggtttttatgcctcacagagtctattacacaatagaggcatacatatttagcaggtttggggaaaaagctatacatatttatgagcagagtcaagcacatgcctaatgggtaaacatatatgtaatgtacatcccatgttcattttgcggtggggatttagcattaaaatgaggaggaatttggctctttcttttaaagaaacataggatacaaagtttgtggacagtctctgtaagctggccaaa

SEQ ID NO: 599320 - DNA, 427 bp, Homo sapiens
gattcttgctgttttgtaataactcaaatacttcaataatggttcatgtacagggttgtgtttcaacttctttgtgttatactcctaatggcacatggcttcacacacgtttcagcacatctgcctttcaagaagaaactgcttaaaacttaagacagttgttaaaaaggaacagaccagccagaaaacatgtctagagaattttcaattgatccatgtgatwttgctaaaaattgtaaccacattcagcagcaacacttatccttcgggcctgagaaccaatgtgtgtcaccagaaattatggacaaactggctgaagtatcacttctttttcttcttaggaaatcttgtttcatcaatgctgtatatcatatatgcagatccgattaactttaaatccacatttagtctctctcatctaatcctt

SEQ ID NO: 599321 - DNA, 563 bp, Homo sapiens
tcaaaactgggctatgtgttcctactcaagcttttatcaattttactgtgtacctgatttgtttatgaaacaatctatttcaaagttaatgaaaaggggwtggttttagtgggagcttgggaggctattgagcattccttttttttaataattaaatttgtgcaaagtccaaatggtagtgtccattttacatacacacacactacacacacacacacacacacacacatccagcaaaaatcatagaggctgactattgagtttattagcttggagatgctacaagactgatttatgtcctcttttggtagaatgtaggaaattcagagatataaactgctacctaactgtactctacttagtgatattttttcagctctgagctgcaagaaaacatatttcttgtatgtccatgtccaaaaatgaaataaaatggaatctgagtatcttaaaaaatgcaagtatttagtaaaatagggtactggtgaaggcattctaagtagaaaaaaaattctatcaaaggtttaaggtagaaatggtttagaagacaattagccagtctg

SEQ ID NO: 599322 - DNA, 607 bp, Homo sapiens
gttgtaatgtgaagctatacgtatatgactgcaaataattcagtagggtaaaaataagttgtttctatagattccttgtgtataaggtgagggaaaggaaggatatagtacaaagtccactctaaagtgatttctcgtacaatcattaagttctgcttacatagaaatcttaccagaaaacacatcaaatggattttggagtgaagttgtatgattttaaatgcatttaatatgtaatgaactgtttgattttcagtactgactggagggttgctaactattccctgatagtttattgctaacaaaggaaataatttaagttgtaaaatgtttattttacaactcaaaggaaatgaaaataaaacctagcccctatttatctgggcacataccaagttcacrtggaaggaaagtatatgaccatccagtaggacagagatggttactatctgatggcattgaattggactcttgagctcctatattcttagaagaaagcagccaaattgattgtgtattcagttttccagcattaccattttattgacactttaaaatcagatgtgaataatttaaagacagcaaaagaataaaattggtcattaaa

SEQ ID NO: 599323 - DNA, 592 bp, Homo sapiens
aaaaccttctagctggagtggtccaaaaaggtttcatgaaggaagggaggtttgatctgagtctcacaggacaagaagaactaaaatggaagggaagggaagatgactgtatgtgcacaaatcggtcatgttttgagttaactagaatccagatgtccctcagcctcacaactaatgatgatttaagtcaagataatgatttcttaaaataaatggatatatataggtaagcaaacagagatgaataaawaacggggttcatctctaagagggaataatggatgatatttacttttttctatttggttatctttttttttttgtttttagcttatagaataaaatatctagtataagcaatgctaaagcagtcttcttaactaataaatacaaaagaagagaaagaaaaaagtatagaattaccacttcaaaaccaactcattttggaataaagatgaaatacatattgggatatattatatcaaacagaatctcacatggccaagctacaaagaggagcttgcttatattttattccatgaaaaagacaaataaaatagaaagagtgctgtgttgcttatttacagaaata

SEQ ID NO: 599324 - DNA, 580 bp, Homo sapiens
taacctacataatgcaactttgtactttgacctatatcatcccattccccctgcccttaccccatccctagtaaccactgttccactctctgtgaaacccaatrttaaacatagctttgcttcagtttttatacatgaatgataatccccaaattagtcatagaaattattaactagcaattcaaaggcgaagtggctcatgcctgtaatcccagcactttgggaggccgaggcaggcagatcacaaggtcaagagatcgagaccttcctggccaacatggtgaaacctcgtctctactcaaaaaaaaaaaaaaaatactaaaagtagcctgacgtggtggcatgcgcctgtgatcccagctactcgggaggctgaggcaggagaatcacttgaacccaggaggtggaggttgcagtgagccgagattgcgccactgcattccagcctggcaacagagcgagtctctgtctcaagaaaaaaaaaaaaaagaaagaaatacgttgataataattttaagttggacaatcatggcaagtaattaaatgtacaatatataaagaaatattttacaagtttacc

SEQ ID NO: 599325 - DNA, 569 bp, Homo sapiens
ataaacaaaagctaatgaaaatatactaaggttttgaatagtgtcccagtttgcagccttggctgaatataatcccttggctgcaaactgggatactattcaacttattacacagaggggtggaacatcaaactgagagatatgctaagcattctttcaggccccaaaacatgcaggggtttaccttttcctctgtgaggcaaaataggaaactgatcatgtattccaataataaattgtgctaggaaagtcccaattttagttttaatacaattcagtttacctctgatttgtrtattttctaggcctttcaactaatggtctgtggtctttgtattttttaaatttacgttctgttttcaagagatttccatattatttattcacttacccagtatagcttcagaaactctcaaatgtcttaaggcagagacaaattgcatgttttaattccctgaagtcttcaattttatcactctagtattacacaattgccaaaatatcttgtggattttctgttctcctgtagtggggctctgccagaggccaaatttgaatagtgagcctct

SEQ ID NO: 599326 - DNA, 568 bp, Homo sapiens
caaattgcatgttttaattccctgaagtcttcaattttatcactctagtattacacaattgccaaaatatcttgtggattttctgttctcctgtagtggggctctgccagaggccaaatttgaatagtgagcctctagttctgaatgtctctgctctctgtagttttctttgctttgtcaggtcttgctgtcttttataatttatcctatttttatagttctgttaaacaatatcattggcctgctgtaaaccgatccatactacttcaagcaaaactgcaaaatttaatatcaaggcaagttttttgtttgtttactttcctagttttatatagattatcccctatagtttctactcagttttctagtaactattctcctctcacagccaggctgtcagtggctgtgtctctgatgctaatgcttgatttcatagaagtttatcttcaccatctgtttataccaccttgctatcttgtacygttctttaaaaagcctaattttggtctttaggactaaattatctctcagaactccactccatctgctgactttatttcagtttggt

SEQ ID NO: 599327 - DNA, 644 bp, Homo sapiens
aagtgattctcctgcctcagccttctgagtagctgggactacaggtgcctgccatcacgcccggctaattttatattttcctctgggattagtgctgggattacaggcgtgagccaccacccccggccagattctttaatctcttccttatgtctgtttacctttgtttcatgtattttatatctttatattttggtattggatttgggtaaatttctcagtaacatttttgatgtattaattttctcttaaattatttccaatcttgaatttttgttgtcataatttgtttcttttaacttttaatttggaaataaaakattcacagaaagttttaaacatagcctggagaggttccaggttcctttcactgagttttctgtaatggtaacatttatagtacaataacaaaaccatgaaattgacatgagtacaatgtgtgcttatagttttatggcattttatcacttatgtagatttgtatacctactatggcaatcaaatagaattattccatcaccacaaagatctccctcttgctactactttatatttatactcactccttcctcctctcactattcttgatccctggcaactactaatctcttctccatcttgaataacaaaatgtcattcaagaa

SEQ ID NO: 599328 - DNA, 644 bp, Homo sapiens
aagtgattctcctgcctcagccttctgagtagctgggactacaggtgcctgccatcacgcccggctaattttatattttcctctgggattagtgctgggattacaggcgtgagccaccacccccggccagattctttaatctcttccttatgtctgtttacctttgtttcatgtattttatatctttatattttggtattggatttgggtaaatttctcagtaacatttttgatgtattaattttctcttaaattatttccaatcttgaatttttgttgtcataatttgtttcttttaacttttaatttggaaataaaatattcacagaaagttttaaacatagcctggagaggttccaggttcctttcactgagttttctgtaatggtaacatttatagtacaataacaaaaccatgaaattgacatgagtacaatgtgtgcttatagttttatggcattttatcwcttatgtagatttgtatacctactatggcaatcaaatagaattattccatcaccacaaagatctccctcttgctactactttatatttatactcactccttcctcctctcactattcttgatccctggcaactactaatctcttctccatcttgaataacaaaatgtcattcaagaa

SEQ ID NO: 599329 - DNA, 554 bp, Homo sapiens
gaatgaatttacaagactgtttttattggaagccctccaatttccactaaactgacttttttcctcacatttccaaaatagstgcctaaaatgaagattcaagtgaccctctgttatctaaattcatcaaaagtctgtatctttggggtttagtctaagaaattgagtctcttcttaccaaagcattctatatatgggtcagtgctctttagcagccaatatccagaataaatcattcctttccatggttttagttattgtctaaggctagtttctgtaaaattatatgtttgatttgaccttgcctaccgcttatttttaatttgtcttatacatattgtacttgaaatagatatcttctcaatctctagaaaccaacagagggaagtcatacatccttatttttcctctaagattccctttgagccacttaggcaatatttataagaatttgagtgtctgtagcatttgaacctagtacattgatttttaaaaatggaagtaatggattctgccttaaaaagtttgcaaactgaacacttaaaaattgttaa

SEQ ID NO: 599330 - DNA, 571 bp, Homo sapiens
tttccaaaataatgacaaagatttttttttaccgttattcgcatacttccttaaagagattttcccagaagccctaattactcttgccagtgttggcagatgattactgtttttctcttggctaaagcaaagcagaataacttgaatttcagggagactgaggatgaagtgttgcctcattgtattgtgtcrggagcagctctaagaaactcaatcaaaccagctattcactgtacatgtaactactgttgaaacaacaactaagaatctagttcagattctgaaattttccccagaattggaactgctaaaagaagacctgtcagtatcttgaccaacatcagttccagggaaagcatctcttatttctcacactgaaatgttcttgatttgaggtagagtctgtccagtctactctctcatgttttttccagtctggtgcttgggctgtgggcccagtggctgatcatactcaatttgtccagctcagtttcaactgcatgagaggccagctgagcagcttcctctggagtttggagagagggctaaattgggagtgaaatttcccact

SEQ ID NO: 599331 - DNA, 581 bp, Homo sapiens
gatgactaatacccacgtacatttctctggtgtttatatggtggtcagccctgtaatttacagaacagccaattaaattattgttggactgcttgaatcatgttttcagaaaagtggatttggatgttaggacaggaaatggctgactcatttctatcccaattttgtgtgtgtgtctgtgtgtgtgtgtgtgtttgtgtgtgtgtgtgtgtgtgtgtgttttactggaatgcaaatgccttctactgaagaaagcaaagtaagtgctattgwtttaaacggaaattggaacattaaacaaagcagctgacttaaaaatgactttgtagagcagggcctattagtattgcattaccattcttaatgcatagccagtcagatttttcatttacttctgtaaaacatctttttcctcccattcttcatgatttcttgtaaagacttcagtatctagatatttttcttctaagtcaaacagacttctgatatgtcaaaaatacctttgtatgcttacagcattttaacactgaagcttttttttttctccaaggatggctatgatcttgatttttttttcaacc

SEQ ID NO: 599332 - DNA, 580 bp, Homo sapiens
cattatggacacatggatattcattttatactttggattataactcaatactatattacttactttgttgctcaaatagttcctgttttggcctttgggaactttttccattgactcctgtgtcccattgacatattccattaatgtcagggtgttggtttgttttagaatatctttactttctgggactacaagattctctaggctcattttatgtatttcttgtccsagtcctagaaccagccttttctccaaggagctctcaaatataatttgaattcctatttgagtcagtattctacaaaatatatgtgtgaataagcatgtggttgctaaaaatggagaaatctatctccttgcaaaaatgtgtgtacaccacgtccattaatgtaggcgctatcagtatgctaaggtgtacacactccactcatactaatgctaataggaatctcaggaagtaaaaacaattcctcattactagaataggcagatgccatttttatggacttgctctcctttgttttatgcctaatggagtgttccctgatgttttctgagatgagatttgtattatcccttt

SEQ ID NO: 599333 - DNA, 490 bp, Homo sapiens
ggagaaaagcttcatgtgcagaaactttgtagttaatgggaaagcaaataccaagttctgactacatacctccctatgcctattttttttwaaaaaaggtcttttttattcctgaagcttaaagaaataaaagctattactttgacaaagcagacaccaacataatgagatttgagcaggattctgtatttccctttatctaccactctgttttccataaggggacacaaagacattttttacacttaatcttgtgagctagttaggaattctcacttcacccatgcaaagaatagaaacaaactcataaagcaacagatgaatgcatgcatgtgaaattggaagtcatttgcatttaaagtgatagaacttaggtaaacagaggggatgcatttaggataatattttctttcaggactcaaagttctcaaaagaaaatatctcacctggttttcaagcaggtttcaaattatgtttgacaaacatggga

SEQ ID NO: 599334 - DNA, 490 bp, Homo sapiens
ggagaaaagcttcatgtgcagaaactttgtagttaatgggaaagcaaataccaagttctgactacatacctccctatgcctattttttttaaaaaaaggtcttttttattcctgaagcttaaagaaataaaagctattactttgacaaagcagacaccaacataatgagatttgagcaggattctgtatttccctttatctaccactctgttttccataaggggacacaaagacattttttrcacttaatcttgtgagctagttaggaattctcacttcacccatgcaaagaatagaaacaaactcataaagcaacagatgaatgcatgcatgtgaaattggaagtcatttgcatttaaagtgatagaacttaggtaaacagaggggatgcatttaggataatattttctttcaggactcaaagttctcaaaagaaaatatctcacctggttttcaagcaggtttcaaattatgtttgacaaacatggga

SEQ ID NO: 599335 - DNA, 630 bp, Homo sapiens
gactataactgtctaagtctcttgaatcttccaactcttttctcccttacaccttacttttggtttcatagggggtgaaaaatatgtcactggaagggtaaggagttaaacttttccctcctccaatttgaatggcaccttcatacccctttttgcttctcttagggaaaacctagatccatgtccagggagtgagaaacctggatctcctctggaagtatgggtgggaaggtagaacttgattaagtrttttccaaaaaccttttagccatgcatggatgtggcttttgaatttgaagacaaaggatagatgcctttgtttttggggtagcttagtaacaacccctgtgtctccttgtctaaataggcatgagcctgttataacaaacaagtagaaacaaaaccagatcagctaatgattcactgtatcagctcatcgagacacacaaaataagcttttgtagttgtttcagaagagaaatgaaaaacaatatttgattactaaattaagtgtatttaaaatactattattcaaagaacatttatcaagtatgtttcctcactttacagaaaaagaaagattagaagcttatttttttctttgaatttaagtgatttaatgtgatggaa

SEQ ID NO: 599336 - DNA, 490 bp, Homo sapiens
tgagaatagacagaaagcagcagtattatgagaatatgggctcagaagagaaatgatatctgtgtgcttgtatgacagccaacggaataaaattgcttgagttagaaatgcatgaacacacayatgcatatgtatgtacgtatgtatatatgcatgtatgtatgtaataaaatgagcattgtaaccagttgatttttgtcttttaaaacttccctttagaaaatgacctaaatagtgacgatcagtttttttgcttgttgtttgtttttaaaatttagaagttcttccaggaaaactttcctcttacaaatcactaattggataattgactctatcctagcatacaagctttgttgctactaagtgctgcataccagatttttccctttacagagatttacatgacatggtattaaatcctctggaaagtttccactgtgttctgaagtattttctttttctcctccaggtgcaaaatgagttgataaca

SEQ ID NO: 599337 - DNA, 490 bp, Homo sapiens
tgagaatagacagaaagcagcagtattatgagaatatgggctcagaagagaaatgatatctgtgtgcttgtatgacagccaacggaataaaattgcttgagttagaaatgcatgaacacacatatgcatatgtatgtacgtatgtatatatgcatgtatgtatgtaataaaatgagcattgtaaccagttgatttttgtcttttaaaayttccctttagaaaatgacctaaatagtgacgatcagtttttttgcttgttgtttgtttttaaaatttagaagttcttccaggaaaactttcctcttacaaatcactaattggataattgactctatcctagcatacaagctttgttgctactaagtgctgcataccagatttttccctttacagagatttacatgacatggtattaaatcctctggaaagtttccactgtgttctgaagtattttctttttctcctccaggtgcaaaatgagttgataaca

SEQ ID NO: 599338 - DNA, 490 bp, Homo sapiens
tgagaatagacagaaagcagcagtattatgagaatatgggctcagaagagaaatgatatctgtgtgcttgtatgacagccaacggaataaaattgcttgagttagaaatgcatgaacacacatatgcatatgtatgtacgtatgtatatatgcatgtatgtatgtaataaaatgagcattgtaaccagttgatttttgtcttttaaaacttccctttagaaaatgacctaaatagtgacgatcagtttttttgcttgttgtttgtttttaaaatttagaagttcttccaggaaaactttcctcttacaaatcactaattggataattgactctatcctagcatacaagctttgttgctactaagtgctgcataccagrtttttccctttacagagatttacatgacatggtattaaatcctctggaaagtttccactgtgttctgaagtattttctttttctcctccaggtgcaaaatgagttgataaca

SEQ ID NO: 599339 - DNA, 490 bp, Homo sapiens
tgagaatagacagaaagcagcagtattatgagaatatgggctcagaagagaaatgatatctgtgtgcttgtatgacagccaacggaataaaattgcttgagttagaaatgcatgaacacacatatgcatatgtatgtacgtatgtatatatgcatgtatgtatgtaataaaatgagcattgtaaccagttgatttttgtcttttaaaacttccctttagaaaatgacctaaatagtgacgatcagtttttttgcttgttgtttgtttttaaaatttagaagttcttccaggaaaactttcctcttacaaatcactaattggataattgactctatcctagcatacaagctttgttgctactaagtgctgcataccagatttttccctttacagagatttacatgacatrgtattaaatcctctggaaagtttccactgtgttctgaagtattttctttttctcctccaggtgcaaaatgagttgataaca

SEQ ID NO: 599340 - DNA, 564 bp, Homo sapiens
tctactttaattcttgggcattgacttcaaactaagatgacttataagaaataaaagaagtaaatttgaaactttaatacaaaaagtacatggttcatttaaaaatgtttcctatgtctaaatctatattttaaaaataacctttatcatgtaaaatgagagaattgctgagtttatgacaatcttaggtataaccttttcttaaagaacaaggcatcaatctttaatttgtttccctttcttgatttctcataagttrcaaaataaaaataaaaataatttcacaaattgttcattattattatcctccctacttgccccaggatttaagtactaacttttacttcctactcttagactttgtattgccaaagaaataaaatatgaaaaagcataatcacccagacctacctgcggaattgtggattatgctgtagatattagatcattgaaaggaacaatatactacttaatgaggagccaaagacaacattctacctgctgctcccttcaagctgaggaatgagtttaattgacttcaaagtcccattattctcaaaagta

SEQ ID NO: 599341 - DNA, 716 bp, Homo sapiens
aataagaaacacagaaaaatacagcataataaaaacacaagaattgtaggttgttatgttaaaaattaaataaaagaggtttcggttaaatgaaaaggcatataaactgcaagatatatatgttggggagctgaggttaaaaatgcaaagcaggacattcacggtgcaacagcctaacctatcaatccctctcttcagatggcctcaacagtaatgtttgcagaaagacatgcacagataacctccactctgactttctactaattagtgctcagtagtagctgtcttacagagaggaaaacaaaggaaggaataaatataaaagcttaaaagaaaaakaaagaaaaggagggagtatagcagatagaaagagagagattaggaaaataagtacagcagtagcatgacaatacttctgaaggagtaaaacttttttttcttttttttttttttactgtctctggaagtttggtcacagtgctttataagtcgcataacctggaaaattaggttaaagcccatatacagaaattgatgaattctttatattcctctactttttagtaataaggtcttatagatcttaaagtactaatagaaacaaagtggatatgcttcctatgacatttaagaagtagtatttctatttacttctttgagagattctatagctttactgaaagacaactggctcaaataggaacaatagtaattag

SEQ ID NO: 599342 - DNA, 543 bp, Homo sapiens
acccttaaactctgagatgcagtagccacctcctggggcactctaaggccgttagcctcagactggggctgcattcttggcctccttggttttgaggctttcagactgagatggtcacactaccggcttctctcaaagccacgctacaaactgcttcttcatcttgcagayggcctatcgtggtgagactttgcctttgtgacagtgtgagccaattttccccaataaattccctttcatgtatattctattggttctgtccccctggagaaccctaatacagacactgatgccaggaatggttctagaggaacagtattcttaaaaggaatttccttaattggttttgggatttctggaactgactttataatctgattaaacctaaatagtctttggcgtgaactgtttatagagatacacaaaataaaggcacttgatgcttctaattcaccactttcaggaggtaaggagttcagtgactatatgcataccttccaactctggtgggaaaccaagaaatgataatgaagttagttgggt

SEQ ID NO: 599343 - DNA, 516 bp, Homo sapiens
cccagcgctttgggtggccaaggcgggcagatcacaaggtcaggagaaagaaaccataatggccaacatggtgaaaccctgtcgctactaaaatacaaaaaaaaaaattagctgcatctggttgtgtgtgcctgtagttccagctagtcagtaggctgaggcaggggaatcggttaaacccaaggaggcagaggttgcagtgagccgagatcacgccgatgcactccagcctggcaacagagcaagaatccgtctsaaaaaaacaaaaaataaataaaataaataaataacgttatcccaatctgtttttaggtcctgttagtcttcacgctattcccaaagtgcttttttagacttcttgagaattatccttccctgtgtatggctcataaataaaatttatgcttcaaaaaccacttagatttcataattttcttcctcattgcgtattgtaggtattttctactcgctgtactatgtattaatctattgatcgtgaaattgtatatagtgcat

SEQ ID NO: 599344 - DNA, 355 bp, Homo sapiens
agatctttccagagtcacagactcttttcagaaattaaagttctacatttcttaaattgaaaatgctttacggcaggccaatgtacaaactctctgtatcaaaattacaaagcaatacatttgcatagatgtttccacatgtagacacaagaaaacaaatactgcaaaatcaatcttcagtattcagttacttcttcctgttggaaaattttaaatattacatmgtactttgataatacaactgacacgaagttctgggccctaaagtagaaaactctaaagtataatgaatataaatgagttctgcagaaaaccggttgagtacaggcaatcagcattcacaaacacaactcac

SEQ ID NO: 599345 - DNA, 581 bp, Homo sapiens
tgatcattaagtatttcttttagtactgcagtgataatatatatggaggaagaggactcccaagttctattgagggaaacaggtatccaaactccttcttgggccctaaccagtaaaatgctattatctttattaaaggtagaattaatgcaggtaaaaatatgacagctgaggcatgatatgctttgagagtcaagcaggatattaacttttcctgctgctaacataaaaggaggtttaacacaactctgtaatgggactgtctgattagmtatcatggctacaacaaattgaagttttttactctgggtgtctgttttatattctcctttctgaatcccaactggggtttgagacatcattaatttccacattttggatgttctggacttataattggatcaatcatttttggctttggaggagccataccgttctctcctacttaatagggtaatttgtttcaattcttctatataatattggtacattatctgggtagtcgtttgtaaaggagtctctctaaagtctttgctctgtccagtacaatttactgaaaagtgacccctaggggcccaatc

SEQ ID NO: 599346 - DNA, 276 bp, Homo sapiens
cagtatgtgatatatccatgtgaagcatatttatggaagcataaaagaaaatgttatcccaagagttatattaaataaaagagtaaatttgrtaatagatgagtaacttattttatatcagtataatgtatatttaagagatttttgtcactaaattattaaatattgagtgcaaatcctatatactgtttgaacaatactattattttctcagcaaagatcagcactgaaagactgactcctgcatagccactgaccacagcttctggaacaaca

SEQ ID NO: 599347 - DNA, 572 bp, Homo sapiens
tgctacatagtgcacaagttctggagagactataggggtgaagaataataaaagattttatttttgaaacatcttgcatagttgccctggttggagtgcarcagcacgatcatagctccctgtagcctagaactcctggctcaagtgatcctctgcctcaatgtccagcatagctgagacaacagtttggaactatcacacctggctaaatgtttttaatgcttcaagttttttgtataaatggggtctcactatgttgacaaggctggtatcaaattcctggcctcaagcaattctatctcctcagccaatcaatatgccaggaatacaggcatgagacaccgtgcctggccagcgcctttataatgttttattctcccaagttcttctcaaaaaagtcaacatccaccaagtatcagctgagatttgaacttcaaccctgggctgaactcagtggcaggactctccattcccaacaagggacaaatggagaaataaatggtgagagggaggagcttgattctgcccatgctaattggacacctgttgtgtgctaggaagacacacagagg

SEQ ID NO: 599348 - DNA, 611 bp, Homo sapiens
ctcacaggggattccagaacacgcctactgttgtctgaatgtttctccctcacatagctttccagaacactgctatgagtgtctgaatgtttgtctctcacacaaaattccagracactcttacgagggtctgaatgattgtccctgacttgggattccacaataatgctgttgcggtctgaatgcttgtccctcacataggattcccgaacacagctgctgaggtctacatgtgtgtctgtcatagaggattccagaacactgcttctgggttcagagtgtttctgcctcacacagaattccagaaaactgcgacgaggttctgaatgtttgtccctcacatgggattccagaataactctactaaggtctgaatgtttgtgcctctcataggattccacaacactgctgctggtttctaaatgtttgtccattacctaggattgcagaacactctcgctgttgtatgaatgtttgtctctcacataggattccagaacattggtgctgagttctgaatgtttgtctctcacataagattccagaacattggtgctgagttctgaatgtttgtctctcacataagattccagaccactgctgtgattttc

SEQ ID NO: 599349 - DNA, 582 bp, Homo sapiens
agatttgaacttcaaccctgggctgaactcagtggcaggactctccattcccaacaagggacaaatggagaaataaatggtgagagggaggagcttgattctgcccatgctaattggacacctrttgtgtgctaggaagacacacagaggtcaatccaaattccagctccagccacagcaggacagccatggtgtagaaggcctagcccagaggagggagccttagcaagcggaacacccctccatggagtattgacattctgttacttcagttatactgaaaactagtagaaggtaagagatgttgtactcaaccattatgagcaagaaaatccattcaatcttctttaatttggttaaaattagcctttattaaaatgcagcacagagtaatgcttgcctgtgagaatttaaaaacatcatagcaaaccactccgttctcagtttaagagggaaggcgaaaggcttgtgtgggagaataagaaaaaaacatatttatgtaatactttgagtttctattgctcctaaccaccattgctacataattattccaaaatatagctcttctttatccatcctact

SEQ ID NO: 599350 - DNA, 582 bp, Homo sapiens
agatttgaacttcaaccctgggctgaactcagtggcaggactctccattcccaacaagggacaaatggagaaataaatggtgagagggaggagcttgattctgcccatgctaattggacacctgttgtgtgctaggaagacacacagaggtcaatccaaattccagctccagccacagcaggacagccatggtgtagaaggcctagcccagaggagggagccttagcaagmggaacacccctccatggagtattgacattctgttacttcagttatactgaaaactagtagaaggtaagagatgttgtactcaaccattatgagcaagaaaatccattcaatcttctttaatttggttaaaattagcctttattaaaatgcagcacagagtaatgcttgcctgtgagaatttaaaaacatcatagcaaaccactccgttctcagtttaagagggaaggcgaaaggcttgtgtgggagaataagaaaaaaacatatttatgtaatactttgagtttctattgctcctaaccaccattgctacataattattccaaaatatagctcttctttatccatcctact

SEQ ID NO: 599351 - DNA, 582 bp, Homo sapiens
agatttgaacttcaaccctgggctgaactcagtggcaggactctccattcccaacaagggacaaatggagaaataaatggtgagagggaggagcttgattctgcccatgctaattggacacctgttgtgtgctaggaagacacacagaggtcaatccaaattccagctccagccacagcaggacagccatggtgtagaaggcctagcccagaggagggagccttagcaagcggaacacccctccatggagtattgacattctgttacttcagttatactgaaaactagtagaaggtaagagatgttgtactcaaccattatgagcaagaaaatccattcaatcttctttaatttggttaaaattagcctttattaaaaygcagcacagagtaatgcttgcctgtgagaatttaaaaacatcatagcaaaccactccgttctcagtttaagagggaaggcgaaaggcttgtgtgggagaataagaaaaaaacatatttatgtaatactttgagtttctattgctcctaaccaccattgctacataattattccaaaatatagctcttctttatccatcctact

SEQ ID NO: 599352 - DNA, 550 bp, Homo sapiens
ctgcactggccctgttcagaggcctgagcacgcatggacacctaagtctgcccaaactttccccatcccaatattctctgtggtattgagcatgacaccctgtcttcactgagcatgtgctcatacagttttgtagccaactctttattttacaacaggaagactgagacctcccaaaaaggcaaagactggtccagatcccagaaattgggcaragcacagagtattagggagggatccagcttcctaggccttgcatgcaccccacccatcaggtttgctttggaaatgagagcccatgagtcctggaaaaccctgtgctctactttctacctgggctttctactcttcaatgttgtcacataggcgtgcaggcatgcacacacaaacacatcacacacacacacacacacaggcttctaaattggagatctaaagtggagattctaaagtgaggttagggaagaggaaaccaaagaagtgacaaaaggggaagaaacagtagatgcagctttccatgaggcagaggcatccactcccccagctacat

SEQ ID NO: 599353 - DNA, 627 bp, Homo sapiens
attgagcatgacaccctgtcttcactgagcatgtgctcatacagttttgtagccaactctttattttacaacaggaagactgagacctcccaaaaaggcaaagactggtccagatcccagaaattgggcaaagcacagagtattagggagggatccagcttcctaggccttgcatgcaccccacccatcaggtttgctttggaaatgagagcccatgagtcctggaaaaccctgtgctctactttctacctgggctttctactcttcaatgttgtcacataggcgtgcaggcatgcacacacaaacacatcacacacacacacacacacaggcttctaaaktggagatctaaagtggagattctaaagtgaggttagggaagaggaaaccaaagaagtgacaaaaggggaagaaacagtagatgcagctttccatgaggcagaggcatccactcccccagctacatgaccaggagctgacagcatgcgatgaaggatcctccaggttccctgggttcttccaagcctggggactttcccagctgtttcaagaggacaggactggggttgtgactcccacttctgtgggcacctggaactaaaatgagctatgccctccacccaccac

SEQ ID NO: 599354 - DNA, 548 bp, Homo sapiens
gacaactgcgcaggtgtggaaagtgtgtcagggaaaagccactctttgtgaaaagactcagaggcacaagtcagtttagcagaggaggttataaagggacaagtgtggctgtaggcagcctgagaaagaaaggaaaagaggggagggtgtatcctggggcctgmaagaggagattagtcatttgccgctctctgacaacattgccctgaattttagcacattttgacaacaaatactatctcacaatttttgtgaatcagaatctcgatatagcttagttgggtgcctctgcctcaaggtcccctatgaggctggggctgtgatttcaactgaagctggattcggggagagatcagcctccaatctgcctcatggaaattggcaggattcagtgtgaactgagaacaccagtttcttcctgttgattggcctgggcagttcctcagttctctatcatgtgggtctgtgcctagagcatcttaggacactggagatcgcttcctcatcttgaagaatacaatagagagatggaaaatgaaagagataga

SEQ ID NO: 599355 - DNA, 548 bp, Homo sapiens
gacaactgcgcaggtgtggaaagtgtgtcagggaaaagccactctttgtgaaaagactcagaggcacaagtcagtttagcagaggaggttataaagggacaagtgtggctgtaggcagcctgagaaagaaaggaaaagaggggagggtgtatcctggggcctgaaagaggagattagtcatttgccgctctctgacaacattgccctgaattttagcacattttgacaacaaatactatctcacaatttttgtgaatcagaatctcgatatagcttagttgggtgcctctgcctcaaggtcccctatgaggctggggctgtgatttcaactgaagctggattyggggagagatcagcctccaatctgcctcatggaaattggcaggattcagtgtgaactgagaacaccagtttcttcctgttgattggcctgggcagttcctcagttctctatcatgtgggtctgtgcctagagcatcttaggacactggagatcgcttcctcatcttgaagaatacaatagagagatggaaaatgaaagagataga

SEQ ID NO: 599356 - DNA, 548 bp, Homo sapiens
gacaactgcgcaggtgtggaaagtgtgtcagggaaaagccactctttgtgaaaagactcagaggcacaagtcagtttagcagaggaggttataaagggacaagtgtggctgtaggcagcctgagaaagaaaggaaaagaggggagggtgtatcctggggcctgaaagaggagattagtcatttgccgctctctgacaacattgccctgaattttagcacattttgacaacaaatactatctcacaatttttgtgaatcagaatctcgatatagcttagttgggtgcctctgcctcaaggtcccctatgaggctggggctgtgatttcaactgaagctggattcggggagagatcagcctccaatctgccwcatggaaattggcaggattcagtgtgaactgagaacaccagtttcttcctgttgattggcctgggcagttcctcagttctctatcatgtgggtctgtgcctagagcatcttaggacactggagatcgcttcctcatcttgaagaatacaatagagagatggaaaatgaaagagataga

SEQ ID NO: 599357 - DNA, 606 bp, Homo sapiens
gacagacatatgcacagaaaaagagaaagggagacagagagattgagagacgaaacacaggacagagcaagtgggaggaaaataatagctgttttagaaatataactttggaagttgcagtagactatgtgattccccaccatattcacattccagaacattaatccccagtttaatggccttagcaggtcagaggtaattaagtcctaagcatgaggccctcgtgatagagattactggctttgtaaaagaaaccgcagaaggctgtctgtccttctctctgctaaatgasaatacaacctgaagtctggagttcgaaactcagaagagagtccttaccagaccacaaccatgttggaagccaatctcaaatttctagcctccagaactaaagtcttttgtttataagttgcctagtctatgttttttggtatagaagcctgaactaagtcagaagtgataacctatcacatttgttgtattctctttgacagaaactagaaccaggttcccaaagagttcaaccaacgactagcagaaattcttcagtttgcagaatgacagataagaaaagatagaacttgttgaaagaatgaaatttattcc

SEQ ID NO: 599358 - DNA, 566 bp, Homo sapiens
tggcctgggcagttcctcagttctctatcatgtgggtctgtgcctagagcatcttaggacactggagatcgcttcctcatcttgaagaatacaatagagagatggaaaatgaaagagatagacagacatatgcacagaaaaagagaaagggagacagagagattgagagacgaaacacaggacagagcaagtgggaggaaaataatagctgttttagaaatataactttggaagttgcagtagactatgtgattccccaccatattcacattccagaacattaatccccagtttaatggccttagcaggtcagaggtaattaagtcctaagcatgaggccctcgtgatagagattactggctttgtaaaagaaaccgcagaaggctgtctgtccttctctctgctaaatgacaatacaacctgaagtctggagttcgaaactcagaagagagtccttaccagaccacaaccatgytggaagccaatctcaaatttctagcctccagaactaaagtcttttgtttataagttgcctagtctatgttttttggtatagaagcctgaac

SEQ ID NO: 599359 - DNA, 647 bp, Homo sapiens
aagtcagaagtgataacctatcacatttgttgtattctctttgacagaaactagaaccaggtycccaaagagttcaaccaacgactagcagaaattcttcagtttgcagaatgacagataagaaaagatagaacttgttgaaagaatgaaatttattccacttatgagacttctaaaaagtggctaaaatttgttggaaccaatatggtcaactggagtctgtgtgaaataagctcactgatgtaagagcccaaatttccatcacatgttttgtactaactgtccccaaatttgcacatgacctgtgtgtagcaggaaaagatggctgttcatgcccagtgactttccatacatttttcctttcagcaattccctgctaaacaagaagccacctcttaaacctttctgagaatattactacctttaagtaagcacagggaaagaggcttcagctggaatccaatgtctttgttggaaacccggtgttatagtaccggcttctgaggcactgagcggtgagctgcgtttttaaataacagagtcactcacaacttagtgttgttgtgagactttgttgggggtgcccaccacataggctgagatgaagcatatacatgtgattccaaatataatgcacagcactggaa

SEQ ID NO: 599360 - DNA, 361 bp, Homo sapiens
ctaagtcagaagtgataacctatcacatttgttgtattctctttgacagaaactagaaccaggttcccaaagagttcaaccaacgactagcagaaattcttcagtttgcagaatgacagataagaaaagatagaacttgttgaaagaatgaaatttattccacttatgagacttctaaaaagtggctaaaattkgttggaaccaatatggtcaactggagtctgtgtgaaataagctcactgatgtaagagcccaaatttccatcacatgttttgtactaactgtccccaaatttgcacatgacctgtgtgtagcaggaaaagatggctgttcatgcccagtgactttccatacatttttc

SEQ ID NO: 599361 - DNA, 647 bp, Homo sapiens
aagtcagaagtgataacctatcacatttgttgtattctctttgacagaaactagaaccaggttcccaaagagttcaaccaacgactagcagaaattcttcagtttgcagaatgacagataagaaaagatagaacttgttgaaagaatgaaatttattccacttatgagacttctaaaaagtggctaaaatttgtyggaaccaatatggtcaactggagtctgtgtgaaataagctcactgatgtaagagcccaaatttccatcacatgttttgtactaactgtccccaaatttgcacatgacctgtgtgtagcaggaaaagatggctgttcatgcccagtgactttccatacatttttcctttcagcaattccctgctaaacaagaagccacctcttaaacctttctgagaatattactacctttaagtaagcacagggaaagaggcttcagctggaatccaatgtctttgttggaaacccggtgttatagtaccggcttctgaggcactgagcggtgagctgcgtttttaaataacagagtcactcacaacttagtgttgttgtgagactttgttgggggtgcccaccacataggctgagatgaagcatatacatgtgattccaaatataatgcacagcactggaa

SEQ ID NO: 599362 - DNA, 591 bp, Homo sapiens
atatacatgtgattccaaatataatgcacagcactggaatatttaatgccagaatacagtatctgattttcttttgatttcaacctcttctgctgtagaatggaaaaataaggccatatatataaaatatatatcttttatgtatacagatatatgaaatatatatcttttatacataaaggtgtatatgtataagtttatatattatatataatatataaatataaattatatatacatagtatatatatttttttgagacacagtctcgctmtgtcacccaggctggagtgcagaggcatgatcaaggctcaatgtaatctctgcttccttggctcaggtgattcttacacctcagcctcctgagtggctgggattacaggcaagcatcaacacatctggctaatttttgcatttttagtggagaagggtttttgccatgctggccatggctggtttcaaacccctggccttaagtgttccacccatcttggtctaccaatctgctaagattacaggcaagagcaactgcatccaactgattttgattcattctatctcatatatcgccaatgactctttctggaagtt

SEQ ID NO: 599363 - DNA, 591 bp, Homo sapiens
atatacatgtgattccaaatataatgcacagcactggaatatttaatgccagaatacagtatctgattttcttttgatttcaacctcttctgctgtagaatggaaaaataaggccatatatataaaatatatatcttttatgtatacagatatatgaaatatatatcttttatacataaaggtgtatatgtataagtttatatattatatataatatataaatataaattatatatacatagtatatatatttttttgagacacagtctcgctctgtcacccaggctggagtgcagaggcatgatcaaggctcaatgtaatctctgcttccttggctcaggtgattcttacacctcagcctcctgagtggctgggattacaggcaagcatcaacacatctggctaatttttgcatttttagtggagaarggtttttgccatgctggccatggctggtttcaaacccctggccttaagtgttccacccatcttggtctaccaatctgctaagattacaggcaagagcaactgcatccaactgattttgattcattctatctcatatatcgccaatgactctttctggaagtt

SEQ ID NO: 599364 - DNA, 591 bp, Homo sapiens
atatacatgtgattccaaatataatgcacagcactggaatatttaatgccagaatacagtatctgattttcttttgatttcaacctcttctgctgtagaatggaaaaataaggccatatatataaaatatatatcttttatgtatacagatatatgaaatatatatcttttatacataaaggtgtatatgtataagtttatatattatatataatatataaatataaattatatatacatagtatatatatttttttgagacacagtctcgctctgtcacccaggctggagtgcagaggcatgatcaaggctcaatgtaatctctgcttccttggctcaggtgattcttacacctcagcctcctgagtggctgggattacaggcaagcatcaacacatctggctaatttttgcatttttagtggagaagggtttttgccatgctggccatggctggtttcaaacccctggccttaagtgttccacccatcttggtctaccaatctgctaagattacaggcaagagcaactrcatccaactgattttgattcattctatctcatatatcgccaatgactctttctggaagtt

SEQ ID NO: 599365 - DNA, 555 bp, Homo sapiens
accactggccattcaacaagaggcaaacasaggtaacacagtgaagcccaggtcaggtccgtccatgccaggccacccgtgtcatctaatctgggcaacccgaccctgtctaccattaccatgtgttgcagggggagcaggaaaggagggggctctttctcacaggggcaggctgtaaggcattggaaccctggcgggtatgtcatgttcatacccaggtcatggctggtggaataaaaagttgagcattgtggaccaagtgtgtctactcagatgtgaatcccaaggccttaagctgtcctcgggtttcctcattggctgggggtctatgcagatactcctatgttcctgatctaggaaacagaatttctaatggagatgtcacctggtggtaaaaacaaaggagataattaatttttttcttttttcttttttttttttcctgcttcactgctgggaacactctctgtagagtttcattaaaatcattgagcagatatttgatgggttcaagtcccccatctccttggacaactggcaggttcaccacacccc

SEQ ID NO: 599366 - DNA, 555 bp, Homo sapiens
accactggccattcaacaagaggcaaacagaggtaacacagtgaagccyaggtcaggtccgtccatgccaggccacccgtgtcatctaatctgggcaacccgaccctgtctaccattaccatgtgttgcagggggagcaggaaaggagggggctctttctcacaggggcaggctgtaaggcattggaaccctggcgggtatgtcatgttcatacccaggtcatggctggtggaataaaaagttgagcattgtggaccaagtgtgtctactcagatgtgaatcccaaggccttaagctgtcctcgggtttcctcattggctgggggtctatgcagatactcctatgttcctgatctaggaaacagaatttctaatggagatgtcacctggtggtaaaaacaaaggagataattaatttttttcttttttcttttttttttttcctgcttcactgctgggaacactctctgtagagtttcattaaaatcattgagcagatatttgatgggttcaagtcccccatctccttggacaactggcaggttcaccacacccc

SEQ ID NO: 599367 - DNA, 491 bp, Homo sapiens
acttttctgaccatatacatattggctcagcccacatccttgataccactggccattcaacaagaggcaaacagaggtaacacagtgaagcccaggtcaggtccgtccatgccaggccacccgtgtcatctaatctgggcaacccgaccctgtctaccattaccatgtgttgcagggggagcaggaaaggagggggctctttctcacaggggcaggctgtaaggcattggaaccctggcggstatgtcatgttcatacccaggtcatggctggtggaataaaaagttgagcattgtggaccaagtgtgtctactcagatgtgaatcccaaggccttaagctgtcctcgggtttcctcattggctgggggtctatgcagatactcctatgttcctgatctaggaaacagaatttctaatggagatgtcacctggtggtaaaaacaaaggagataattaatttttttcttttttcttttttttttttcctgct

SEQ ID NO: 599368 - DNA, 555 bp, Homo sapiens
accactggccattcaacaagaggcaaacagaggtaacacagtgaagcccaggtcaggtccgtccatgccaggccacccgtgtcatctaatctgggcaacccgaccctgtctaccattaccatgtgttgcagggggagcaggaaaggagggggctctttctcacaggggcaggctgtaaggcattggaaccctggcgggtatgtcatgttcrtacccaggtcatggctggtggaataaaaagttgagcattgtggaccaagtgtgtctactcagatgtgaatcccaaggccttaagctgtcctcgggtttcctcattggctgggggtctatgcagatactcctatgttcctgatctaggaaacagaatttctaatggagatgtcacctggtggtaaaaacaaaggagataattaatttttttcttttttcttttttttttttcctgcttcactgctgggaacactctctgtagagtttcattaaaatcattgagcagatatttgatgggttcaagtcccccatctccttggacaactggcaggttcaccacacccc

SEQ ID NO: 599369 - DNA, 555 bp, Homo sapiens
accactggccattcaacaagaggcaaacagaggtaacacagtgaagcccaggtcaggtccgtccatgccaggccacccgtgtcatctaatctgggcaacccgaccctgtctaccattaccatgtgttgcagggggagcaggaaaggagggggctctttctcacaggggcaggctgtaaggcattggaaccctggcgggtatgtcatgttcatacccaggtcatggctggtggaataaaaagttgagcattgtggaccaagtgtgtctactcagatgtgaatcccaaggccttaagctgtcctcgggtttcctcattggctgggggtctatgcagatactcctatgttcctgatctaggaaacagaatttctaatggagatgtcacctggtggtaaaaacaaaggagataattaatttttttcttttttcttttttttttttcctgcttcactgctgggaacactctctgtagagtttcattaaaatcattgagcagatatttgatgggttcaagtmccccatctccttggacaactggcaggttcaccacacccc

SEQ ID NO: 599370 - DNA, 557 bp, Homo sapiens
cactaggctgtatttattcatgtttctacagtttgtatggttttaatttttcccccctggtatcacctgtagcaggcaggttcacggcactgccagaccttccccaagacttcaaagccaccactatcactaatactctagaaaaatagggaagagtttacatgaaaagggggttatattgttccctgcatttgtctgcaacgtgtcatctcagagaacacatccctctagcccatcagcgagaagtggtgccctcacatctctttgtaatgttctataatgggggtcacttcccagagtggtttagcctttcagtgactattatttctgatcaaaatggaataaaactataaatgaataacagaagaaaacaaaaatagcaacatatatatggaaatyaaacaactcacttttgagcatgctcatgtttaagggttgtaagacttgatattatgaagaatgctcatgatgcctaaagcgagttacagattcaatgcaatcccttttaaattagcaatgtttttgaaatagaaaaaggaaccaacaaattatatgga

SEQ ID NO: 599371 - DNA, 412 bp, Homo sapiens
caataaaacagaaggtagcacacatgtaaacctcacacatatgagcaaatagctatttgcataccaatattcattgcagcattaytcacaaaggccaataggtgaaagcaacacaaactttcctcatagaatgaataaataaatataatttgtaatacaaaagtaatggaatattactcagcttttaaaggcagaaaatcttgtaccatccacaataaagagaaatcttgagaacatgatgctaagtaaaattagtcacaataaaacagatactctatgattctacttatatgtaatatctaaagtattgaaacttagaaacagaaaatagaatgatttttatcaggagccaggttgtaaggaaaatgggtagttgtcatttcatgtgtcctgagtttcagttttgcaaaag

SEQ ID NO: 599372 - DNA, 609 bp, Homo sapiens
gtcaaaaaataaataaataagtaaagacacctgaagagagagagttacaaagtttttgaaaaattatcttcaaatcgcataagtctttctttcacactaggataatataaacaatagatgttgaaattaagacaatttccatgattactcacttagacagaatcaatkattgtccatcaaacaagaagaaaatacacaagtcataaacaaaataggggcaatatttatacaagcaaacaaacaattaaatcattatattaacaaaagaccatagggatggttcatattttttgcctcacactgtcttaagctgtacagatttgaatattgtcatagaaaattatattatataaattcaaactaaaaacaataaactgatgtaaggtgccctatcctaaaacatgaaacacagaaatgcaaaattgcaaaacaaacttaaaagaaaccttccccgaattcttacttgaataatgtaattcaaaatcataataaataggtagaaagtaaaaacacaattaactgctgtgagacagcctactctaaaaaatacagaaacataaattctaaaacataattaagagaaactttgatctataaaatcctgaataa

SEQ ID NO: 599373 - DNA, 412 bp, Homo sapiens
gaattcttacttgaataatgtaattcaaaatcataataaataggtagaaagtaaaaacacaattaactgctgtgagacagcctactctaaaaaatacagaaacataaattctaaaacataattaagagaaactttgatctataaaatcctgaataaacatagtgtccaactgaaaaagaatcctaggtaactacaattttcaactcttcctttgaatycataaaaagtataaattttgaattatttggatacaattagggcaacaacatttcaaagaaaccatattataattattaaaaagagatgtgatgagaaagttttaaggaataaaaatttaagtaatactagagaaagttttaaattatgctactgatgcattgcttctttccttacacaaaagggtaaggctata

SEQ ID NO: 599374 - DNA, 534 bp, Homo sapiens
taatgtaattcaaaatcataataaataggtagaaagtaaaaacacaattaactgctgtgagacagcctactctaaaaaatacagaaacataaattctaaaacataattaagagaaactttgatctataaaatcctgaataaacatagtgtccaactgaaaaagaatcctaggtaactacaattttcaactcttcctttgaattcataaaaagtataaattttgaattatttggatacaattagggcaacaacatttcaaagaaaccatattataattattaaaaagagatgtgatgagaaagttttaaggaataaaaatttaagtaatactagagaaagttttaaattatgctactgatgcattgcttctttccttacacaaaagggtaaggctrtaatctagcctttaatagaaaggtcttacatttttacatatggtaacaatataaatattgtaaatacagtataaaacattgacagataaaataaaaactggaaataaattgtactattagtcaaataaaagttgggaaa

SEQ ID NO: 599375 - DNA, 594 bp, Homo sapiens
gccaaatattttaataattaattatataattgatacataacatatacatttgagcatgctgttttacaacttctcaaactgaaattacagaaaaatgtgacacatgataattcagaaagtgaaaacacagtcatagtaatcttcatattaaagaaaacagaatcataaaataataagtgagaaataaggtaataattgtgaattcaatatatgttgaacaatattctaatttcccttacggaaaaagtttttgtaagaaatctgtaaaatgagtacttacaataaaccatcctacagtagaggytgttggcatacagtgtttaaatttctatgattaggtcctactaaggaaaagaaaattttaaaataaaataattagattttcctatttaataagataatttttgcctataaagtttttcagtctaatttttttgtagaattaggttttagccttcataaaacttgacattatgaagcagaaaacaggtgtcatctgtctctgttgttcctggaatttctaacccaaatgccaattcctccacaactcccctcacacacttctgaattgaagcacaacagatttattaaaaa

SEQ ID NO: 599376 - DNA, 499 bp, Homo sapiens
tgaattcaatatatgttgaacaatattctaatttcccttacggaaaaagtttttgtaagaaatctgtaaaatgagtacttacaataaaccatcctacagtagaggttgttggcatacagtgtttaaatttctatgattaggtcctactaaggaaaagaaaattttaaaataaaataattagattttcctatttaataagataatttttgcctataaagtttttcagtctaatttttttgtagaattaggttttagccttcataaaacttgacattatgaagcagaaaacaggtgtcatctgtctctgttgttcctggaatttctaacccaaatgccaattcctccacaactcccctcacacacttctgaattgaagcacaacagatttattaaaaatggcataacagyggtctccagaaatgtgcagagattttcccagatccctaaaaggaatgacaaactattcagatcatttaggttctcacaagattctgggagg

SEQ ID NO: 599377 - DNA, 530 bp, Homo sapiens
  misc_feature 102: n = A,T,C or G
ggcgcgctgttttctccttttttttctgctacagctgcctcaccacccctccctcacaccttaacgttccctcaggccctctcccgctttgtggtacccctnaccgcgagagggccctgagttggaaccggcgatccatggtaaccggagcccaacccagggactgatgggaaggcacttttgtccgtgggggacaggcccaggttctcggatatatttttttttatttcctgccacgggtgcctcacctcccytccctcaaagcttacctttccctcaatggcttttgtccgctttggtgtacccctagccggcccgagacgctgcgtgggttctaagcagggacgccagggtcccgtcggtccagcacaggggctgatgggaaggaactttcgtccgtgggggaccaggaacgcttctcggtggcgcgtttttttttttttttttttttttgtgcccaggtgactcacctcctctccctcacaccttaccttccccggcagcttctgcccactttgaggtatccctag

SEQ ID NO: 599378 - DNA, 612 bp, Homo sapiens
cagtctattttgttgatcttttcaaaaaaaaactcctatattcattgatttttgaattttttgtaacattcaatttttcaaaaattctgttcagaattgttttttggcttmatagttatttttaggagaatgtttcatgagcttttgagaagattgtgagttttgtttttgtgtagagtgttctgtatgcatctgttatatctaattgctttacagtattttcatgtcgtctgtttactttttaatattctatctggcttttttattaattacagaactggtgtattaaaatattatacttttaatatattgccgtttttgcttatgttctgtcaagatattattgatatatttaaaaatactcatgtaaggtgcatacatatttgtgtgtatacataattagatatatacacacaattatataaatgtgtataattgtcataggtttccagtgaataaacccttttattattttgtcctttgtttttctgacaatttgatttcataatatattttataaactaagacagttatttaaaaagcattttgcatactataattgtgacattgtcctcatttggttatgatttgcataattttttggatgcatct

SEQ ID NO: 599379 - DNA, 562 bp, Homo sapiens
ttgaatctggactcaaacaatggtcaccaagtcctggaacaggttgtgtgagccccttgaggctttcatccagcgctgtttcggataaatctctatttcaatttattcctatatgttagttactgaaaaacaacagacaatcacaaaaaacaagttgacctttttcttttccttgagcccagaaatgaagggccctcctgactggacgtcatgccagataactcattacaaaaagagctagggttccagactgtgccaaaacttcatgagatctcttctcatctgttcacggacaagtggccaactctggagcccagtctgttgcttcgcagtctggtggtgaatcctccatagtctgatgagtgtaaatatatatatctcttttcccttctctccgtcccattgcaacttgcttattatatcatttgcttattatatctgcattgccatttatgtgggatacagtttgtttacccttaaaggtattgtgtgtgtgtgtgtgtgtgtgtgtgtgtgtgtgtgtgtgygtttccttctctccttgagcatttcctgtgcagaa

SEQ ID NO: 599380 - DNA, 397 bp, Homo sapiens
catccagcagagcaccacgaggcgcggttcagggtgactttcatgatctgggggcgaattcctcacaaattctgtccaatcgctgtctcttgacttagcgcttatccacaagggccattctttagggaamtttgcaactctcagatcaaaaggcaaagcagctcctctaagaacttaggggaactcgcaggagtctgcctgcatgacgccactatgaacccaatataaatttgttcacaaactctctcgttcacccgactgggttgtccgtctttttcagggaatccagcttctttggttcaaaaccttgtgaagtgatgaaacccgtttgcttgcactccgccacaagtcgcgcagccaccaacgaatctcaccacgaccccaggccgaagccgcc

SEQ ID NO: 599381 - DNA, 633 bp, Homo sapiens
ttttagacccagaagctgtcagaggctagcaaagcttatactctttgagaagcagctgttgacctgctactgggctttacaggaaacagaacacctttgtcttaatcatgatgtttttatgaggccccaaattcctaatatgacttgggtcatgagctccctcaaacctcattggatagggtacactcaagaaagtaaatggaaatggcacatacaagaccaggctaagccggaaccaaaacaggtatcatttttaaatgaggatgtgcaaaacttgccagctcagcaaaccactgagcaagtcctgcagatagggaaggaaacctcccctgcccaatggggcaaatcctttaaagaaccaagcccagacgatcagagacatgcttggtttgctgatgattccaccaaatatattgatgggacccgatgctgggaggccgtgkcttataatcctgttaaaaacataagcatttctgaggaagggaggggtgttagcagccagctggctgaactagaatctgttctctgaactattcaggaggaggccagagggatttgttacttgtatacctactcttgcttagcagaaaatggtcttactacctagttgcccgaatggcaatgaaacaaatg

SEQ ID NO: 599382 - DNA, 624 bp, Homo sapiens
ttggccagagatctgtcaatatctcccctgatggcagggaccaggtaggagagtcacatacctaaggctgggccagggatatgtaacaatcttttatgaggtcggaggctaggaagggagtcccatcacttstgtgctcacccaggatatgttacaatcccctcctgaaatcagagtacaagcagcagagtcaaatcacctgaatattgagctcagtgatatgtcaccacactccctgtgggtaaagccatggcaggagagacacatcacctgattactgattactaggcccagtgatatgtcagaatctttcctgtgggcaaggtgcaggcagaaaggagagtcacatcatctggtgatggaggcagaaatatgctacaaggcagaaatatgctctgcctccctgtgggcagagttcaggcaggagcccccaatctcctaggtgttaagttcagtgatatgttacaatgctccctgtgggcagcacaagtcgagagaatagagccacatcacctacgttctaggtccaatgatatgtcccaattttatttgtgagatgggcttaaacaggagagtctactcactcaggtgctggacaaatgtgtatgtttgtcacaatgacac

SEQ ID NO: 599383 - DNA, 624 bp, Homo sapiens
ttggccagagatctgtcaatatctcccctgatggcagggaccaggtaggagagtcacatacctaaggctgggccagggatatgtaacaatcttttatgaggtcggaggctaggaagggagtcccatcacttctgtgctcacccrggatatgttacaatcccctcctgaaatcagagtacaagcagcagagtcaaatcacctgaatattgagctcagtgatatgtcaccacactccctgtgggtaaagccatggcaggagagacacatcacctgattactgattactaggcccagtgatatgtcagaatctttcctgtgggcaaggtgcaggcagaaaggagagtcacatcatctggtgatggaggcagaaatatgctacaaggcagaaatatgctctgcctccctgtgggcagagttcaggcaggagcccccaatctcctaggtgttaagttcagtgatatgttacaatgctccctgtgggcagcacaagtcgagagaatagagccacatcacctacgttctaggtccaatgatatgtcccaattttatttgtgagatgggcttaaacaggagagtctactcactcaggtgctggacaaatgtgtatgtttgtcacaatgacac

SEQ ID NO: 599384 - DNA, 573 bp, Homo sapiens
aattttgacagatggctgggctcaggcaggagcctttcatcctgcaggtgttgagacaaaggatatgatacaacacctaaaatatgctgggtgcaggcaaaagaggagactcatattagctggttgctaggtccagttatatgtcaccacctccctttttggcagggctaaggaaaaagaggagagtcagagctaaagaaatgtcataatgtccctgcgggtaggacctatrcatgagagttgcaacacctagtcattgaacccagccatatattataatacacaatgtatacaaggcccaggcaagaaaggagagaatatcacataggtactgtgtccagcaatatgtcaccataccccccagaggggaggctccaggcaacaggataacattacctaagtgaagtgcccagagagatgtttcaatgaccctggtgggtaggattttgaaaaaagagaagttacagaacctaggggctaggcctagctatgtgtcacattcatctccaagacggagcccagatatgagagaaaagtcacatgatgtaggtactgggcaaagtaatatgtcac

SEQ ID NO: 599385 - DNA, 557 bp, Homo sapiens
tcacatctccgggtgcgaggtctagcgatatgtcaaaatgctcactgtgggcagtgccaaggaaggagaatagagttacaccctcaatgtgctggatccagcaatatgttaatatcccatctgtgggctgggtccatgtgagaccatcaagtcactcaggtgctaggcacctgcaaatttcaccatgaaagctgcagaatggtccaggaattagattaacaatcccacaactgtctcagttgtaggcatgacattcaacamctcctgtatgttgggtctaagctcacgaataaccctctcaacaccagactggatttgtgcatgagagtctcaattcctctgcagactgacctgtgttcccgtgagaggatgacaatagttactgttggctgggtgtgcatatgagtgtcacaatctcacctgtgtgctcggcccagttagcacgctctgtgtactacccaatggccctatacactatgcatgagagtcgcaatcaactttgacaccttcctaatggtagggaccatgatcgtacttgtagcattaagcccggtatg

SEQ ID NO: 599386 - DNA, 557 bp, Homo sapiens
tcacatctccgggtgcgaggtctagcgatatgtcaaaatgctcactgtgggcagtgccaaggaaggagaatagagttacaccctcaatgtgctggatccagcaatatgttaatatcccatctgtgggctgggtccatgtgagaccatcaagtcactcaggtgctaggcacctgcaaatttcaccatgaaagctgcagaatggtccaggaattagattaacaatcccacaactgtctcagttgtaggcatgacattcaacaactcctgtatgttgggtctaagctcacgaataaccctctcaacaccagactggatttgtgcatgagagtctcaattcctctgcagactgacctgtgttcccgtgagaggatgacaatagttactgttggctgggtgtgcatatgagtgtcacaatctcacctgtgtgctcggcccagttagcacgctctgtgtactacccaatggccctatacwctatgcatgagagtcgcaatcaactttgacaccttcctaatggtagggaccatgatcgtacttgtagcattaagcccggtatg

SEQ ID NO: 599387 - DNA, 482 bp, Homo sapiens
gacctgtgttcccgtgagaggatgacaatagttactgttggctgggtgtgcatatgagtgtcacaatctcacctgtgtgctcggcccagttagcacgctctgtgtactacccaatggccctatacactatgcatgagagtcgyaatcaactttgacaccttcctaatggtagggaccatgatcgtacttgtagcattaagcccggtatgagagtcaacatcattacaattaactaggtcaggataggagagtcctcccttgcctatgagctgagtttagatgtgggccaccatttcaactctggttgaatgtttatatatgaacacgggcctaacaccgaggtgatgtgagtctttggcctagacctttcaagcacgaggcaaagtgacatatctctgggtctatcaactatttcatgtgaccttccttttttacctgagctttccccataaaagagatatgacatatgtctagacaaagca

SEQ ID NO: 599388 - DNA, 645 bp, Homo sapiens
tcacaatctcacctgtgtgctcggcccagttagcacgctctgtgtactacccaatggccctatacactatgcatgagagtcgcaatcaactttgacaccttcctaatggtagggaccatgatcgtacttgtagcattaagcccggtatgagagtcaacatcattacaattaactaggtcaggataggagagtcctcccttgcctatgagctgagtttagatgtgggccaccatttcaactctggttgaatgtttatatatgaacacgggcctaacaccgaggtgatgtgagtctttggcctagacctttcaagcacgaggcaaagtgacatatctctgggtctatcaactatttcatgtgaccttccttttttacctgagctttccccataaaagagatrtgacatatgtctagacaaagcacctgggtgatgtgactctcctttattgactgagccctgtgtattttgggtattctgacgtatccctggacctaacttctggaagataagaagatccaacatgggccctgcctaaaaagtttcttgtgacaaatttctacatgaatcaccttggagatttgactcttctctcttacccgagttttgcccataagagagattgttacgtacctctgcagcaagca

SEQ ID NO: 599389 - DNA, 598 bp, Homo sapiens
tcccttgcctatgagctgagtttagatgtgggccaccatttcaactctggttgaatgtttatatatgaacacgggcctaacaccgaggtgatgtgagtctttggcctagacctttcaagcacgaggcaaagtgacatatctctgggtctatcaactatttcatgtgaccttccttttttacctgagctttccccataaaagagatatgacatatgtctagacaaagcacctgggtgatgtgactctcctttattgactgagccctgtgtattttgggtattctgacgtatccctggacctaacttctggaagataagaagatccaacatgggccctgcctaaaaagtttcttgtgacaaatttctacatgaatcaccttggagatttgactctyctctcttacccgagttttgcccataagagagattgttacgtacctctgcagcaagcacctaaatgctgtggctcttctttcttgcccgggtcatgcccacagatgaaagagtggcttatcgctgtgtccagcacaccggttatgtgattatgctgcctgatctctgctcacaggagccattgtgacatatccctggggccagaa

SEQ ID NO: 599390 - DNA, 242 bp, Homo sapiens
tgaaatcaaaatgcacatgctttctagaacagaaagtccttaatgaggataactttgcttgaataagcccaattacaatkcgaatgctacggcttattgtgttggctgtacagtcaccatggtttctgtatcctgagatcatggtcattttctgtactatctattctgcctcaatttccccataagagattttagggcaataatcatattggaggttgaggggttaggccattatttctgga

SEQ ID NO: 599391 - DNA, 535 bp, Homo sapiens
acaagcactctgatggtcctctctccatttgggactttctgtaaggggatcaaattctctggccctgcatggggtgaagttccaccgcgagtaactacagctgggctggtcactattatacctggcaaaggctgatagagaggagcataaggaggaggtgaaacaagcttasattctacagaagactctgatagtgtggggatgctgcggattctacaggaggtgtaggctcctgagggtccctatctggagctggtgttgggctgttgggtctggggtcccttccccttaataagagatgatcttctaatgcttctgaggggctttgtggcttactaggctttagcccacaggtgctgcatagagctgggttttgttgtcaggccataaaggtttgcacataggatatttcagaccattttccctgatttctacagaaaagatctagctgtaggagggtgttaaagttcacagtctcattccccagccatgttttgtgagctaatctgtatgcaagctaaatagtattacaaaa

SEQ ID NO: 599392 - DNA, 535 bp, Homo sapiens
acaagcactctgatggtcctctctccatttgggactttctgtaaggggatcaaattctctggccctgcatggggtgaagttccaccgcgagtaactacagctgggctggtcactattatacctggcaaaggctgatagagaggagcataaggaggaggtgaaacaagcttacattctacagaagactctgatagtgtggggatgctgcggattctacaggaggtgtaggcycctgagggtccctatctggagctggtgttgggctgttgggtctggggtcccttccccttaataagagatgatcttctaatgcttctgaggggctttgtggcttactaggctttagcccacaggtgctgcatagagctgggttttgttgtcaggccataaaggtttgcacataggatatttcagaccattttccctgatttctacagaaaagatctagctgtaggagggtgttaaagttcacagtctcattccccagccatgttttgtgagctaatctgtatgcaagctaaatagtattacaaaa

SEQ ID NO: 599393 - DNA, 535 bp, Homo sapiens
acaagcactctgatggtcctctctccatttgggactttctgtaaggggatcaaattctctggccctgcatggggtgaagttccaccgcgagtaactacagctgggctggtcactattatacctggcaaaggctgatagagaggagcataaggaggaggtgaaacaagcttacattctacagaagactctgatagtgtggggatgctgcggattctacaggaggtgtaggctcctgagggtccctatctggagctggtgttggsctgttgggtctggggtcccttccccttaataagagatgatcttctaatgcttctgaggggctttgtggcttactaggctttagcccacaggtgctgcatagagctgggttttgttgtcaggccataaaggtttgcacataggatatttcagaccattttccctgatttctacagaaaagatctagctgtaggagggtgttaaagttcacagtctcattccccagccatgttttgtgagctaatctgtatgcaagctaaatagtattacaaaa

SEQ ID NO: 599394 - DNA, 620 bp, Homo sapiens
aatagacggtacagtctgagaaagagattccagggcagcctgctcataagagtgagacagcattaattgttgctggagaaaccctccttctgggagttttacatgattattcataagaaggtggaaagaagtgttatagaaggcatgctttgagtggtcttctgggtgcacatgtgcagtagctgtacatatttttgcatatgtttcatgtctcattagcatgcaatgacatttcacccaggaatgtgtttttacttgttmaaatgagcaaaggttcagcttgaagacagataaaatcaaaatgcacatgctctctagacgtaaaagtccctactgaagatagtgggtttcaaacgaccccaagtgctccacaacttaaaagtcgctcccacgaacctggaacactatctgttcctgagggatcaggtcccatttgtgtctctgagacactggcaagtgaggcacgacttgggatgagaccgatgattttaattgtaaaatgcctaaatagtcagcagcttcagtttacattttggagcttgtccacttaaatgggttgatgataatggctcacaaaactcacgccttggaaagcgggttttctcccttgctcttagatt

SEQ ID NO: 599395 - DNA, 652 bp, Homo sapiens
actatctgttcctgagggatcaggtcccatttgtgtctctgagacactggcaagtgaggcacgacttgggatgagaccgatgattttaattgtaaaatgcctaaatagtcagcagcttcagkttacattttggagcttgtccacttaaatgggttgatgataatggctcacaaaactcacgccttggaaagcgggttttctcccttgctcttagattttctgcaacccattaaactaacttcctgatgcctcgactttcacattcgtgaaaaaggcgccattgagagtgacgtttccaggaaggctcagcccttgtcagcccctgcagagctctgaagctgttcacaagcaggccatgtggaagatttctctcaaaagccattgagcacgcgctctggctagagaaaaaagagggctgctgcacaatggacagtgtctcagacatcaggacagtttccacagtagtttaggaaagaaggcagtgccctgagctgcagaaggtgcaatgctctggaaggaaccctgggtgcagctgaaagaggaacctgagaagcatagggccaatcgggtgaggataacccgcctgatttgggcaaaggtaaggtgcctacatagggtaataccctcctcaatgctcagcccagacctgtcc

SEQ ID NO: 599396 - DNA, 604 bp, Homo sapiens
tcattagcatgcaatgacatttcacccaggaatgtgtttttacttgttcaaatgagcaaaggttcagcttgaagacagataaaatcaaaatgcacatgctctctagacgtaaaagtccctactgaagatagtgggtttcaaacgaccccaagtgctccacaacttaaaagtcgctcccacgaacctggaacactatctgttcctgagggatcaggtcccatttgtgtctctgagacactggcaagtgaggcacgacttgggatgagaccgatgattttaattgtaaaatgcctaaatagtcagcagcttcagtttacattttggagcttgtccacttaaatgggttgatgawaatggctcacaaaactcacgccttggaaagcgggttttctcccttgctcttagattttctgcaacccattaaactaacttcctgatgcctcgactttcacattcgtgaaaaaggcgccattgagagtgacgtttccaggaaggctcagcccttgtcagcccctgcagagctctgaagctgttcacaagcaggccatgtggaagatttctctcaaaagccattgagcacgcgctctggctagagaaaaaagag

SEQ ID NO: 599397 - DNA, 576 bp, Homo sapiens
gatgcctcgactttcacattcgtgaaaaaggcgccattgagagtgacgtttccaggaaggctcagcccttgtcagcccctgcagagctctgaagctgttcacaagcaggccatgtggaagatttctctcaaaagccattgagcacgcgctctggctagagaaaaaagagggctgctgcacaatggacagtgtctcagacatcaggacagtttccacagtagtttaggaaaraaggcagtgccctgagctgcagaaggtgcaatgctctggaaggaaccctgggtgcagctgaaagaggaacctgagaagcatagggccaatcgggtgaggataacccgcctgatttgggcaaaggtaaggtgcctacatagggtaataccctcctcaatgctcagcccagacctgtcctccaggtccacctctgtactcactctctgtggcaaagagtcggcatagcataagaactcagcaatgctttggacactgggaagtccacaccgctctgtccctccctccaggtctatgcaccccggatcccggtatatgctgagattatggttctgaagcccaccgaca

SEQ ID NO: 599398 - DNA, 580 bp, Homo sapiens
cacacagccccacatcttttcccagtgacgcatgctgtttttgatcctgatgcattctgggattggagtcctgcagtcccgtgacaaaaggtctcagagtctttatgaaactacatttcctagcaagtgcagcgaggtgcacacaaccttcccctcattctccagtgatgtagactgtccgtgagccccaagcatrctgggattgtagtcttatagcaccgtgaccaaaggacagggagaggccatgagactacaactctcaggaaacccagcaaggcgcacactgcccggcctctttctccttagactagcgcactgtcactgagctgggtgcatattaggaatgtattcttgcagccctgtgagcaaagagctgggagtgtttatgagaatacatctcccagtactcccaggaggtgcacacagccctgcctcttcctgcagtgactagcgcactgtccctgagctgggtgcatgctgggattgcagtccttggcgatctatgaccaaagggctaggagtgttaatgagactacatctcccaaaaaagcagagtgagaagcgcacagccctccctctt

SEQ ID NO: 599399 - DNA, 580 bp, Homo sapiens
cacacagccccacatcttttcccagtgacgcatgctgtttttgatcctgatgcattctgggattggagtcctgcagtcccgtgacaaaaggtctcagagtctttatgaaactacatttcctagcaagtgcagcgaggtgcacacaaccttcccctcattctccagtgatgtagactgtccgtgagccccaagcatactgggattgtagtcttatagcaccgtgaccaaaggacagggagaggccatgagactacaactctcaggaaacccagcaaggcgcacactgcccggcctctttctccttagactagcgcactgtcactgagctgggtgcataytaggaatgtattcttgcagccctgtgagcaaagagctgggagtgtttatgagaatacatctcccagtactcccaggaggtgcacacagccctgcctcttcctgcagtgactagcgcactgtccctgagctgggtgcatgctgggattgcagtccttggcgatctatgaccaaagggctaggagtgttaatgagactacatctcccaaaaaagcagagtgagaagcgcacagccctccctctt

SEQ ID NO: 599400 - DNA, 580 bp, Homo sapiens
cacacagccccacatcttttcccagtgacgcatgctgtttttgatcctgatgcattctgggattggagtcctgcagtcccgtgacaaaaggtctcagagtctttatgaaactacatttcctagcaagtgcagcgaggtgcacacaaccttcccctcattctccagtgatgtagactgtccgtgagccccaagcatactgggattgtagtcttatagcaccgtgaccaaaggacagggagaggccatgagactacaactctcaggaaacccagcaaggcgcacactgcccggcctctttctccttagactagcgcactgtcactgagctgggtgcatattaggaatgtattcytgcagccctgtgagcaaagagctgggagtgtttatgagaatacatctcccagtactcccaggaggtgcacacagccctgcctcttcctgcagtgactagcgcactgtccctgagctgggtgcatgctgggattgcagtccttggcgatctatgaccaaagggctaggagtgttaatgagactacatctcccaaaaaagcagagtgagaagcgcacagccctccctctt

SEQ ID NO: 599401 - DNA, 577 bp, Homo sapiens
gtgggctagcttgaagcgagcttacagtggcgtgaaagcaggaatacagaggcaggacaaagacaggattgcacatgaccgttgccaagcaacccacatgtccattatctaggtttccctgggcatgggcttatcctataaccctcactatggttcccaaacagctgtagttcagcctactcaggcttctcatgactttcattgtacttcttcgataaaacacaatacttgaagtcactagttacagagaacaagaatctataaactcattccataaaacaaagggaatttgtttttcttttccctgtgttgggagagtgttgggagaacctccagagcacattacataatattatcaagaattttcctgggtctgggctgtgcctattgctgcctctgggacaaatcagcctaatacaagaaaacttatttctctttccttttaatttcatttttctttaatttccttccttagtcctgcagccctgtgaccaaaggactgggagtgcacagttacacatctgttcacttgtcatgagactgttttcctttamccccatgaacatacttaccatag

SEQ ID NO: 599402 - DNA, 564 bp, Homo sapiens
gcataacgtaccatgtgtcagaattttcttattttacataactgaataacgttccaatgtatgtataaatcacattttatctatttattcattgatgataattcaaacaacaygggtaattcacaaaccttttgggtgatgtgagtaatgctgccatgagcctaggtgtacgtgtattattttgtgtctctgctttcacatcttttgctatatacccagatgtgaaattgtgggatcatatggtgactttaggtgtacattttttagttattatactgttattttatagcagctgcagcattttacatttccaacaacagtgtacaagggttctaattgctccacgtcctcaccaacacttgtgattttctgttttgtttcttttggtagtaactatgctgatgtgtattaagtgatatatcatttggagttatatttgcattttactaatgattagttttgttgagcaccttttcatggacttattagccatttcacataatttttaaagaaatgtctgtttaagtattttgcccatattttaaacaagtagtttgttttatt

SEQ ID NO: 599403 - DNA, 618 bp, Homo sapiens
tttcttatggtataagttaagggaacagtttcactcttttacatgtaggtacccaatttccccagcactaactgttgtaaaggcagttcatttcccataaaaatcattkgaccatatatatgagggtttatttatattggctttctatattactccattagtctatttgtagcatgctattttggaattttgtagtaagttttgaaatcattaagtgtgacttctcaaactttggtatttttttttcaaaattatttttgcaatttagggtcccttgagattcctcataaacttaaaaattgattttttaatatctacacaaaataactggcattttgcttcttggttacttcctaagtattttattcttttgatgctattgtaaattgagttgttttcataattttcttctcagattattcgtattactacataaaatacagtttatttttctatgttgatttggtatgctactactctgctgaatttattaattttaatattttttgtgtggaatctttaagattttctacataaaagaatatattttctgtacacactttgatgaagtttatttcattgtcttttttgatttctctgaatgaaacttctaataca

SEQ ID NO: 599404 - DNA, 618 bp, Homo sapiens
tttcttatggtataagttaagggaacagtttcactcttttacatgtaggtacccaatttccccagcactaactgttgtaaaggcagttcatttcccataaaaatcattggaccatatatatgagggtttatttatattggctttctatattactccattagtctatttgtagcatgctattttggaattttgtagtaagttttgaaatcattaagtgtgacttctcwaactttggtatttttttttcaaaattatttttgcaatttagggtcccttgagattcctcataaacttaaaaattgattttttaatatctacacaaaataactggcattttgcttcttggttacttcctaagtattttattcttttgatgctattgtaaattgagttgttttcataattttcttctcagattattcgtattactacataaaatacagtttatttttctatgttgatttggtatgctactactctgctgaatttattaattttaatattttttgtgtggaatctttaagattttctacataaaagaatatattttctgtacacactttgatgaagtttatttcattgtcttttttgatttctctgaatgaaacttctaataca

SEQ ID NO: 599405 - DNA, 618 bp, Homo sapiens
tttcttatggtataagttaagggaacagtttcactcttttacatgtaggtacccaatttccccagcactaactgttgtaaaggcagttcatttcccataaaaatcattggaccatatatatgagggtttatttatattggctttctatattactccattagtctatttgtagcatgctattttggaattttgtagtaagttttgaaatcattaagtgtgacttctcaaactttggtatttttttttcaaaattatttttgcaatttagggtcccttgagattcctcataaacttaaaaattgattttttaatatctacacaaaataaytggcattttgcttcttggttacttcctaagtattttattcttttgatgctattgtaaattgagttgttttcataattttcttctcagattattcgtattactacataaaatacagtttatttttctatgttgatttggtatgctactactctgctgaatttattaattttaatattttttgtgtggaatctttaagattttctacataaaagaatatattttctgtacacactttgatgaagtttatttcattgtcttttttgatttctctgaatgaaacttctaataca

SEQ ID NO: 599406 - DNA, 618 bp, Homo sapiens
tttcttatggtataagttaagggaacagtttcactcttttacatgtaggtacccaatttccccagcactaactgttgtaaaggcagttcatttcccataaaaatcattggaccatatatatgagggtttatttatattggctttctatattactccattagtctatttgtagcatgctattttggaattttgtagtaagttttgaaatcattaagtgtgacttctcaaactttggtatttttttttcaaaattatttttgcaatttagggtcccttgagattcctcataaacttaaaaattgattttttaatatctacacaaaataactggcattttgcttcttggttacttcctaagtattttattcttttgatgctattgtaaattgagttgttttcataattttcttctcagattattcgtattactacataaaatacagtttatttttctatgttgatttkgtatgctactactctgctgaatttattaattttaatattttttgtgtggaatctttaagattttctacataaaagaatatattttctgtacacactttgatgaagtttatttcattgtcttttttgatttctctgaatgaaacttctaataca

SEQ ID NO: 599407 - DNA, 490 bp, Homo sapiens
ataaaatacagtttatttttctatgttgatttggtatgctactactctgctgaatttattaattttaatattttttgtgtggaatctttaagattttctacataaaagaatatattttctgtacacactttgatgaagtttatttcattgtcttttttratttctctgaatgaaacttctaatacagtgttgaataaaagtggttggcaagagcagacattctgtcttctgagcttagacgaaataattttggtcttttcctctagaacatgtagtttgctgtgggtttttatacgtgaattttacaaagatggttttcttttattcgtaatttattgtgtttttattataaaatattttgaattttgtaaaatacattttctgtattaatgagataatgttttctaaaaattttcttaatgtgtcatatgcattgattatttttcatatgctaaaacttttgttaagaaaggctagctaagtgaaccag

SEQ ID NO: 599408 - DNA, 475 bp, Homo sapiens
aaaggctagctaagtgaaccagtgagactggaaaaagaataaagaaatctatgctggttgtgatcaattagttgtaaacaccattgcactgaaaccagccatacgctaaatcttccttacattccagtaataaattccccktggtcatgggttgtaatcttgctagtatgctgctgaatgtggttagctaggatgttgctgagtagttttgcatccgtgttcataagggatattagtctatgggtttttgtagtctctttgtctggctttggtatgagctaatgctggcatcatggaataagtttggaactgctctcttcaggcttttggtagattttggaaaggatttttgttctataaatgcttgatctaaatcaccagtgaagccaacaaaacaagggcttttcttcatgagaggtttttaattactgattccatttccttagtagttttgtatctattcagattttgtatt

SEQ ID NO: 599409 - DNA, 475 bp, Homo sapiens
aaaggctagctaagtgaaccagtgagactggaaaaagaataaagaaatctatgctggttgtgatcaattagttgtaaacaccattgcactgaaaccagccatacgctaaatcttccttacattccagtaataaattccccgtggtcatgggktgtaatcttgctagtatgctgctgaatgtggttagctaggatgttgctgagtagttttgcatccgtgttcataagggatattagtctatgggtttttgtagtctctttgtctggctttggtatgagctaatgctggcatcatggaataagtttggaactgctctcttcaggcttttggtagattttggaaaggatttttgttctataaatgcttgatctaaatcaccagtgaagccaacaaaacaagggcttttcttcatgagaggtttttaattactgattccatttccttagtagttttgtatctattcagattttgtatt

SEQ ID NO: 599410 - DNA, 579 bp, Homo sapiens
ccgtgttcataagggatattagtctatgggtttttgtagtctctttgtctggctttggtatgagctaatgctggcatcatggaataagtttggaactgctctcttcaggcttttggtagattttggaaaggatttttgttctataaatgcttgatctaaatcaccagtgaagccaacaaaacaagggcttttcttcatgagaggtttttaattactgattccatttccttagtagttttgtatctattcagattttgtatttctttgtaatcaagtcttgcataagtaggaatctgcccactttatctaggttttccaatttatcatcctatcatagttcacagtacacttttttaaacattttatttctttgaattagtagtaatgtcccactttcattactcattttagtatgtgaatatgctgttaatttttcgtgtgtgtagctgaargtttgccaattgttaattttttgaagaactgagagtgaacttttggttttttggaattctgttgtttgtgtaatctctattgcatttatctctgctaaaatcttcaatactttcttctttctctttg

SEQ ID NO: 599411 - DNA, 375 bp, Homo sapiens
tattgcatttatctctgctaaaatcttcaatactttcttctttctctttgctttgcatctaatttggtcttatttttctaatttactaggtgataaagttattatttatttgaaatctttgytctttttaaatgtatcttagatgcaaacttttcatcttaacactgtttttgctgtttcccataacttttgatatgttttgttttcatttttcttcctctgtatgttcctacttcttctgtgatttcttcctttacttaatttatacaattttgtaattctttaagttgtaattgtgtagttgtttaatttgtacaattttgtaaactttctagcatttcatctgttattgatttaatttgagatctactatac

SEQ ID NO: 599412 - DNA, 375 bp, Homo sapiens
tattgcatttatctctgctaaaatcttcaatactttcttctttctctttgctttgcatctaatttggtcttatttttctaatttactaggtgataaagttattatttatttgaaatctttgttctttttaaatgtatcttagmtgcaaacttttcatcttaacactgtttttgctgtttcccataacttttgatatgttttgttttcatttttcttcctctgtatgttcctacttcttctgtgatttcttcctttacttaatttatacaattttgtaattctttaagttgtaattgtgtagttgtttaatttgtacaattttgtaaactttctagcatttcatctgttattgatttaatttgagatctactatac

SEQ ID NO: 599413 - DNA, 375 bp, Homo sapiens
tattgcatttatctctgctaaaatcttcaatactttcttctttctctttgctttgcatctaatttggtcttatttttctaatttactaggtgataaagttattatttatttgaaatctttgttctttttaaatgtatcttagatgcaaacttttcatcttaacactgtttttgctgtttcccataacttttgatatgttttgttttcatttttcttcctctgtatgttcctacttcttcygtgatttcttcctttacttaatttatacaattttgtaattctttaagttgtaattgtgtagttgtttaatttgtacaattttgtaaactttctagcatttcatctgttattgatttaatttgagatctactatac

SEQ ID NO: 599414 - DNA, 375 bp, Homo sapiens
tattgcatttatctctgctaaaatcttcaatactttcttctttctctttgctttgcatctaatttggtcttatttttctaatttactaggtgataaagttattatttatttgaaatctttgttctttttaaatgtatcttagatgcaaacttttcatcttaacactgtttttgctgtttcccataacttttgatatgttttgttttcatttttcttcctctgtatgttcctacttcttctgtgatttcttcctttacttaatttatacaattttgtaattctttaagttgtaattgtgtagttgtttaatttrtacaattttgtaaactttctagcatttcatctgttattgatttaatttgagatctactatac

SEQ ID NO: 599415 - DNA, 630 bp, Homo sapiens
gaaatcttaaatcaatagcttaatgtttgtaaaagcatttaaatggaaataagctaccagttcaccaggaacaaaggatatcagttgggtcyaagaataatcatgccaaaaagctctaggaggaaaagctcctgggaattaggactgtgataatggtctttgagatcaagaaagaaatggggaaatggggatgctcagggtcaggtacatgcttagcaaaagacccagaaaaccctaagctgtcacctgtgtactttaaactctgcacaagtagaaaatagaggcacaaggagagttgtaactttatgctgattagtaaaggcatgctccaacacacatacatagatcccaggtgaaaaaaaatcagatatttatttttagtgaaggttaaaaaatctggagtcttactttccaattaaggattagtgaaaatatttggggagatttgcattgatcagttcatcctgaggtcaagaaaatcttgtttttaaaatttggagcctccagtaaaggattagcttccacctagaggtgttctttggccttttggactcagagctatcttgacactactactggttacactgatttgaaagtcagctaagagcttgctacagaactcctgacaaa

SEQ ID NO: 599416 - DNA, 607 bp, Homo sapiens
ggaagcatgcccggtgtatttattaaaatgtagttaccagaatatttaaaattcacttgtgcctctcatattatttcttagagaattgcctcccttttgaaatctcaggctgcctgctctaaaacctggatgtgccaggaaagtaaaacatctgaaattttaaaacaattgtcattatattgattccatatatgaataacacatatatattattcattaatacaaataatcttacatacaaatgtaaatgcaaatattttacaggcagggccagtttctagttcacagaggaagccctgccagaaaaggatccaggaaaaacctataattcttgctttattcaacccagtgtcaaatcacatatgtcactcatggtctgaggcggcagggtagggaattgaactacatccaatcatgggtcttggagtggaaactatctaatcaggtgcacagctggagaagaatgggcagctttttggaagtacggaggcyttggcctgtctctccactcagagctcaggacactagagccacctcaacataatcacctgttttttagttattttaacactccaaaagggaactagttttctcatgcattttccaa

SEQ ID NO: 599417 - DNA, 573 bp, Homo sapiens
ttattttaacactccaaaagggaactagttttctcatgcattttccaaatgtgtggcaggcagagactcaaatctaactccctgttgccccagcctaactctggcttgcaatcagattttaaatttccagttctttcctgacactcaccaacactaactaaccttccataattcacaacattatcaactgttctttattgtacatttcagacacagtatttcaattcttctttttgtcaaaaagcagtggatgtcatttaaaaaaattttttctcatttgtaaacattttacaggagatgaaagcagagaataatcccctgacaccccactgtaaaaaaaataaataaaaagyggaaaacctttgtgcccctttgtttaaacttctcttggcacagacaccccatcagaaagcctttgggttcaggtttcattttggaaacttcacagggcaatacttcctcagccatcctgttattttcttggttttgaatttcaaaactgtttgaggattccccaagatgccaacagtggccatgactcttgaagtgtctagtaaatagcatcccttgtgt

SEQ ID NO: 599418 - DNA, 347 bp, Homo sapiens
agcctttgggttcaggtttcattttggaaacttcacagggcaatacwtcctcagccatcctgttattttcttggttttgaatttcaaaactgtttgaggattccccaagatgccaacagtggccatgactcttgaagtgtctagtaaatagcatcccttgtgtcatctcctctcagggaacagcccaaggtatgggaatgcagcctctctgtggagtggttgtttgagctgtgcctggaagaatctctaggtatacccttgcgctaaaagcaaacccattaggtcattaagattttcttaccccaaagcttagtttccattccttagagacacattgcaggccaggc

SEQ ID NO: 599419 - DNA, 446 bp, Homo sapiens
agaatgagtgttgtacatttcccaggactgttttttatttgtctgagaggtgatttcaagcagaayctcacggcttactgttgggaatgttaccaggtgtatagatagggatagtctctcttccactacggtggtaggaaatgaatacatacctacaagcacgtgaggtagattaattgttaaattacataaatttatcacatcagttattcatttttcaaaacagagaacttctgatagtgaatatctctgttccatatgctgtcatctgggtgtttgagggtaacgctaagttttaggagctgggacttggcaccgcctggaagtgttcacatatgattgtttactaaatgatttgttatgaacataattaaattacatgtttattttctgaaaggaatagatactttagcttttcttgttgagttataaaatgtaagcccctt

SEQ ID NO: 599420 - DNA, 446 bp, Homo sapiens
agaatgagtgttgtacatttcccaggactgttttttatttgtctgagaggtgatttcaagcagaacctcacggcttactgttgggaatgttaccaggtgtatagatagggatagtctctcttccactacggtggtaggaaatgaatacatacctacaagcacgtgaggtagattaattgttaaattacataaatttatcacatcagttattcwtttttcaaaacagagaacttctgatagtgaatatctctgttccatatgctgtcatctgggtgtttgagggtaacgctaagttttaggagctgggacttggcaccgcctggaagtgttcacatatgattgtttactaaatgatttgttatgaacataattaaattacatgtttattttctgaaaggaatagatactttagcttttcttgttgagttataaaatgtaagcccctt

SEQ ID NO: 599421 - DNA, 579 bp, Homo sapiens
tgttccttttcctagacatctctttcatttgtcagyttctgagttgtatttttataataaagtggtaaatataattagacttatttgttgagtttttttgagtaattcaatcaaattatttaacttgaaaaggggtttatgggagtctcagatttataggcagtagctcagaagtatagatgggcttctgggacatgtgactaacctctgcagtgagaggggtgatgtgggacttagccctgaatttgtgggatctgtgcgaactctaagttgtgtcagaattaaattttggggcaagaaatgggtgttggagaagcagtgggttttcagggaactttacacatttaggatcaaaagtgttgtaaggagaaagacaatgtgggggcctttgctggagagagactccaggtgtctcggggaaggtaggctctgctctgcacacaggctgctacgccatgcactgccctgtggttccaggcatcctcccatggtaagaaggaccgacgactctgagggaagaagttctgagaacagatgccttctaccctcctgccaacctgaggccaccacatgtttttc

SEQ ID NO: 599422 - DNA, 579 bp, Homo sapiens
tgttccttttcctagacatctctttcatttgtcagcttctgagttgtatttttataataaagtggtaaatataattagacttatttgttgagtttttttgagtaaytcaatcaaattatttaacttgaaaaggggtttatgggagtctcagatttataggcagtagctcagaagtatagatgggcttctgggacatgtgactaacctctgcagtgagaggggtgatgtgggacttagccctgaatttgtgggatctgtgcgaactctaagttgtgtcagaattaaattttggggcaagaaatgggtgttggagaagcagtgggttttcagggaactttacacatttaggatcaaaagtgttgtaaggagaaagacaatgtgggggcctttgctggagagagactccaggtgtctcggggaaggtaggctctgctctgcacacaggctgctacgccatgcactgccctgtggttccaggcatcctcccatggtaagaaggaccgacgactctgagggaagaagttctgagaacagatgccttctaccctcctgccaacctgaggccaccacatgtttttc

SEQ ID NO: 599423 - DNA, 502 bp, Homo sapiens
agctatttccaggattaccttcacccacaactgttccttttcctagacatctctttcatttgtcagcttctgagttgtatttttataataaagtggtaaatataattagacttatttgttgagtttttttgagtaattcwatcaaattatttaacttgaaaaggggtttatgggagtctcagatttataggcagtagctcagaagtatagatgggcttctgggacatgtgactaacctctgcagtgagaggggtgatgtgggacttagccctgaatttgtgggatctgtgcgaactctaagttgtgtcagaattaaattttggggcaagaaatgggtgttggagaagcagtgggttttcagggaactttacacatttaggatcaaaagtgttgtaaggagaaagacaatgtgggggcctttgctggagagagactccaggtgtctcggggaaggtaggctctgctctgcacacaggctgctacgccatgcactgccctgtgg

SEQ ID NO: 599424 - DNA, 579 bp, Homo sapiens
tgttccttttcctagacatctctttcatttgtcagcttctgagttgtatttttataataaagtggtaaatataattagacttatttgttgagtttttttgagtaattcaatcaaattatttaacttgaaaaggggtttatgggagtctcagatttataggcagtagctcagaagtatagatgggcttmtgggacatgtgactaacctctgcagtgagaggggtgatgtgggacttagccctgaatttgtgggatctgtgcgaactctaagttgtgtcagaattaaattttggggcaagaaatgggtgttggagaagcagtgggttttcagggaactttacacatttaggatcaaaagtgttgtaaggagaaagacaatgtgggggcctttgctggagagagactccaggtgtctcggggaaggtaggctctgctctgcacacaggctgctacgccatgcactgccctgtggttccaggcatcctcccatggtaagaaggaccgacgactctgagggaagaagttctgagaacagatgccttctaccctcctgccaacctgaggccaccacatgtttttc

SEQ ID NO: 599425 - DNA, 513 bp, Homo sapiens
gcacagctcagtacagtggctcatgtttttaatcctagtgctttgggaggctgacatgagagaattgcttgggcccaggagtttgagaccagcctgggcagcataatgagacactttctttataacaaattaaaatcaactagcagggcatggtggcacaggaggctgaggtgagagaatcatttgagctcaagagtttgaggctgcaatgagccatgatcacaccactctaccactgtaytccagcctggatgacagagggagaccctgtctctaaataaataagcaaataaaaaaatgtgtttttccatacataaaaataagttaataaacagataaataaaatagacatggatttgcttagaataaagctaattataagataacagaaaagtgagcaccaaagatggggttcaccttagcaagtgattccagcctattaggacactcacagaattttccctgcagcatgaccgacatgaaagtagaatgtcatcatgtcaggctgtacca

SEQ ID NO: 599426 - DNA, 550 bp, Homo sapiens
ttggattatggggacgggttctcctcatgctgttcttgtgatagtgagttctcatgagatctgatagtttcataagcatctggtatatcccctgctctcactcacttcacttgtcagccactgtaattggaaggtttctgaggtgcccctccaattatgtggaactgtgagtcaattaaacttcttttctttatcaattacccagtctcakgtacttcctcattgcagtatgagaatgatctaatacagccattcaactttctagtgctttctccttatatttagaatcatatccatgtgccttctcacgtctatgacaggagaagtcttcacaaaatctcacagtactaggtggttagtgactcagttttttattgaataaaatggcctactgcctgatgacagtagtatggcccttgggttttgacgaaaatatcatgttgtaggttggccaacaaggagatagcagtccagctgaaatttgtttttttatactggctttaagacagtgattagaaaaggcctaagaggtgggttctgtaagggattg

SEQ ID NO: 599427 - DNA, 598 bp, Homo sapiens
tacacctttttgtctaattctctctctctattgtatacctcaaacacaggaagcaagcttcaatgctatgagatgctccatgtagagacccacataacagagagctgagggggtgctcagaccagtagaaagaaggaaagtcaggctctccagccacactaaaccctgccaattttcacatgagtcagcttaaaggctcatgctttcccagtccagcttcagttaagaccacagtcccaatctcataaaagacstgaaggcagaggtacccaactgaactgtgtccagattctggtccacacaaattatgagatattatacgttgttgaaaagtgctgacttttagggcaatgttgtcagaaaggagcagatatctaacctcatctcccaggccctaggattctccatccctctacttatatcttccccaggctgtctgcagccaaactttctaacctctgccaaactcacacctatgagtctcttcactaagggtggcttctccctgacacatacatgtgcagagatgtctccctgttgtcatccttatcatggattaaaagtcacctcagtgaggcctgaggtccccccttgcaat

SEQ ID NO: 599428 - DNA, 598 bp, Homo sapiens
tacacctttttgtctaattctctctctctattgtatacctcaaacacaggaagcaagcttcaatgctatgagatgctccatgtagagacccacataacagagagctgagggggtgctcagaccagtagaaagaaggaaagtcaggctctccagccacactaaaccctgccaattttcacatgagtcagcttaaaggctcatgctttcccagtccagcttcagttaagaccacagtcccaatctcataaaagacctgaaggcagaggtacccaactgaactgtgtccagattctggtccacacaaattatgagatattataygttgttgaaaagtgctgacttttagggcaatgttgtcagaaaggagcagatatctaacctcatctcccaggccctaggattctccatccctctacttatatcttccccaggctgtctgcagccaaactttctaacctctgccaaactcacacctatgagtctcttcactaagggtggcttctccctgacacatacatgtgcagagatgtctccctgttgtcatccttatcatggattaaaagtcacctcagtgaggcctgaggtccccccttgcaat

SEQ ID NO: 599429 - DNA, 598 bp, Homo sapiens
tacacctttttgtctaattctctctctctattgtatacctcaaacacaggaagcaagcttcaatgctatgagatgctccatgtagagacccacataacagagagctgagggggtgctcagaccagtagaaagaaggaaagtcaggctctccagccacactaaaccctgccaattttcacatgagtcagcttaaaggctcatgctttcccagtccagcttcagttaagaccacagtcccaatctcataaaagacctgaaggcagaggtacccaactgaactgtgtccagattctggtccacacaaattatgagatattatacgttgttgaaaagtgctgacttttagggcaatgttgtcagaaaggagcagatatctaacctcatctcmcaggccctaggattctccatccctctacttatatcttccccaggctgtctgcagccaaactttctaacctctgccaaactcacacctatgagtctcttcactaagggtggcttctccctgacacatacatgtgcagagatgtctccctgttgtcatccttatcatggattaaaagtcacctcagtgaggcctgaggtccccccttgcaat

SEQ ID NO: 599430 - DNA, 598 bp, Homo sapiens
tacacctttttgtctaattctctctctctattgtatacctcaaacacaggaagcaagcttcaatgctatgagatgctccatgtagagacccacataacagagagctgagggggtgctcagaccagtagaaagaaggaaagtcaggctctccagccacactaaaccctgccaattttcacatgagtcagcttaaaggctcatgctttcccagtccagcttcagttaagaccacagtcccaatctcataaaagacctgaaggcagaggtacccaactgaactgtgtccagattctggtccacacaaattatgagatattatacgttgttgaaaagtgctgacttttagggcaatgttgtcagaaaggagcagatatctaacctcatctcccaggccctaggattctccatccctctacttatatcttccycaggctgtctgcagccaaactttctaacctctgccaaactcacacctatgagtctcttcactaagggtggcttctccctgacacatacatgtgcagagatgtctccctgttgtcatccttatcatggattaaaagtcacctcagtgaggcctgaggtccccccttgcaat

SEQ ID NO: 599431 - DNA, 567 bp, Homo sapiens
actggatgatatattttggtgggaggggtttgggccccagaggttctcgggactcctgatatatccattgcagtaggtgtagagctcaggagatccagatcttctttcctgagccagctgattacaatacaatggaccacgggctatgatcttaaatatgatttcacaggattccccaccttcagccaccatctgctctgtgcttcccttattttggggagctgatgacaacctccattatagtgagagagtccaagaaactagacttgtggacctggagaaaagaaaaaaacacttttctrtttctctcaaactgtagaatctgttgtcaaatatttaattttgattccatctgagcttgataatacgttcatgtgttaagagctgcttaaatttattttttctgtggtgtgggataatgtcttttcccatattttaaatcaacttctaaaaggtctctttaaagtggagatgtgaacatctttgtgatataaactgcacatatttgttgcgagattgttctttttctctttgttaaaatgttttgttttattctggtttggatgt

SEQ ID NO: 599432 - DNA, 546 bp, Homo sapiens
gatgacaacctccattatagtgagagagtccaagaaactagacttgtggacctggagaaaagaaaaaaacacttttctgtttctctcaaactgtagaatctgttgtcaaatatttaattttgattccatctgagcttgataatacgttcatgtgttaagagctgcttaaatttattttttctgtggtgtgggataatgtcttttcccatattttaaatcaacttctaaaagstctctttaaagtggagatgtgaacatctttgtgatataaactgcacatatttgttgcgagattgttctttttctctttgttaaaatgttttgttttattctggtttggatgtccttcagggttttgttttgtggctatttattactacaatgcaacttctcccctaattgactgacaggtttgtacattctcaataaaatattttggtaaagtctttgtaaaaactgtgtagacaattttacagttttcataaacataaaacagtcaagactgtcatgatgaaaaagaaagattgagggcttaaaaattaaaat

SEQ ID NO: 599433 - DNA, 537 bp, Homo sapiens
tgtaggtagttgctctatatctggtatattcatcatagcatcctttgtaccctttacacttatccttcaayttcccactctccttaagtgtaaattttcaaggccagagctcccatatcttcccaatattactttttgaaaagaagctcctatgtactgttttctctgggtcttgttggatataatgctaaaagagctggaaaataataattttttaaaaaattcggtgatgaaattaaggtaaatatattttataaatctaatgaacaaaatgaggccagctgagaacacaatgatagttgaagaagaacctgagatcctgtttctctcaatggatgtatgaacttaactgcaattgggtgagcaaagccagttgagtttgtagcacccctcatgagaaaaaagccaaccataaccacatttagaagaaagaaaatttggttacatttgtgcactacagaacagtgcagttagataaaattctgtccattccatgattctccctcgggaaagaaaacagagtgaaacgtgtatgca

SEQ ID NO: 599434 - DNA, 537 bp, Homo sapiens
tgtaggtagttgctctatatctggtatattcatcatagcatcctttgtaccctttacacttatccttcaatttcccactctccttaagtgtaaattttcaaggccagagctcccatatcttcccaatattactttttgaaaagaagctcctatgtactgttttctctggktcttgttggatataatgctaaaagagctggaaaataataattttttaaaaaattcggtgatgaaattaaggtaaatatattttataaatctaatgaacaaaatgaggccagctgagaacacaatgatagttgaagaagaacctgagatcctgtttctctcaatggatgtatgaacttaactgcaattgggtgagcaaagccagttgagtttgtagcacccctcatgagaaaaaagccaaccataaccacatttagaagaaagaaaatttggttacatttgtgcactacagaacagtgcagttagataaaattctgtccattccatgattctccctcgggaaagaaaacagagtgaaacgtgtatgca

SEQ ID NO: 599435 - DNA, 545 bp, Homo sapiens
gagtttgtagcacccctcatgagaaaaaagccaaccataaccacatttagaagaaagaaaatttggttacatttstgcactacagaacagtgcagttagataaaattctgtccattccatgattctccctcgggaaagaaaacagagtgaaacgtgtatgcaaacttctgacttattgatttatacctttaacatttagtgttgaccagaatagagatagagtttaaatgacagcttgggtcgactgagaataaagataaatgtttcttacaacaacagagactgtagtgcctgcaacagtgacaaagagaagagactaaaggctcctaagaggaaagagaggtataccttattaacaagaaaatacatacagtagtccaaagaagacacattttgacaacagattggagaagctcccggaatgactagtgtggctgaatattgtcaattttcccatgtacaaagctttttcataaaggataaaataggtagtggtttcttaattgaccaaaaccttaacaaaaccacagtacataaaagcaacc

SEQ ID NO: 599436 - DNA, 590 bp, Homo sapiens
gggtcgactgagaataaagataaatgtttcttacaacaacagagactgtagtgcctgcaacagtgacaaagagaagagactaaaggctcctaagaggaaagagaggtataccttattaacaagaaaatacatacagtagtccaaagaagacacattttgacaacagattggagaagctcccggaatgactagtgtggctgaatattgtcaattttcccatgtacaaagctttttcataaaggataaaataggtagtggtttcttaattgaccaaaaccttaacaaaaccacagtacataaaagcaaccaggaaatatagcctaatgaaacgagamaaatatatattcaagtgaccctaaagaagtggagatctatgaattattttttaacttaaaatcattttatttttctttattttttcattttatacacaggatcttactctatctcctgggacagattgcagtggtgcaatcacagctcactgtaacctcaaatttctgaagtaaagcagtcatgcctcctatgtctcctgagtaaatatgaccacagttgggcacactaccacacctgtatagtttctttaaaag

SEQ ID NO: 599437 - DNA, 493 bp, Homo sapiens
gagggttcaattcaacaagaagacttaactatcctaaatgtagatgcacccaactttggggaacatagagttatacaacaagtactgctagacctacaataagactcaagtagccacgcaataatagtagggaaacgcaactccccaataacagtgtttgtcagattatctaggcakaaacttaacaaagaaattctggagtttgatttcgcacttgatcaattgaaactaatagacatttatagtatacaccacacatcatctaaggaacataaattcttctcatcgctcacagaatatactctaggattgaccacttcctagccataaagcaattatccatacattttttaaaaatgaaaattatgccaaccatactgtcaggccacaatggaaaaaagataaatatcaataccaagaaaatctcacaaaatcacagaatggcattgaaattaaacaacttgctcctgaatgaattttgggtaaacaacaa

SEQ ID NO: 599438 - DNA, 574 bp, Homo sapiens
tctgggttgtaggaaaagctctgttaagaggaaagttgagagtgctaaatacctgcatcaagaagttagaatgatctcaaactaacaatttaacatcacacttagagaaactagaaaaacaaaaacaaactaaccccaaagctggcagaatggcaaaaatattcacarcctataaacctgacaaaatctaatactcagaatctataagaaacttaaagaattcacaagcaaaaaattaccccatgaaaaagtgggcaataacagacaatgttcaaaagaatacatacaagtggccaaacaacatgaaaaaagcttatcactaaccatcaaggaaatgtaaataaaaaccacagtaagacaccatcgtacaccagttagaatggcttttgttaaaaagtaaaatgatagtagatattggtggggttttagagggaaaaaaccacttatacactgtttataggaatataaattagttcagacactgtggagagcagcttggagattttccaaataacggagagttgaactatgattcaacgcagcaatttcactgctgggtatatacccaaaagag

SEQ ID NO: 599439 - DNA, 574 bp, Homo sapiens
tctgggttgtaggaaaagctctgttaagaggaaagttgagagtgctaaatacctgcatcaagaagttagaatgatctcaaactaacaatttaacatcacacttagagaaactagaaaaacaaaaacaaactaaccccaaagctggcagaatggcaaaaatattcacagcctataaacctgacaaaatctaatactcagaatctataagaaacttaaagaattcacaagcaaaaaattaccccatgaaaaagtgggcaataacagacaatgttcaaaagaatacatacaagtggccaaacaacatgaaaaaagcttatcactaaccatcaaggaaatgtaaataaaaaccacagtaagacaccatcgtacaccagttagaatggcttttgttaaaaagtaaaatgatagtagatattggtggggttttagagggaaaaaaccacttatacactgtttataggaatataaattagttcagmcactgtggagagcagcttggagattttccaaataacggagagttgaactatgattcaacgcagcaatttcactgctgggtatatacccaaaagag

SEQ ID NO: 599440 - DNA, 574 bp, Homo sapiens
tctgggttgtaggaaaagctctgttaagaggaaagttgagagtgctaaatacctgcatcaagaagttagaatgatctcaaactaacaatttaacatcacacttagagaaactagaaaaacaaaaacaaactaaccccaaagctggcagaatggcaaaaatattcacagcctataaacctgacaaaatctaatactcagaatctataagaaacttaaagaattcacaagcaaaaaattaccccatgaaaaagtgggcaataacagacaatgttcaaaagaatacatacaagtggccaaacaacatgaaaaaagcttatcactaaccatcaaggaaatgtaaataaaaaccacagtaagacaccatcgtacaccagttagaatggcttttgttaaaaagtaaaatgatagtagatattggtggggttttagagggaaaaaaccacttatacactgtttataggaatataaattagttcagacactgtggagagcagcttggagattttccaaataackgagagttgaactatgattcaacgcagcaatttcactgctgggtatatacccaaaagag

SEQ ID NO: 599441 - DNA, 629 bp, Homo sapiens
ccttggcctcccacagtgctgggattacaggcatcagccaccgtgtccagcctattaatgctaaattgaatttaaaaagtgtcacatgtacagcaatactacttagcaaaaacaacaacaacaaaaaaaaaaacttgtcytttgcagcaacattaatacaactaaaggtcattctacaatcaaattaatgcagaaatggaaaacaaaaatactgatgttctcacttataaatggaaattaacactgggtacacatggacataaaaataaaaataaaagacaactcttagagggtggagagagggagggatcaagaactgaaaaactgtctatttagtactatgctcactgcataagtgatggaattacttatatttcaaacctcagcactatacaaaatacccatgtaaaaaacctgtgtaggtacctcctaaatctaaaacaaatttgaaattctaaaaggcggtcttactctctcacccagacaggaatacaatatcatggttataactcaatgcagcctcaaattcctgggaactcaaggaataatcttacatcagcctccaacttcctgagactacaggaacattccaccattcatgattaatctgtaaaaatatttttttacat

SEQ ID NO: 599442 - DNA, 583 bp, Homo sapiens
attaacctttttcattatgaattatccagtcttggttatgtctttattaacagcatgagaatttattaatacagtaatccccttgccttagctttcaaagtagctggaattagacacamatatcaatgtgcctggctaaaacacctagcttaaagatgctcattcagctaaagaagaacatagaaagctaaacagaaaaagaaaacaattcatgaagataatgagattatcaatgaagtgattaaaagtacaaaatagaaacataaagtgtggagctgaaaaataaaatacctgaatttagagattcactagaaggtccaacaactggtttgatctagcaggaaaaaatccagcaagcttcataagaagtcttttgaaattatatggtgaggagggtaaaaataattttaaaaattaagaaagcctaagggacttatgggataccattaagatggccaatatacttctaatgggaattctaaaataaaaagagagaaaagagagcagcaaagttatttcaagaaacaaacagtggctgagaactctcaaaatttgagggagaaaatggcctaaaatttaatga

SEQ ID NO: 599443 - DNA, 577 bp, Homo sapiens
acaataacaacaacaacaataaaagcaacaaaaaacaacatayatcaataaaagcaacaacaataaaacaacatgcaacaataaaagcaacagtaatgtatgtgccttacatcacagttcccaaaatatgaagcaacattttacagaattgaaacatgaagtagccagcacataacagtagatgacttttttatcagacttttagtaatgtaaattaaaaaacaaacataagatgaataagtaaacagaggatttcaacaacacaatagaacaattagacctaacagtcacatttatatctctccactcaacagtagaatatgcaatacttttaatcacacatgccacaatattccagatagaccacctgttaagttaaaaaacacatcttagcaaatttcagcagatggaattacacaaattattcctaactatgatacaataaaacaagaagttaaaaacactagcatgtcaaagaataagtaaaaattaaacaacaaattctcaaacacactcttgttcaagaggttatagacttaatattgttaaaatgtcactactaccaaaagtggtctac

SEQ ID NO: 599444 - DNA, 577 bp, Homo sapiens
acaataacaacaacaacaataaaagcaacaaaaaacaacatacatcaataaaagcaacaacaataaaacaacatgcaacaataaaagcaacagtaatgtatgtgccttacatcacagttcccaaaatatgaagcaacattttacagaattgaaacatgaagtagccagcacataacagtagatgacttttttatcagacttttagtaatgtaaattaaaaaacaaacataagatgaataagtaaacagaggatttcaacaacacaatagaacaattagacctaacagtcacatttatatctstccactcaacagtagaatatgcaatacttttaatcacacatgccacaatattccagatagaccacctgttaagttaaaaaacacatcttagcaaatttcagcagatggaattacacaaattattcctaactatgatacaataaaacaagaagttaaaaacactagcatgtcaaagaataagtaaaaattaaacaacaaattctcaaacacactcttgttcaagaggttatagacttaatattgttaaaatgtcactactaccaaaagtggtctac

SEQ ID NO: 599445 - DNA, 583 bp, Homo sapiens
acttttccttattcagtataaagttagcattgctttttcataaatggcctttattgagttaaggcacataccttctattcctaacttgttgagagttttcatcataatcaaggctgaatttcatccaattcttcttctgcatatgcaaaagctacaaaaatgaaaatacttaatgtgatggctaatacagggtgtcaaattgattggattggaggatagaaagcattgatcctgggtgtgtctgtgagggtgttgccaaaggacattaacatttgagtcagtgggctgggaaagggagatccactcttaattgggtgagcaccatctaatgagctgacagtgaatataaagcaggcagaaaaacgtgaaaaagagagactggcctaagctcccagamtacatctttctcctgtgctggacacttgcagccctcaaacatcagactccaagttcttcagctttgggacatggaccgcctctccttgctcctcaaacttgcagacaaccaacctattgtgggatctcatgatctctctagggaagcccaactaatacacctagcaacaaacttaactaaaaaggt

SEQ ID NO: 599446 - DNA, 647 bp, Homo sapiens
aagaatactgttgatatagctacccaaagtgatctacagacttaatgtgatttttatcaaaataccaatgacattttttcacagaaataaaaaaatttaaatttatatggatccacaaaaaactctgaatagacaaagcaactttgagcaaaataagcaaagctgaaggcatcacttcatcaaacttcaaaacttgctataaagctacagtaaccaaaacagcactgtactggcataaaaacaaacacatagactaatrtgcccaataagcccggaagttaatttatgcacctaaagccaaaagattgtcaacaaaattaccaagaacacactttagagaaaagctaatctctttaataaatggtgcagggccatttaaatatttatattcagaaaaataatactagacccttgtaccttgccatatatgataatcaactaaaactaaagacttaaatgtaatgccatcaattatgaaactattagagaaaaacataaaaaaatgctttataacattggacggtgaaaggattattaaaataagatttcaaaacatgggcaacaaaatcaagaataaacaaacaacattatgtcaaactaaaatgctttttcatattaaaaaaacaactaaaagtttgaagagacag

SEQ ID NO: 599447 - DNA, 647 bp, Homo sapiens
aagaatactgttgatatagctacccaaagtgatctacagacttaatgtgatttttatcaaaataccaatgacattttttcacagaaataaaaaaatttaaatttatatggatccacaaaaaactctgaatagacaaagcaactttgagcaaaataagcaaagctgaaggcatcacttcatcaaacttcaaaacttgctataaagctacagtaaccaaaacagcactgtactggcataaaaacaaacacatagactaatgtgcccaataagcccggaagttaatttatgcacctaaagccaamagattgtcaacaaaattaccaagaacacactttagagaaaagctaatctctttaataaatggtgcagggccatttaaatatttatattcagaaaaataatactagacccttgtaccttgccatatatgataatcaactaaaactaaagacttaaatgtaatgccatcaattatgaaactattagagaaaaacataaaaaaatgctttataacattggacggtgaaaggattattaaaataagatttcaaaacatgggcaacaaaatcaagaataaacaaacaacattatgtcaaactaaaatgctttttcatattaaaaaaacaactaaaagtttgaagagacag

SEQ ID NO: 599448 - DNA, 623 bp, Homo sapiens
tttataacattggacggtgaaaggattattaaaataagatttcaaaacatgggcaacaaaatcaagaataaacaaacaacattatgtcaaactaaaatgctttttcatattaaaaaaacaactaaaagtttgaagagacagcttaggcgatgacagaaaatgttttcatatacatgtgacaaaaggctaatattcagaatatataagaaactttaaaatctcaaaataaaatacacttataatctaatttaaaaaatgcaaaagatcttaatagatgtttgtcaaaaagagatacaaaaatggctaactggaacacaaaaagatgctctacattactaatyaccaaggaaatgcaaatccaaactgcaatgaagtaccacctcattcccattagaatggctataataaaaataaataaataaataaatcaagaactaatgaggatataaaaaagagtggatgtataccttgttggtggaattgtaaattagtatggccattatagaaaatagtatggaggtttctgaaagaaattaaaaatatatctattatatgatccagcacttttacttctgggtgtatatccaaaagaaaggatattactgtgtcaaaaagatatttgc

SEQ ID NO: 599449 - DNA, 589 bp, Homo sapiens
cttaggcgatgacagaaaatgttttcatatacatgtgacaaaaggctaatattcagaatatataagaaactttaaaatctcaaaataaaatacacttataatctaatttaaaaaatgcaaaagatcttaatagatgtttgtcaaaaagagatacaaaaatggctaactggaacacaaaaagatgctctacattactaattaccaaggaaatgcaaatccaaactgcaatgaagtaccacctcattcccattagaatggctataataaaaataaataaataaataaatcaagaactaatgaggatataaaaaagagtggatgtataccttgttggtggaattgtaaattagtatggccattatagaaaatagtatggaggtttctgaaagaaattaaaaatatatctattatatgatccagcamttttacttctgggtgtatatccaaaagaaaggatattactgtgtcaaaaagatatttgcattcccatgttcattacagaactatttataatagcttatatatggaatcaattcaaatgtacagcaacagataaatggataaggaaaatgtactatatatacacagc

SEQ ID NO: 599450 - DNA, 557 bp, Homo sapiens
aaagaaattaaaaatatatctattatatgatccagcacttttacttctgggtgtatatccaaaagaaaggatattactgtgtcaaaaagatatttgcattcccatgttcattacagaactatttataatagcttatatatggaatcaattcaaatgtacagcaacagataaatggataaggaaaatgtactatatatacacagcgaaatactattcagccataagaaagcataaaattctgtcagttaaaaagagcatggatgaaccttgagcataccatgttaagtaaaataagccacacagagaaacacaaatactttatgatcttattatctcactcatttgaggaacctgaaaaaaagggttgatagaagcaaagagtacaacaggggttaccagagaytgaagcaggaggatgggaaaagtctgcttcacaggtattgtgttatgattagataggggaaataagtttttgttttttattacacagtagaataataataattaatgaaaagttatctcatattacaaaatagctaaaagagaccagttttggt

SEQ ID NO: 599451 - DNA, 539 bp, Homo sapiens
gcgtgaacacaaaggtgaggttggagtgaaagtttaagaagcaagagaagaaagctctttgccagcagagataggtgtctgaaagtggtgccctctacgaggctgggtccagggtttttatggactgggaagggaaggatatgtgcctagttcacaggctgtcttgaaaaacgtgtggctcagcttggcccagcctttggcccgggatcaatcaggagctgaagggatgattgatagatgctgcttagcttggcccaagacttatcagaagctaaggtgaaagtttgccaaggagcttggcccgggagcactcaggggctgaagtaattattcayagaggtcagacttacagtccaaataaacgagagtgtcgactggaatgcaccagatcccacagtgcccatgccaacaaaaagagaaggaacattttcctgggagcccactgactgtacaaagacaaaagtgcttcttttttttctttttcttgtctttcttttttttgagatgtactttctttttttatttttttttattttttt

SEQ ID NO: 599452 - DNA, 556 bp, Homo sapiens
gagaagaaagctctttgccagcagagataggtgtctgaaagtggtgccctctacgaggctgggtccagggtttttatggactgggaagggaaggatatgtgcctagttcacaggctgtcttgaaaaacgtgtggctcagcttggcccagcctttggcccgggatcaatcaggagctgaagggatgattgatagatgctgcttagcttggcccaagacttatcagaagctaaggtgaaagtttgccaaggagcttggcccgggagcactcaggggctgaagtaattattcatagaggtcagacttacagtccaaataaacgagagtgtcgacyggaatgcaccagatcccacagtgcccatgccaacaaaaagagaaggaacattttcctgggagcccactgactgtacaaagacaaaagtgcttcttttttttctttttcttgtctttcttttttttgagatgtactttctttttttatttttttttatttttttttgcagttttgctcttgttgcccagcctggagtgcaatggtgcgatctcggctcacagcaa

SEQ ID NO: 599453 - DNA, 588 bp, Homo sapiens
gtttctacaagtttttatccaaatgggccagaggtttttctatctgtgcagccacgggcatgtccccaagcacaacaacatatgctagttcccttgttagtgtctgcagcttgattttttccaggcttctttatatgttatgcagggatgaggcactgaccagggactttccagggactcttctcttsctatctacctaaggcaagctaactaacttctttcataagtaatgagtattcacttttacttttgtaagacacaaattatctaaaacctactgcaaaacaatagaactatactaaccacttctaaaccatatacttaaaatgtcagaaatgacaatggcatgtttttaactacaattagaaatttaagactaactaaaaggcacagttagaaaatctttcaaacatcaccttcaaataacaaagggttcttctcacacaattatatggatttaaactatatgttgattgtaaatttaagattatttccctgatgactcaccaagatagaataaaataatcactggaaaccaagaaaagagggaaatttatagcactaatgtccacatcaaaaagatagaaa

SEQ ID NO: 599454 - DNA, 622 bp, Homo sapiens
tttgtgatgcacatctgtaatcccagctactcaggaagctgagacagcagaaatcacttaaaactgagaagtggaggttgcagtgagcggagatcatgccactgtactccagcctgggtgacagaktgagactctgccacaagaagaaaaaaaagagaaactagaagatctaaaattaacagcctaacatcttgatgaaaagaactagaaaaccaagtgaaaactaaccagaaaggtagcagaaaacaagaaataaccaagatcaaagtagagctgagggagatagagacactgaaaactcttccaaaaaaaaaagtcaacaaatccaggagctgtttttatgaaaaaaattaataaactagatggaacactagctaggcaaataaataagaaaagaaaggagaaccaaacacaattagaaataataagggagatatcatcactgatcccatggaaatatgaacaacaatcacagaacactataaacatatgtatgcacataaaccagaaaatctagaagaaatagacaatttccttgcaaaataaaccctccacaagactgaaccctgaatagatcaataatgtgttctgaaactgaggcagtaaaaactagcctaccaag

SEQ ID NO: 599455 - DNA, 564 bp, Homo sapiens
agaaataataagggagatatcatcactgatcccatggaaatatgaacaacaatcasagaacactataaacatatgtatgcacataaaccagaaaatctagaagaaatagacaatttccttgcaaaataaaccctccacaagactgaaccctgaatagatcaataatgtgttctgaaactgaggcagtaaaaactagcctaccaagcaagctgaatttgagcagaggtacaaagaggagatggtaccttttctcctaaaaccatccaaaaaaaattgaagacaaagaagttctctctaactcattctatcaggccagcatcatccagataccaaaacctaacatagatactacaacaacaacaacaacaacaacacatcatgccaatgtctttggtaaacactgtgcaaaaatcctcaataaaatactggcaaaccaaatccagcagcacattaaaaagttcatccgcaacaatggagttggctttgtccccaggatgcaaggttgattcaacatatgcaaatcaataaatgtgactcatcacataaagagaactaaatacaaaa

SEQ ID NO: 599456 - DNA, 582 bp, Homo sapiens
ccttgggtgttgtggtacatgtctgcagtccaagctacttgggtggctaaggtgggacgattatttgagcccaggaggttaaggctacagtgagctgtgatatgccactgcacttcagtctgagcaagaaagcataactttgtctcaacaaaaatgaacaataccacaggaaagacagaaccagaaaaaaaagaagcaaacttaaaatggacagaaaactacaaatgtacaatagtaactgcttacctatcactaccttwcaaataaaaagattaaagtatctactaaacagatactgctgtacactgaatgtcatctccaaaatttaggataaaatttaatagccaacatgttagaattaagaggtggaacctttaaaaattaattaagctataagcactctgccctcatgaatggattaacgttcttattatgggaatgggctaattataacaagaatggatctgttatatattaaaaaaaaaaagctctctctccctcacatctttgtgtatgttattatccagcaactagaccttcaacatataccagtataatgttgttttggcttcccagcctcca

SEQ ID NO: 599457 - DNA, 510 bp, Homo sapiens
gcatattccacacttgctggagcacgagaggcctgagaggcacctgtttcccagttgctaactgatgtccatacaccccattcacgtgtcttcatttaggtttctgcatagtgtatttgctcagccagtgtaaacacatcttctggggggcatcattaattgcagcacctgccccrcttgttctgggagggagtcaggaggaatctggtcagctcctaatcccccaggacaaaggtgctgcccccttttcagcactcacatccagcaatgccatctctggatgggtttttcaaacacaagcagtatgaggtagcaagaatggtgtgacaggctcagggccatgggcagccggttgctggagaagcagcacagggcaggcacatctgtgggtggcaccatgacaagccaaggcagccacagaccctaatcccaacagctccagcccagatggcattcaaatcttcccagatagtattggggtacccgatgcccatcacttgcccgctcatt

SEQ ID NO: 599458 - DNA, 388 bp, Homo sapiens
gaattctgtctagtacccagaaggaagggrgttcccagtgaaggcagggccaggctgcatgcacctcttcaaaaatattctcctcatagtccaccctcaaggtgtacatcctctgtgtgcttgcagtccatggcagcctctgccttgggaaccgtccagctgcacacctgcaatatggtggtgaccctcttgaatggatggttctgggccccattgcaggcagcagatagggagatgctcagcccatcaagcccagagccctgccacaggcttctgtgaggcctccacctgctctgggttcttgccctgagaggctgccctgaagtcaaacagaagcaggtgggactctcttccacagctgctctctctcccactgacagctccctag

SEQ ID NO: 599459 - DNA, 391 bp, Homo sapiens
ggagttcccagtgaaggcagggccaggctgcatgcacctcttcaaaaatrttctcctcatagtccaccctcaaggtgtacatcctctgtgtgcttgcagtccatggcagcctctgccttgggaaccgtccagctgcacacctgcaatatggtggtgaccctcttgaatggatggttctgggccccattgcaggcagcagatagggagatgctcagcccatcaagcccagagccctgccacaggcttctgtgaggcctccacctgctctgggttcttgccctgagaggctgccctgaagtcaaacagaagcaggtgggactctcttccacagctgctctctctcccactgacagctccctagagggtaactcagacagagaagatagaattc

SEQ ID NO: 599460 - DNA, 367 bp, Homo sapiens
aggctgcatgcacctcttcaaaaatattctcctcatagtccacsctcaaggtgtacatcctctgtgtgcttgcagtccatggcagcctctgccttgggaaccgtccagctgcacacctgcaatatggtggtgaccctcttgaatggatggttctgggccccattgcaggcagcagatagggagatgctcagcccatcaagcccagagccctgccacaggcttctgtgaggcctccacctgctctgggttcttgccctgagaggctgccctgaagtcaaacagaagcaggtgggactctcttccacagctgctctctctcccactgacagctccctagagggtaactcagacagagaagatagaattc

SEQ ID NO: 599461 - DNA, 375 bp, Homo sapiens
aattctgtctagtacccagaaggaagggagttcccagtgaaggcagggccaggctgcatgcacctcttcaaaaatattctcctcatagtccaccctcaaggtgtacatcctctgtgtgcttgcagtccatggcakcctctgccttgggaaccgtccagctgcacacctgcaatatggtggtgaccctcttgaatggatggttctgggccccattgcaggcagcagatagggagatgctcagcccatcaagcccagagccctgccacaggcttctgtgaggcctccacctgctctgggttcttgccctgagaggctgccctgaagtcaaacagaagcaggtgggactctcttccacagctgctctctctcccactg

SEQ ID NO: 599462 - DNA, 367 bp, Homo sapiens
aggctgcatgcacctcttcaaaaatattctcctcatagtccaccctcaaggtgtacatcctctgtgtgcttgcagtccatggcagcctctgccttgggaacmgtccagctgcacacctgcaatatggtggtgaccctcttgaatggatggttctgggccccattgcaggcagcagatagggagatgctcagcccatcaagcccagagccctgccacaggcttctgtgaggcctccacctgctctgggttcttgccctgagaggctgccctgaagtcaaacagaagcaggtgggactctcttccacagctgctctctctcccactgacagctccctagagggtaactcagacagagaagatagaattc

SEQ ID NO: 599463 - DNA, 388 bp, Homo sapiens
gaattctgtctagtacccagaaggaagggagttcccagtgaaggcagggccaggctgcatgcacctcttcaaaaatattctcctcatagtccaccctcaaggtgtacatcctctgtgtgcttgcagtccatggcagcctctgccttgggaaccrtccagctgcacacctgcaatatggtggtgaccctcttgaatggatggttctgggccccattgcaggcagcagatagggagatgctcagcccatcaagcccagagccctgccacaggcttctgtgaggcctccacctgctctgggttcttgccctgagaggctgccctgaagtcaaacagaagcaggtgggactctcttccacagctgctctctctcccactgacagctccctag

SEQ ID NO: 599464 - DNA, 367 bp, Homo sapiens
aggctgcatgcacctcttcaaaaatattctcctcatagtccaccctcaaggtgtacatcctctgtgtgcttgcagtccatggcagcctctgccttgggaaccgtccagctgcacacctgcaatatggtggtgaccctcttgaatggatggttctgggccccattgcagrcagcagatagggagatgctcagcccatcaagcccagagccctgccacaggcttctgtgaggcctccacctgctctgggttcttgccctgagaggctgccctgaagtcaaacagaagcaggtgggactctcttccacagctgctctctctcccactgacagctccctagagggtaactcagacagagaagatagaattc

SEQ ID NO: 599465 - DNA, 388 bp, Homo sapiens
gaattctgtctagtacccagaaggaagggagttcccagtgaaggcagggccaggctgcatgcacctcttcaaaaatattctcctcatagtccaccctcaaggtgtacatcctctgtgtgcttgcagtccatggcagcctctgccttgggaaccgtccagctgcacacctgcaatatggtggtgaccctcttgaatggatggttctgggccccattgcaggcagcagatagggagatgctcagcccatcaagcccagagccctgccacaggcttctgtgagrcctccacctgctctgggttcttgccctgagaggctgccctgaagtcaaacagaagcaggtgggactctcttccacagctgctctctctcccactgacagctccctag

SEQ ID NO: 599466 - DNA, 388 bp, Homo sapiens
gaattctgtctagtacccagaaggaagggagttcccagtgaaggcagggccaggctgcatgcacctcttcaaaaatattctcctcatagtccaccctcaaggtgtacatcctctgtgtgcttgcagtccatggcagcctctgccttgggaaccgtccagctgcacacctgcaatatggtggtgaccctcttgaatggatggttctgggccccattgcaggcagcagatagggagatgctcagcccatcaagcccagagccctgccacaggcttctgtgaggcctccacctgctctgggttcttgccctgagaggctgccctgaagtcaaacasaagcaggtgggactctcttccacagctgctctctctcccactgacagctccctag

SEQ ID NO: 599467 - DNA, 533 bp, Homo sapiens
gtggtatgagtgtttctccctcacatatgattccagaacactcttgttgttgtctgaatgcttttccctcacacagggtcccagaacactcctgttgggttgtgagtgtttgtccctctcctaggattccagaaaactgctacgaggttctgaatatttgcccctcacataggactccaggacactgctgctgtgttgtaaatgtttgtttctcacataggattycaaaacactcccgctgttgtttgaatgcttgtcccttacataggattccaaaacactcccgctgttgtttgaatgcttgtcccttacataggattccaaaacaatgctgctggcgtctgaatgtttgtccctcacgtaggattcaagaacaccgttacgaatgtctgaatgtttgttcctcacataggatttcagaacaatacagctgtgatctgactgtttgtccctcaaatagggttccagaacactgctgctgggttctgagtgtttgtccctcacatcggattcctgaacaccgctgcgagtgt

SEQ ID NO: 599468 - DNA, 533 bp, Homo sapiens
gtggtatgagtgtttctccctcacatatgattccagaacactcttgttgttgtctgaatgcttttccctcacacagggtcccagaacactcctgttgggttgtgagtgtttgtccctctcctaggattccagaaaactgctacgaggttctgaatatttgcccctcacataggactccaggacactgctgctgtgttgtaaatgtttgtttctcacataggattccaaaasactcccgctgttgtttgaatgcttgtcccttacataggattccaaaacactcccgctgttgtttgaatgcttgtcccttacataggattccaaaacaatgctgctggcgtctgaatgtttgtccctcacgtaggattcaagaacaccgttacgaatgtctgaatgtttgttcctcacataggatttcagaacaatacagctgtgatctgactgtttgtccctcaaatagggttccagaacactgctgctgggttctgagtgtttgtccctcacatcggattcctgaacaccgctgcgagtgt

SEQ ID NO: 599469 - DNA, 533 bp, Homo sapiens
gtggtatgagtgtttctccctcacatatgattccagaacactcttgttgttgtctgaatgcttttccctcacacagggtcccagaacactcctgttgggttgtgagtgtttgtccctctcctaggattccagaaaactgctacgaggttctgaatatttgcccctcacataggactccaggacactgctgctgtgttgtaaatgtttgtttctcacataggattccaaaacactccygctgttgtttgaatgcttgtcccttacataggattccaaaacactcccgctgttgtttgaatgcttgtcccttacataggattccaaaacaatgctgctggcgtctgaatgtttgtccctcacgtaggattcaagaacaccgttacgaatgtctgaatgtttgttcctcacataggatttcagaacaatacagctgtgatctgactgtttgtccctcaaatagggttccagaacactgctgctgggttctgagtgtttgtccctcacatcggattcctgaacaccgctgcgagtgt

SEQ ID NO: 599470 - DNA, 534 bp, Homo sapiens
tccctcacatatgattccagaacactcttgttgttgtctgaatgcttttccctcacacagggtcccagaacactcctgttgggttgtgagtgtttgtccctctcctaggattccagaaaactgctacgaggttctgaatatttgcccctcacataggactccaggacactgctgctgtgttgtaaatgtttgtttctcacataggattccaaaacactcccgctgttgtttgaatgcttgtcccwtacataggattccaaaacactcccgctgttgtttgaatgcttgtcccttacataggattccaaaacaatgctgctggcgtctgaatgtttgtccctcacgtaggattcaagaacaccgttacgaatgtctgaatgtttgttcctcacataggatttcagaacaatacagctgtgatctgactgtttgtccctcaaatagggttccagaacactgctgctgggttctgagtgtttgtccctcacatcggattcctgaacaccgctgcgagtgtctgaatgattgcccctc

SEQ ID NO: 599471 - DNA, 534 bp, Homo sapiens
tccctcacatatgattccagaacactcttgttgttgtctgaatgcttttccctcacacagggtcccagaacactcctgttgggttgtgagtgtttgtccctctcctaggattccagaaaactgctacgaggttctgaatatttgcccctcacataggactccaggacactgctgctgtgttgtaaatgtttgtttctcacataggattccaaaacactcccgctgttgtttgaatgcttgtccctyacataggattccaaaacactcccgctgttgtttgaatgcttgtcccttacataggattccaaaacaatgctgctggcgtctgaatgtttgtccctcacgtaggattcaagaacaccgttacgaatgtctgaatgtttgttcctcacataggatttcagaacaatacagctgtgatctgactgtttgtccctcaaatagggttccagaacactgctgctgggttctgagtgtttgtccctcacatcggattcctgaacaccgctgcgagtgtctgaatgattgcccctc

SEQ ID NO: 599472 - DNA, 572 bp, Homo sapiens
aaaattatcagttcccactttctttgctgcattctcaaatgcaacacaggagaacagttttcccttgcaaattcacaaagctgttaactatttgtcctttattatacatttcattaaagttttctattattggatttctttctacttctccctacagttctgcccatatttgctttttatatttagaagcctcccttttgggtgcataaatatatatagctatattcacttgacaaattaacctctattattattgtatggtaaactcatttcatgcttgtgagagacattgctagaaagtctattttgtctaatttaagcataactaccattgaactcttttggctattatttgcatggaatatcattttctatcctttcactattagcctatgctcttaattcataattgagtctcttgtaagcagcatattacgaggtttaaaagtttcatttatccactctgtctgctttagtctcttttggctgttagaatatcacagactrgtaattaataaggaacagaattttatttgactcatgattctggaggctgggaaggtaaaagaaca

SEQ ID NO: 599473 - DNA, 592 bp, Homo sapiens
tatgacatctttttccttgtttttttgtttttttcttttcagtttcagataggcttttttttttttttttaagagaattttaaaacagagtcgaaagaagagaaatcagttatttgtcctcttgcagggtggggagacaacttccttccccacaggtttgaggctatgcctaagtggtgagtcttgaggagatgcagaaaggatccatcccaggcacttggctggacttaagtaagcatagcctttaggccacaagacctgatggtttgggtactggtctggacataagtccccatcttcccagaaatatcrtcttttgtctgcaacaactggctggagaaatatttcagaaagatatgtgtctggaacacccaaagacatacttttcctttctccttggcataggccttgcagcactgaagaaagaccaggtttgcaatggagccttcaacagtcttcatccctatggaactcagggtctcatagggtgacaggagaggagacaaagctaacttgggaagagtctctgtccttcagcttctcccctactgaaacactatatattgggcccacagttcatcacaaaacacac

SEQ ID NO: 599474 - DNA, 592 bp, Homo sapiens
tatgacatctttttccttgtttttttgtttttttcttttcagtttcagataggcttttttttttttttttaagagaattttaaaacagagtcgaaagaagagaaatcagttatttgtcctcttgcagggtggggagacaacttccttccccacaggtttgaggctatgcctaagtggtgagtcttgaggagatgcagaaaggatccatcccaggcacttggctggacttaagtaagcatagcctttaggccacaagacctgatggtttgggtactggtctggacataagtccccatcttcccagaaatatcatcttttgtctgcaacaactggctggagaaatatttcagaaagatatgtgtctggaacacccaaagrcatacttttcctttctccttggcataggccttgcagcactgaagaaagaccaggtttgcaatggagccttcaacagtcttcatccctatggaactcagggtctcatagggtgacaggagaggagacaaagctaacttgggaagagtctctgtccttcagcttctcccctactgaaacactatatattgggcccacagttcatcacaaaacacac

SEQ ID NO: 599475 - DNA, 456 bp, Homo sapiens
cccactgggaatctaagctgtcctaaagctcttttcaatcacttctcactgtttccaggcccatgtgggtaggtgttccaggcttcattctttcaggctgatcataaaggcacagtgtgggaaaatcccctactgtkatggccattgctgggaagcaggaaaggctaagggcccactgctgcccaaggctagtatagatgccctctgctccactcatgtcctcaaagactgatatcaggtgcagcagctgctgtctggaatgttatcaaaccaggactgcacaggcactgcattctctgtgtggaagacataagaagcaggcgagttgtccaggatgagagttttcctcaggtccctccccagatggctgaggtcattgacatagcagccctggtggaacaaacgtgactcatgggctaggcaaccctcagaacactctcacctctggtccagcac

SEQ ID NO: 599476 - DNA, 456 bp, Homo sapiens
cccactgggaatctaagctgtcctaaagctcttttcaatcacttctcactgtttccaggcccatgtgggtaggtgttccaggcttcattctttcaggctgatcataaaggcacagtgtgggaaaatcccctactgttatggccattgctgggaagcaggaaaggctaagggcccactgctgcccaaggctagtatagatgccctctgctccactcatgtcctcaaagactgatatcaggtgcagcagctgctgtctggaatgttatcaaaccaggactgcacaggcactgcattctctgtgtggaagacataagaagcaggcgagttgtccaggatgagagttttcctcaggtccctccccagatggctgaggtcattgacatagcagccctggtggaacaaacgtgactcatgsgctaggcaaccctcagaacactctcacctctggtccagcac

SEQ ID NO: 599477 - DNA, 360 bp, Homo sapiens
agggttcccactcacctgggagtgggacacgcccctcctggtaggttgyactgttaagattatttccttatttattttacttaaaactggtagaatgttactattatatgacgtacccatgattctaccagtaaatttgggcatacgtttattagtttttgttagattaactagttcttttgtttctgttattaaggtgaaatttaaattctatctgaaatcagtaagatacagagagattttaatgagaagtgagtatttttttctaaaggggaactgatatctctggctgaatatgtgtcttcttgctgaagtttgaaagtcagttattttattaaagtttaattttactataaaaat

SEQ ID NO: 599478 - DNA, 360 bp, Homo sapiens
agggttcccactcacctgggagtgggacacgcccctcctggtaggttgtactgttaagattatttccttatttattttacttaaaactggtagaatgttactattatatgacgtacccatgattctrccagtaaatttgggcatacgtttattagtttttgttagattaactagttcttttgtttctgttattaaggtgaaatttaaattctatctgaaatcagtaagatacagagagattttaatgagaagtgagtatttttttctaaaggggaactgatatctctggctgaatatgtgtcttcttgctgaagtttgaaagtcagttattttattaaagtttaattttactataaaaat

SEQ ID NO: 599479 - DNA, 479 bp, Homo sapiens
attaagtttcacaagctgttagtaatcaagtatattttctcagtttcagatcctctgcgattttattgagtggaaagtcttgcgctgaaagggttcaagaaaaataatattgcatttccttatgtcacaggaaacacttttaatggtaamttgtcagactatgaacaaacccactttttaagatattgataaagtcttttcttcacgtgatattttatacaagaacacttcagatgtattggatgtggctgattttaacaaatcctattagatttgtatcaattagttacatgttctattcatagtcttttgtgaatcattgcctttttgtttaaaaagatggcctattttgagcctttgtataagtacattcctgtttttgtgacaaaagaaaaactttaaatttgtcccaaagagaaaaataatggctatcagaagtatgctttgttttagttcgagttaccgttactgtatttgtg

SEQ ID NO: 599480 - DNA, 479 bp, Homo sapiens
attaagtttcacaagctgttagtaatcaagtatattttctcagtttcagatcctctgcgattttattgagtggaaagtcttgcgctgaaagggttcaagaaaaataatattgcatttccttatgtcacaggaaacacttttaatggtaaattgtcagactatgaacaaacccactttttaagatattgataaagtcttttcttcacgtgatattttatacaagwacacttcagatgtattggatgtggctgattttaacaaatcctattagatttgtatcaattagttacatgttctattcatagtcttttgtgaatcattgcctttttgtttaaaaagatggcctattttgagcctttgtataagtacattcctgtttttgtgacaaaagaaaaactttaaatttgtcccaaagagaaaaataatggctatcagaagtatgctttgttttagttcgagttaccgttactgtatttgtg

SEQ ID NO: 599481 - DNA, 479 bp, Homo sapiens
attaagtttcacaagctgttagtaatcaagtatattttctcagtttcagatcctctgcgattttattgagtggaaagtcttgcgctgaaagggttcaagaaaaataatattgcatttccttatgtcacaggaaacacttttaatggtaaattgtcagactatgaacaaacccactttttaagatattgataaagtcttttcttcacgtgatattttatacaagaacacttcagatgtattggatgtggctgattttaacaaatcctattagatttgtatcaattagttacatgttctattcatagtcttttgtgaatcattgcctttttgtttaaaaagatggcctattttgagcctttgtataagtacattcctgtttttgtgacaaaagaaaaactttaaatttgtcccaaagagaaaaataatggctatcagaagtatgctttgttttagtkcgagttaccgttactgtatttgtg

SEQ ID NO: 599482 - DNA, 622 bp, Homo sapiens
attgataaagtcttttcttcacgtgatattttatacaagaacacttcagatgtattggatgtggctgattttaacaaatcctattagatttgtatcaattagttacatgttctattcatagtcttttgtgaatcattgcctttttgtttaaaaagatggcctattttgagcctttgtataagtacattcctgtttttgtgacaaaagaaaaactttaaatttgtcccaaagagaaaaataatggctatcagaagtatgctttgttttagttcgagttaccgttactgtatttgtgtattgtaaaggtggacattctaattacattaaaatgtaattagaaaaaagtgcttaatgaacaaaaacagaacatagacaacaaaagaatattagaagtgatgcatgaagaaaacgagatatcaataaaaagatttttaaaaaccaagaaaaattgtgactctgaagaacacagtaactatattaaaaatttaatcagcagtcacaaaagctgatttaataaagcagaaaaaattagttgataacattgmacttataaatactgattcatgaaaacaaattttttaaacagaatagagaaaaaatgaaaattgggacttacagcaca

SEQ ID NO: 599483 - DNA, 623 bp, Homo sapiens
tgctaaacaaaaaccttcaactggaataatttcacttcagaaaaaaaagttaagcatttccaaaacaaataaargttgagtgtgttactaaccactggaacagtgctaaaggaaatgtaaaagaaagtctatcacgtccaaaaatgacaatatatgctgcacagcgtcataggagcatatgaaaatagaaagctctctattaaaggtaaatacataaacagctatagaaacctctactgtcataatgatggtgcacaaaactttcacgttattactatggaatttaaaaaatgaagcagaaagctgcataaatatgggttcatagatactcaataagaaaagataacaagtgatattaataacaaagtgggggtataaagaggtacagctttgcattccattgaaatatagtcattatatattgtcataactttaagatgttttatgaagtctttatttctcaagatgattacaaaaaaacctgtagatggtatgcagaagcaaatgagaaagaaattgaatcatgtcactacaaaatcaatgaagaaaaataaagcagtaagagaaaaaaatgataaataacacatctacaagaaacacagaagacaattacaaataataat

SEQ ID NO: 599484 - DNA, 623 bp, Homo sapiens
tgctaaacaaaaaccttcaactggaataatttcacttcagaaaaaaaagttaagcatttccaaaacaaataaaagttgagtgtgttactaaccactggaacagtgctaaaggaaatgtaaaagaaagtctatcacgtccaaaaatgacaatatatgctgcacagcgtcatagragcatatgaaaatagaaagctctctattaaaggtaaatacataaacagctatagaaacctctactgtcataatgatggtgcacaaaactttcacgttattactatggaatttaaaaaatgaagcagaaagctgcataaatatgggttcatagatactcaataagaaaagataacaagtgatattaataacaaagtgggggtataaagaggtacagctttgcattccattgaaatatagtcattatatattgtcataactttaagatgttttatgaagtctttatttctcaagatgattacaaaaaaacctgtagatggtatgcagaagcaaatgagaaagaaattgaatcatgtcactacaaaatcaatgaagaaaaataaagcagtaagagaaaaaaatgataaataacacatctacaagaaacacagaagacaattacaaataataat

SEQ ID NO: 599485 - DNA, 623 bp, Homo sapiens
tgctaaacaaaaaccttcaactggaataatttcacttcagaaaaaaaagttaagcatttccaaaacaaataaaagttgagtgtgttactaaccactggaacagtgctaaaggaaatgtaaaagaaagtctatcacgtccaaaaatgacaatatatgctgcacagcgtcataggagcatatgaaaatagaaagctctctattaaaggtaaatacataaayagctatagaaacctctactgtcataatgatggtgcacaaaactttcacgttattactatggaatttaaaaaatgaagcagaaagctgcataaatatgggttcatagatactcaataagaaaagataacaagtgatattaataacaaagtgggggtataaagaggtacagctttgcattccattgaaatatagtcattatatattgtcataactttaagatgttttatgaagtctttatttctcaagatgattacaaaaaaacctgtagatggtatgcagaagcaaatgagaaagaaattgaatcatgtcactacaaaatcaatgaagaaaaataaagcagtaagagaaaaaaatgataaataacacatctacaagaaacacagaagacaattacaaataataat

SEQ ID NO: 599486 - DNA, 623 bp, Homo sapiens
tgctaaacaaaaaccttcaactggaataatttcacttcagaaaaaaaagttaagcatttccaaaacaaataaaagttgagtgtgttactaaccactggaacagtgctaaaggaaatgtaaaagaaagtctatcacgtccaaaaatgacaatatatgctgcacagcgtcataggagcatatgaaaatagaaagctctctattaaaggtaaatacataaacagctatagaaacctctactgtcataatgatggtgcacaaaactttcacgttattrctatggaatttaaaaaatgaagcagaaagctgcataaatatgggttcatagatactcaataagaaaagataacaagtgatattaataacaaagtgggggtataaagaggtacagctttgcattccattgaaatatagtcattatatattgtcataactttaagatgttttatgaagtctttatttctcaagatgattacaaaaaaacctgtagatggtatgcagaagcaaatgagaaagaaattgaatcatgtcactacaaaatcaatgaagaaaaataaagcagtaagagaaaaaaatgataaataacacatctacaagaaacacagaagacaattacaaataataat

SEQ ID NO: 599487 - DNA, 528 bp, Homo sapiens
cgttattactatggaatttaaaaaatgaagcagaaagctgcataaatatgggttcatagatactcaataagaaaagataacaagtgatattaataacaaagtgggggtataaagaggtacagctttgcattccattgaaatatagtcattatatattgtcataactttaagatgttttatgaagtctttatttctcaagatgattacaaaaaaacctgtagatggtatgcagaagcaaatgagaaagaaattgaatcatgtcactacaaaatcaatgaagaaaaataaagcagtaagagaaaaaaatgataaataacacatctacaagaaacacagaagacaattmcaaataataatagtaacttcattaactacagtaattacttcaaatacaaaaagttaaataccttaaagaaaatgcataaaatgatttaatggattaagaacaaagaagatccagcaatgtactctctacaagagtcactttagctctaagaacccaaataagttgaaagtagcagtataaag

SEQ ID NO: 599488 - DNA, 528 bp, Homo sapiens
cgttattactatggaatttaaaaaatgaagcagaaagctgcataaatatgggttcatagatactcaataagaaaagataacaagtgatattaataacaaagtgggggtataaagaggtacagctttgcattccattgaaatatagtcattatatattgtcataactttaagatgttttatgaagtctttatttctcaagatgattacaaaaaaacctgtagatggtatgcagaagcaaatgagaaagaaattgaatcatgtcactacaaaatcaatgaagaaaaataaagcagtaagagaaaaaaatgataaataacacatctacaagaaacacagaagacaattacaaataataatagtaacttcattaactacagtaattacttcaaatacaaaaagttaaataccttaaasaaaatgcataaaatgatttaatggattaagaacaaagaagatccagcaatgtactctctacaagagtcactttagctctaagaacccaaataagttgaaagtagcagtataaag

SEQ ID NO: 599489 - DNA, 528 bp, Homo sapiens
cgttattactatggaatttaaaaaatgaagcagaaagctgcataaatatgggttcatagatactcaataagaaaagataacaagtgatattaataacaaagtgggggtataaagaggtacagctttgcattccattgaaatatagtcattatatattgtcataactttaagatgttttatgaagtctttatttctcaagatgattacaaaaaaacctgtagatggtatgcagaagcaaatgagaaagaaattgaatcatgtcactacaaaatcaatgaagaaaaataaagcagtaagagaaaaaaatgataaataacacatctacaagaaacacagaagacaattacaaataataatagtaacttcattaactacagtaattacttcaaatacaaaaagttaaataccttaaagaaaatgcakaaaatgatttaatggattaagaacaaagaagatccagcaatgtactctctacaagagtcactttagctctaagaacccaaataagttgaaagtagcagtataaag

SEQ ID NO: 599490 - DNA, 397 bp, Homo sapiens
gaaggaggctcacttcaacagcctgcagcagtgagggcaagctccaacatgatgaattaggacttccttattccaacctaaactgtgtttataaaagtaattgcatacacaccaaaaaaaaagtctattggtttttaartctaaattttaagtaacaagttaatgggcagttgtttaattggggttttacttcactgctgtacttttaaagaggctgtgaataaatgtttatgaaattaaaaaaataaaataaaaaaataaaaggatactcgacatcactcttctagaaaaatgcaaagcaaagtcacaataatctacggcctcaagccgatatttaaaatagtatgacagctcttcaaaaaatttaaaatgagattattatataatccagcaaacc

SEQ ID NO: 599491 - DNA, 408 bp, Homo sapiens
tgcagcagtgagggcaagctccaacatgatgaattaggacttccttattccaacctaaactgtgtttataaaagtaattgcatacacaccaaaaaaaaagtctattggtttttaaatctaaattttaagtaacaagttaatgggcagttgtttaattggggttttacttcactgctgtacttttaaagaggctgtgaataaatgtttatgaaattwaaaaaataaaataaaaaaataaaaggatactcgacatcactcttctagaaaaatgcaaagcaaagtcacaataatctacggcctcaagccgatatttaaaatagtatgacagctcttcaaaaaatttaaaatgagattattatataatccagcaaacccccttctggctatgtacttaaaatatacaacgca

SEQ ID NO: 599492 - DNA, 621 bp, Homo sapiens
ttcagaccatgccaggattgttctggaaacctatgtgagggaccaacactccgaacccagcagaaaggttttgaaatcctgtgtgagggacaaacgtttagactctcgtagcagtgttctggaatcatatgtgagggacaaatatacagaccatagcaggagtgttctggaatcctatgtgagggacaaacattcagaccctcatagcagtgatctggaattctatgtgagggacaaacattcagacattggtagcattgttctggaatccaatgtgagggacaaacattctgaccctcatagcagtgtaccagaatcctgtgttaggaacgaacattcagaccacagcattagtgttctggaatcccctgtgaggaacaaacatacagaccctcgtagtagtgttctggaatcctatgtgacggccaaatatttataccccaggagcrgtgttctggaatcctcagtgaggaaaaccattcagaatcttgtagcagttttgtggaatcctatgtgagggacaaacattcagaccacagcgggattgttctggaatgatatgtgagggacaaacactaagaaaataacaggaatgttttggaatcctatgtgagtgacaaa

SEQ ID NO: 599493 - DNA, 504 bp, Homo sapiens
gaattctgtgtgagtgagaaacattcagacccttgtagaagtgttctggagccctgtgtgagggacaaacattcagaccacagcaggagtgttctkgaatccaccgtgaggaacaaacattccgaccctcgtagcagtgttctggaatcctaagtgatggataaacatttagacccagtagcagtgttctggaatccccagtgaggaacaaacattcagacaatcgtagcagttttctggtattctatgtgagggacaaacattcagaccccagcagcagtgttctggaatcctatgtgtgggacatacattcagaccctcgtaggaatgttctggaatcctttgtgagggacatgtattaagataatcatagcagtgttccagaatcctatgtgagggacaaacattcagaccccaggagcagtgttctggaatcctatgtaagggagaaacattcaaccaacagcgggagtgttctgaaatcctatgttaaggacaaacatt

SEQ ID NO: 599494 - DNA, 529 bp, Homo sapiens
attgttctgaaatcctatgtgggggacaaacacttcgaacactgcaggagtgttttggaatcctatgtgagggacaaacattcagagcctcgtagcagtgttctggaatcctatgtgagggaaaaactatcagaccacagcaggagtgttcaggaatcctatgtgagggactaacatttagataatcaaagccgtgttctggaatcctatgtgagaggcaaacattcatacactcatagcagtgttctgcaatcctatgtgagggacaaatattcagatcatcctagcagtgttctggaatcctatgtgagggacaratattcagatcatcctagcagtgttctggaatcctatgtgagggacaaaaatgcagacagtcgtagcagtgttctggaatcctatgtgagggacaaaaatgcagacaatcgtagcagtgttctgtaatcctatgggagggacaaaaattcagagcctcccagcagtgttctggaatcctatgtgagggtcagacattcagacaatcgtagag

SEQ ID NO: 599495 - DNA, 529 bp, Homo sapiens
attgttctgaaatcctatgtgggggacaaacacttcgaacactgcaggagtgttttggaatcctatgtgagggacaaacattcagagcctcgtagcagtgttctggaatcctatgtgagggaaaaactatcagaccacagcaggagtgttcaggaatcctatgtgagggactaacatttagataatcaaagccgtgttctggaatcctatgtgagaggcaaacattcatacactcatagcagtgttctgcaatcctatgtgagggacaaatattcagatcatcctagcagtgttctggaatcctatgtgagggacagatattcagatcatcctagcagtgttctggaatmctatgtgagggacaaaaatgcagacagtcgtagcagtgttctggaatcctatgtgagggacaaaaatgcagacaatcgtagcagtgttctgtaatcctatgggagggacaaaaattcagagcctcccagcagtgttctggaatcctatgtgagggtcagacattcagacaatcgtagag

SEQ ID NO: 599496 - DNA, 536 bp, Homo sapiens
gatctggaatcccctgtgaggaataaacattcagaaccctgtagcagtaacctggaatccgatgtgacggacaaacctttagaccccagcagcattgatctggaatcctatttgagggacaatcattcagaccctctcagcagtattctgtcatcctatgtgcgggagaaacattcagaccasagtgggggtgttctgtaataatatgtgacaaacatttcgatcctcacagaagtgttctggaatattatatgagggacaaaggttcagacaattgtagcagtgttctggaatcctacgtgagggacaaacattcagaacctagaagcagtgttctagaatcctatatgagggacaaatgttcaaacaacagcgggagtgttctggagtcctatgttatggacaaacattcagaccctagcagaagtgttctggaatcccatgtgacagacaaacactcaaacaagagcgggagtggtctggaatcctaagttaggatcatacattcagacccccgttgcagtgttctggaattc

SEQ ID NO: 599497 - DNA, 536 bp, Homo sapiens
gatctggaatcccctgtgaggaataaacattcagaaccctgtagcagtaacctggaatccgatgtgacggacaaacctttagaccccagcagcattgatctggaatcctatttgagggacaatcattcagaccctctcagcagtattctgtcatcctatgtgcgggagaaacattcagaccacagtgggggtgttctgtaataatatgtgacaaacatttcgatcctcacagaagtgttctggaatattatatgagggacaaaggttcagacaattgtagcagtgttctggaatcctacgtgagggacaaacattcagaacctagaagcagtgttctagaatcctatatgagggacaaaygttcaaacaacagcgggagtgttctggagtcctatgttatggacaaacattcagaccctagcagaagtgttctggaatcccatgtgacagacaaacactcaaacaagagcgggagtggtctggaatcctaagttaggatcatacattcagacccccgttgcagtgttctggaattc

SEQ ID NO: 599498 - DNA, 531 bp, Homo sapiens
tgttctggaatcctgagtgagagacaaacattcggaacacagcaggagtgttctggaaygctatgtcagggagaataattcagaccctcatagcagtgttctggaatcctatgtgagggacaaacattcagactccagtagcagtgttttggaatcctatttgagggagaaacactcagaccagagaagaaatgttttggaatcctatgtgagggggaaacattcagaacacagcaggatagatctggaaacccttgtgaggcacaaacacccagatgacaggaggaatgttctggaatcctatataagggtcaagtattcagaccacagcagtagtgttctggaatcctatatgagggacaaacattcagaccctcgtagcagtgttctggaatcctatgtaaaagacaaacactcagaaaccaggagcagtgttctgtaatcctttgtgagggagaaactttcagaccacagaaggagtgttctggaatcctaagtgagggacaaacattcagaccaaagcagcagtgt

SEQ ID NO: 599499 - DNA, 531 bp, Homo sapiens
tgttctggaatcctgagtgagagacaaacattcggaacacagcaggagtgttctggaacgctatgtcagggagaataattcagaccctcatagcagtgttctggaatcctatgtgagggacaaacattcagactccagtagcagtgttttggaatcctatttgagggagaaacactcagaccagagaagaaatgttttggaatcctatstgagggggaaacattcagaacacagcaggatagatctggaaacccttgtgaggcacaaacacccagatgacaggaggaatgttctggaatcctatataagggtcaagtattcagaccacagcagtagtgttctggaatcctatatgagggacaaacattcagaccctcgtagcagtgttctggaatcctatgtaaaagacaaacactcagaaaccaggagcagtgttctgtaatcctttgtgagggagaaactttcagaccacagaaggagtgttctggaatcctaagtgagggacaaacattcagaccaaagcagcagtgt

SEQ ID NO: 599500 - DNA, 423 bp, Homo sapiens
atattagacccctgtgccttgccatatatgaaaatcaattcaarctaaagacttaaatgtaatgctatcaattatgaaactattagagaaaaactaaaaaatgctttataacattcgatggggaaaggattattaaaataacatgtcaaaacataggcaacaaaatcaaaaataagcaaacaacattatgtcaaactaaaatgcttttccatattaaaaaaactaaaagattgaagagacagcttaggcaataaaagaaaatgctttcaggctatacatatgacaaaaggctaatattcagaataaataagaaattttaaaatctcaaaataaaatacacttataatctaattaaaaaaatgcaaaagatcttaatagatgtttgtcaaaaagtgatacaaaaatggctaactggaacataaa

SEQ ID NO: 599501 - DNA, 423 bp, Homo sapiens
atattagacccctgtgccttgccatatatgaaaatcaattcaaactaaagacttaaatgtaatgctatcaattatgaaactattagagaaaaactaaaaaatgctttataacattcgayggggaaaggattattaaaataacatgtcaaaacataggcaacaaaatcaaaaataagcaaacaacattatgtcaaactaaaatgcttttccatattaaaaaaactaaaagattgaagagacagcttaggcaataaaagaaaatgctttcaggctatacatatgacaaaaggctaatattcagaataaataagaaattttaaaatctcaaaataaaatacacttataatctaattaaaaaaatgcaaaagatcttaatagatgtttgtcaaaaagtgatacaaaaatggctaactggaacataaa

SEQ ID NO: 599502 - DNA, 423 bp, Homo sapiens
atattagacccctgtgccttgccatatatgaaaatcaattcaaactaaagacttaaatgtaatgctatcaattatgaaactattagagaaaaactaaaaaatgctttataacattcgatggggaaaggattattaaaataacatgtcaaaacataggcaacaaaatsaaaaataagcaaacaacattatgtcaaactaaaatgcttttccatattaaaaaaactaaaagattgaagagacagcttaggcaataaaagaaaatgctttcaggctatacatatgacaaaaggctaatattcagaataaataagaaattttaaaatctcaaaataaaatacacttataatctaattaaaaaaatgcaaaagatcttaatagatgtttgtcaaaaagtgatacaaaaatggctaactggaacataaa

SEQ ID NO: 599503 - DNA, 423 bp, Homo sapiens
atattagacccctgtgccttgccatatatgaaaatcaattcaaactaaagacttaaatgtaatgctatcaattatgaaactattagagaaaaactaaaaaatgctttataacattcgatggggaaaggattattaaaataacatgtcaaaacataggcaacaaaatcaaaaataagcaaacaacattatgtcaaactaaaatgcttttccatattaaaaaaactaaaagattgaagagacagcttaggcaataaaagaaaatgctttcaggctatacatatgacaaaaggctaatattcagaataaataagaaaytttaaaatctcaaaataaaatacacttataatctaattaaaaaaatgcaaaagatcttaatagatgtttgtcaaaaagtgatacaaaaatggctaactggaacataaa

SEQ ID NO: 599504 - DNA, 617 bp, Homo sapiens
tctaattaaaaaaatgcaaaasatcttaatagatgtttgtcaaaaagtgatacaaaaatggctaactggaacataaaaatatgttctacattactaatcactaaggaaatgaaaatccaaaccacaatgaggtaccgcctcactcccatttagaatggctataataaaaataaataaataaataaaacaagtactaatgaggatataaaatgagggaatgtatacattgttggtggaattgtaaattagtatggccactatagaaaatactatggaggtttctgaaagaaattaaaaatagatgtattacatgatccagcaattttactgctgcatgtatatacaaaagaaaggatatcactgtgtcaaaaagatatttgcatttccatgttagttacagaactagttataatagcttatatatggaatcaattcaaatgtacagcaacagataaatggataaggaaaatgtactatataggcacagtgaaatactattcagctataagaaaggataaaattctgtcagttaaaagagcatggatgaaccttgagcataccatgttaagtaaaataagccacatagagaaacacaaatactttatgaccttattatc

SEQ ID NO: 599505 - DNA, 617 bp, Homo sapiens
tctaattaaaaaaatgcaaaagatcttaatagatgtttgtcaaaaagtgatacaaaaatggctaactggaacataaaaatatgttctacattactaatcactaaggaaatgaaaatccaaaccacaatgaggtaccgcctcactcccatttagaatggctataataaaaataaataaataaataaaacaagtactaatgaggatataaaatgagkgaatgtatacattgttggtggaattgtaaattagtatggccactatagaaaatactatggaggtttctgaaagaaattaaaaatagatgtattacatgatccagcaattttactgctgcatgtatatacaaaagaaaggatatcactgtgtcaaaaagatatttgcatttccatgttagttacagaactagttataatagcttatatatggaatcaattcaaatgtacagcaacagataaatggataaggaaaatgtactatataggcacagtgaaatactattcagctataagaaaggataaaattctgtcagttaaaagagcatggatgaaccttgagcataccatgttaagtaaaataagccacatagagaaacacaaatactttatgaccttattatc

SEQ ID NO: 599506 - DNA, 617 bp, Homo sapiens
tctaattaaaaaaatgcaaaagatcttaatagatgtttgtcaaaaagtgatacaaaaatggctaactggaacataaaaatatgttctacattactaatcactaaggaaatgaaaatccaaaccacaatgaggtaccgcctcactcccatttagaatggctataataaaaataaataaataaataaaacaagtactaatgaggatataaaatgagggaatgtatacattgttggtggaattgtaaattagtatggccactatagaaaatactatggaggtttctgaaagaaattaaaaatagatgtattacatgatccagcaattttactsctgcatgtatatacaaaagaaaggatatcactgtgtcaaaaagatatttgcatttccatgttagttacagaactagttataatagcttatatatggaatcaattcaaatgtacagcaacagataaatggataaggaaaatgtactatataggcacagtgaaatactattcagctataagaaaggataaaattctgtcagttaaaagagcatggatgaaccttgagcataccatgttaagtaaaataagccacatagagaaacacaaatactttatgaccttattatc
